United States Patent Application Publication US 2026/0092266 A1 - sequence listing, part 12

SEQ ID NO: 1952 - DNA, 17986 bp, synthetic construct
  misc_feature 1..17986: note = Synthetic
  source 1..17986: mol_type = other DNA
ctttcttttctttactttactgcctaaactttctcgtggggtgttgtcggaacgaatttatttcagccagctttatactcccttcattgtgtcttatagcgaaataggctacggaataggaaaccgatttgtaaacgtggcagtttttggctctttccataagctgaatttccagcagataggcggcaaagtggtgtttttgttaggaaaataggggagaaagggtatcaacgtttttttaactctaaaatggttatttccgggcgaatgcctatacgcatagggatgcctacataacctattccacggtttacataaagatattgcgtgtcctttttatacaacccttcccattgtttaaaaataatacgggcaggtgaaattcgggcacagcggttaatgattcccatctgtccggcgtgggtgtgccccgcaatggtaagaaaaatgtcttttctgcctaccacttctgcatcccaatgcattgggtcgtggctgataaggattttaggacgcgcggagtcagtgccttctaaggctttggataagttgccgtactgatgaaaatgtttctgcttactccagttttccacacctaccagcgtgatagtgtccgccccttttataagttgctcattttcattgagtaataatttaaaaccaagctgtcggatgtgttccttaatttccgccaaattttgggctttgtcagaagcgtgtttccagttggtatagtctccgtaatcgtggttccccaatacggcaaagttaccttgttttgactttaactgccagaaataaggttcccagcctttcaattcattagaaaagttattgaccatatcaccggcaaaaacgatgatatccgggtcttcacggttaatcagatcaatgagcggattcattattcggtagcggttgttccagttgccaatatgaaaatcggcaaaaacggctattttatatccgtcaaaagcgggcggaagattttttacaggaatttcccgctttataagttccaaattatctctggtaacaatatttccatagcccataactcctaccataagtatggaaagtataaaaccaatacgctcaatcaccctccaagataacccgaacagtctgttgattagtttgttgagatatgagaagaaaatataaatactttttggaatgtatataagcgcgaatatgtaaaacgtccattgcactccggaagctactacgtaattatgattgtatcggaacccgaaccgaatgtataaaaatacgagaatgagcagtatgccgggaagtaaagacaaattaatgaaccacttatagaaatgatgcttcttcatctgtctataaaaccaataatcacaaccaataatgattgtggacaacatggccaattcaatccaatacattgtcataagtgggaagttagaagttagaagtgaaaagtcagaagtcagaagcctgcctgccaactgcgaacttttttactatctttgtgcaaaaataaaataaaaaacgatggttgaaactatttttatactcattttaataattatttcggttgattttgtgtttgagcgaatattgtcggcattaaatgtgaaagatgcccgaaaacccatccccgcgttacttaccggtatctattccgaagcggaatatcaaaaacaacaaaattattttcgcaccaatacacgttttggaatggtaaccgcttcgttcagctttttagtgatactggcaatgttcgtttttggcggctttgggtggttggacggatggttgcacgcccgttttcaaaaccccattgtaatttcactgctttttttcggcatactttttattgttaatgatttgatttccataccttttgaatggtatgatacctttgtgattgaagaaaaattcggctttaataaagttactccccgccttttcttaacagataaattgaaaggatatttgctcactatattgattggcggcggtattttaacactgattatgtggatttatcaatggacgccgcagtatttttggttgttggcatgggcgtgtgtcacggttttcggcttgtttatgagtatgttttactcgcagctgattgtgccgctgttcaataaacagaccccgctgcccgaaggcgaactacgcgatgccattgaaagtttttcgaaaaaagccggatttgatttgaagaatatctatgtaattgacggttcaaaacgttccaccaaagccaatgcttattttaccggcttgggaaagaaaaaacgcattgtattgtttgatactttgatgaatgatttgactaccgaggaaattgtggcggtgctggcgcacgaaatagggcattataagcataaacacacgctgaaaaatatgcttatcagtctgcctaattcattgattttgttctttattttcggttggatgctgaaaagcgacgcgctggcgcaagcgctgggtggaacttccgccaatttccatctgaactcgctggctttcggaattttatattcgcctgtttccacgttgctgggtatcgcgatgaacgcgctttcacgtcggtttgaatatcaggcggacgcctttgtgaaacgttttggggttagtgaagctttaatttccgcattgaaaaagatttcttccaaatccttatccaatcttacgccgcatcccgcagtggtgtttataaattattctcatccgccgcttttacaacgagtggaagcgctggtttaatgaataatcagccccctaaatcccccaagggggactttaagagtgaacgatattttacttcaatgcgtaaaaatatcttttttgtagataaatttactctttttccgctacgtacaagctgcatacgcccataaaaaacgttttgtatttcagcgttttaaatcggttccttgctaaaatttccataaattcttttccttgtggaaaaacttccatagattctgtgaggtaagagtaggcattggggtcatttgaaaaggttcttacggaaaaaggaatgaccgtattggtgtaaatcaaatagccttgcttaataatgggcgttttcggctcgctcatttcgaggataacgagttttccatccggtttaagtacacgattgatttccgtgagacttttatctaatttttcaaaatttcgcacaccgaaagaaatggttaccgcgtcaaaactcgcgtcaggaaagctcatttcgctcgcgtcttctactttcagggtaattttatccgataatccggcactttctactttttgccttcctatttccagcatttgttccgaaatatctattcccgtaacgtggtgcggatgaacaatttcaatggctttgatggataaatcggcagttccggcggcaatgtccagtatttgttgaggtttgtaaggaacgagcgtttttaacgcttttttacgccaagttctcgccaacccgagcgacattatatcgttaaatttatcgtattttcccgaaatggaattaaacatccgtcgcaattgcgaggttttaccttcttcttgattgtatggttttacgttgttaatggtcatgttttagcggtaagcggtaagcggtaagcagttagcagttagcaagctaattactgacagctgatagctggtttttctttatttccttttttttgcagggcttttcgtgataatttcttcggttaatggttggtttttactgcggataattagccagacgccccaaataatcagtggaatgctaagtatttgccccatgttgagcaacattccgctttcaaaggcttcttggtcgagtttgataaattccagcaaaaagcgcgtgccgaaaataccgatcaggaacacgccgaaaagtagtccggacttgcgataggcttgttttttccaatacatccaccacagaatggcaaaagttacaaggcagtaaagcatttcataaatttgtgtagggtgatgcggttcggtttggccatctcgtacaaaaataaatccccacggcatggtggtggcgctgccgtaaatttcagaattcatcaggttgccaaaacgtatgcaagcgcctgccacagccgcgcctatcactaacctgtccattccccaaagaaaacctttatgagtaactttcttgttataaagatacatagcgatgatgataccgatagcccctccgtgactcgctaaacctgccaaaccgccgttaaaaacgttaaatatttgccaaggctcggcaaggtattgatttccgtatctgaatgtaatgccgaatagctgaaaaggttcttttaacagatgccattcgtagaataaaacgtgtcctaaacgcgcgccaagaatagttccgattaaaacgtagataaactgcttatccatccatttttcgggcaaattctcgtgtttgtagagtttttgcacaatcattaatgctaaaaatatacctattgcccatagtaagccgtaccagcgtatgggcagggaactgaaaatttcaggacgaacgttccaggtgatgtagtgtaacataattttagtaaacgagttttttagtaaacgagtaaacaagttttttagtaaataaagggttatttgatgcttataaccatagaccattgactaaatgctcatctcaatcacattatccggcacgtttttatcaaaatctttgaggtcaaccatccaataattgtttcccacggatttgatgtttacttttttgctgttgataaagtactttgccgattttattttttgcggcagttgtaaaaatagagcgtcttcttttttgtccaatacgtggatgtatattttatctgatttttgggtaatggcgccccaaggctgcggtttaagcgcgccgccgcgtgtgccgtaaacggtttcgccgtattgtttcagccaatttcccacttcttccagccttgtaacaaattcgggctgaataacgccgttaggcatcggacctacgttgagtaataaattagcgccataacctgccgcccgaacgagcagatgaacaatttctctggtagatttataagaatggtccgtaatgttaaatccccaagaaccgttgatggtttcgcacgtttccagcggtagtggcgacacgtcttgtccgcttaatccacctttattttcgcccggcaggtcacgctcaaacatctggaaatcttcgcccgcgaaaggggtcaagtggtgattatttccaatcaagcattgcggttgaagcgagtgaataagcgagtaaatctcatcataacgccaatctattttggattgcaacgttttatcgtggtcgttatccaactgatcccaatgtccgtcaaaccaaatgccgcttatttcgccgtagttggttaaaagttcggtgagctgcgctttcataaagcgcaggtaactgttataatcgcttttggcagttctgcctgtgccttttcctgttttgcctgtttcgtaagggtaatctgtgcggtaccaatctaacaaagagtagtaagcaaagagcttaatgccttgcttgtggcactcgtccgccaattgtttcatcgcgtcttttccgtaaggggtgttggtaattttccaatcgctttgctgcgtgtcccagttactgaaactatcgtggtggcgcgtgataaaggtaatgtatttcatcccggcgtttttggcggctgacacccatttttcggcatcaaattgcgtgggattaaagatattttgcagtttgtggtaatcttctactttaatgtttcgattgtgcattacccattcgccgtgtccgagtacactggacgcgccccaatggataaacatgccgaatttggcattctgaaaccactcgcgggcttgcaggttttctggggcaggttgataattttgctgcgcttgtagcgtaataactgtgagccaaattgataaagtaaagattgttttcttcatgattttataacttaactaacgggaatgtccctcgcttgtagcgagggacgaggtggttaaatgcttttagcattagaacgctaaaagcgttcaaccgacaacccctcgcttgcagcgaggggtatgtttagctattcattccgtgacagtttttgtatttcttaccgcttccgcagggacaaggatcgtttcgtccggcttttttctctaccttgataggctgtgttacctgtacttcgcgagtatcttgcttggtggggtcataatcgccgccggaagaggtgctgctgcctgcttcgtctttacgggtattgtatttgctgtaatcggaacggcgttgttgctcgccttgacgcacttcgttagcgtcgcgggtaggtatttgtccacgcatcaagatagccagtaccttgcgattgatgctgtcaatcatctctttgaacagtccgaacgattcaagcttgtaaatcaacagtgggtctttttgttcgtagctggcgttttgtacagaattgcgtaattcgtccaactggcgaagatgctctttccactcgtcgtcaataatataaagcagggtttgtttttggaaatctttaattacttcccttccttcatttttataagccgtttctaatcgggtggtgatattgaaaacgtgtttgccatcagtaatcggtattaaaatgctttcgtactgactgcttttgttttcataaatatctttgataacgggcatagccaccgaagtcattttatctattttacgtttaaatgcttgatgagcggcttccactacgtggtcggtaagcgttgccggtttcattgaacgaaactcctcttcggttacaggcgcatccatcgcatagactttcatcaaatccatttggaactcttcaaagtcttcgttatttttagtggctgtcgaaatggcttctgcgccatcgtaaatcatgttggaaatatccacgccaatacgttcgcccatcagcgcgtggcggcgtttgccgtaaattacttcgcgttgcgagttcatcacatcatcgtattccaataaccgtttacggataccgaagttattttcctctacttttttctgcgcgcgttcaatagattttgaaatcatcgaactttcaatcagttcgccttctttaaatccgagtttgtccatcacgcccgaaatacgttcggaaccgaataaacgcatcaaatcgtcttccaacgaaacgtaaaatacggatgaacccgggtcgccctgacgtccggcacgtccgcgcaactgacggtccacgcggcggctttcatgacgttccgtacccacgattgccaaaccacccgccgctttcacttcgggggtaagtttgatgtccgtaccacgtcccgccatattggtagcaatggttacagtacctgtgcgtcccgcttcggctacaatatccgcctctttttggtgaagtttggcgttcagtacgttatgcttaattttccgtccggtaagcatacggctgagcaattccgaaatttccaccgaagtggtgcccaccaatacggggcgtcccgcttctaccaactgtacaatttcttcgataacggcggtgtatttctcgcgtttggtcttgtacacgcggtcttccatatcgtttcgggaaatggggcggttggtagggataaccaccacatccaacttgtaaatgtcccaaagttcgcccgcttccgtttcagccgtaccggtcatacccgagagcttattgtacatgcggaaataattttgcaacgtaatagtagcaaaagtttgtgtggcagcttccacttccactttttcttttgcttcaatcgcttggtgcaatccatcggaataacggcgaccttccataatacgtcccgtttgttcgtccacaatttttactttattttcaatcactacgtattccacatcccgttcaaaaagcgtgtaagctttcagcaattggttgatggtatgcacgcgttccgattttatggcgtagttttgtaaaatatcgtcttttttcgcttgtttttcttcggctgaaagggtagtgtctcgttccaattctgccatttcctcacccacgttgggcaatacaaacaagaaaggatcatcagaattcccggtaatgaggtcaatacctttatcggtcatctctatctggttatttttttcatcaataacaaaatagagcggatcggtagcttcgggcatacggcggttgttttgttccatatacacctcttcggttttgagcatggctgctcttaccccttgctcgcttaggaacttaatcaacggtttatttttaggcatccctttaaaggaacggaaaagggctaacacaccttcttcctgttctttttgattttccgatttcattaatcggcgagcgtctgccaaataattggtaaccaatgttttttgcgcgtttaccaagcgttctactttgggacgaagttcatcaaaaagctggtcttcgcctttgggtacgggaccggaaataatcaacggtgtacgggcatcgtcaatcaataccgagtccacctcatccacgatggcgtaattatgcatccgttgcaccaaatccagcggactggttgccatattgtcacgcaggtagtcaaaaccaaattcgttatttgtaccgaaagtgatgtctgccatataagcttggcggcgggactcagagttaggttggtgtttgtcgatgcaatccaccgacaagccgtgaaacatgtaaagcggtcccatccattccgagtcacgttttgagaggtaatcattcacggttaccacgtgtacgcctcggtggggtagggcgttgaggaaaacgggaagggttgccacaagggtttttccctcaccggtagccatttcggcaattttgcctttgtgaagcaccacgcccccgaaaagttgcacatcgtaatgcaccatatcccacttgatgaggtttccgcctgccatccactcgtttttatagtgggctttgtcgccgtggatagttacaaagtcgtgtttagtagctaaatcacggtcaaaatcgttggcggtaacaatcacttcggggttttcatgcagtcggcgtgcggtgtcttttacgatggaaaaagcttcgggaagtatttctaaaagtacatcttcaatcttggttttgatgtctttttccagcttgtccacctcgttgtaaattttctcacgaaggtgtatttccgtgtcttcaatgctggcttttagttcggctatacggtcgttatcggcggctataacgctttgtatcttggcttttagagtttctgtacgcgcgcgaagttcatcgttgcttaacgtcttaatttcttcgtaagcggctttaattttttctacttcgggcgatatttctttcatatcgcgcgtggctttgttgcctattattttctttaaaaaatcgttaaatcccatattgttatgttgttcaaaagttcaaaagttcaaaagttaaagagttcagaagtttattgagttagcaaatataagtaagaaacgtatctaaattcaccccatttttcatttcaccgatttaccattcaactaatccaccaattcccctttttaccaaaaattaggcaaagatacatattttttgcgagttaattttaagattttattattggatatgataaaaattgagaatgtgtggggacaataatcgggctaaatgattttgtgcgacagaatggcagaggattttatgaaaaaaggcgaggtgttatccccgccttgaatgttttcacaacggaataatccttattgtgaattgctttcaaaaatttatgttgacaaaaataagtataaatattttaataaaaaagttttttaagttaaaaaatatttaataaatttacggcagaaaaaataaacgatttattgaaaagaaacaattcacaactaacttctaataagaaaaacaaaacaaaattaaaaaataaatttgaatattagaagttagaaaataaaattttttatatttgcaccataatttaattaaaattacattttactatgaaaaaatatagaataggatttgatttaggtataggctctgttggacacactcttttggagtttcaagaagacggtaaagtaaaaattttatcaatgggaagtagaataatacctatgggaagtgataaaattgattacgaaaaaggacaaggaatatctaaaaacgcagaaagaagattacaaaaagggattagaaaatccaataagcggttcaaacaaagacgtaacaaattaatttatatattggataaattgggaatgttgcctgaacaaatcgtcttaaaaaatggcattccagaagctaagaagatacaacatttggaaatactaccaataacaaagggaacaatgcagttagatagtgttacttttttagcgatgagagtaaatgcattaaataaaccaatggcggatattaaggattttggaaaaatactttatcgttttaatcagttgcgcggatattcaggaggggataattatgagcaggcagatgttagaaattataagaaagaggaggatgaagaggaggacaatagaaagtatagagtggaaatcgcaaaagtcgacgtaacgaacatagagaagttagattctacttttaagtataaaaatcaagacttaaataagtatgaattaactatcatttgggatggagaagaaattaccggagaaacaaagttacaagacttggaattaggcgaaaaagaattggaattacgtataaagactaacaaaaagaaagaaaagtcctatgaatttgcgcttccaagaaaaacaaattggcgtaaacaaatggaagcaacggaggaattgttgacaactcagcaaaaatttataagtgaacttttgttggaagacctgacgagtaacaaatcaaataaaattagaaatcgtgtttttttaagaaacagatataaagatgagtttgataaaatttgggatacacaatcaaaaaaattcgacatacttaataattgtccccgaaatatattggaagaaattgcaaattacttgtttccggggcaatccgccacacaagtgaaattaaagcaacagtcattagaaggcggattaaaatacataataaaagaacaaatcatctattatcaacgcccactaaaatcacaaacagacctaattcgtcagtgccaatttgaagatagtgaaaaagttatagccaattctcaccctgattttcagtattttagatgttgggaccagattaaccgtttgtatataacctctaaaaaagaagtttttgacgctaaaaaaaataaaaccaaatatcaataccatgaccgcttcctaaccaaagagcagaaaaatgaaatctacaataaattgcagatacaaaaacaggttgggtttaatgatgtggcaaaaatcgtagccctaaaaaacgataaatctgaatatttgaacggattgcacgtcaaggcaaaattaaaaggttgcgataccattatttctatcaataaaattctaaaacaattcgggtttaatgaaaaacaacaacctttttatagcgatatttggactattttatacaacaaaacgggcaatgaatatgacatacacagtgagaaactttcaaaccttattgactatttaaaagctcattttgattattccacggcagaaaaattggcattggaattagctcaaaaaataaaatttccaaggcggtatgctaatctatctttaaaagcaatcgctaatattgtgtcgttaatgaagttgagcccggcagacgttccgcaaaacattaaaagcaactttgagaacgtattgcgcttgatacaaatgggagaaatcaccaacgagttaatagcagaaaattatataatcaattttgtaaaagataaccctaacgccatcaatgaaggcgggttaatgtattcgcttgccgcttcattaatttatggcaaacacacggcaaaagatgtaaaaaaagagataaaagattatcacgatattcaatatgtttctaatagggggttacgtaatccggttgtagagcagttaatgaacgaaacaatgcagataaccaaagcattgtggaaaaaatttaatcttaatgccgatgaattagagtttagagtggaactcgcaagggacctaaaaaacagtgcggctgaaagagaaaatatatttaaggcacaattaagaaacaaaaaaggaaatgacgcagtaaaagaaattttgacaagtgaaaacataccattaaccgatgaaaatattcttaaatataaactgtataaacaacaaaacttaatttcgccttactctttgaaaaccatgaaaatcagtttgtttaatgagtatgagatagatcatataataccaaaatcaagatattttgctgactctatatccaataaagtattggtagagtggtatttaaataaagaaaaaggaaaccgcactgcttgggagtatatatcggcacaaaatagtcagcataaaattgccgatgtggaaacatatcttgcttatgtaaatgaaaactattttggaaagaaaaagcaccatttgctgatggagaaaatccccaataatctaattgatagaagtttaaaagatacacaatacatttccgttgccgtaaaaaacgagttagcaaaaatagtaggcagcgaaaatgtgaagacaaccacaggggaagttacagcttttctacgtggcaaatggggattgagagaacttttgatgcgtcttaccgaagaacgcttccgaagaatggaactttgggattgggacaacgaaaaagatgcgccaaatgtatcgtgggtcaataaatattttgacacagaattaaacaaaaatatctactcaataaaaaattggaataaacgctatgaccaccgccaccacgccattgacgcgttagtagttgctttaaccgaacaaggatttattcaacgcctgaataatctaaacaaagaacttcaagagtggctcgaaacaaataaagacagagtcaaactgaatgtaaaagaagatgaaacggtattagaagctttctttaatttgaaagaaacagaacgggaaattattcaaaaacaaatacccagtttccaaaaaatcgaaagaccaatacacgatttgattgcacaagcgcaaacacacttagaaacaatgattgtttctcataaaaagaaagacaaaatagacacaaaaatagatccgaaaggcaagaaacaattaaaaatccgagcagcgttgcacgaggcaacttattatggtaaaacaaatgggatagataccaaaacaattgacatatcccagctttcagccaaagatatatccaaaataattgaccgacatttggcaaatgaaatagacgctcatagaaaaaaatatgatacgattcgagaggcatttaccggcgaagggctaattacatttaatgaaactcgtttccaaaagaaaaattccgataaactgaaaccgcccgtacataaggtaaagattagatacagtaataaagaaacagaagaaagcacattgaaatcgttgtatggtatacattctaaaaaatcggttgtaacgggagataattatttatttgtagttatgcagagaaattctaaaaaagatttgcccgagcgcgtttttgatattgcatcgctttttgactcggcagacattgctcgtgcggcattaaaagaaggtaaagaaaattttaaagaaataatttgtgaatcaatgagattgacttggggagaaagaaataagataaaagatatttcacaaaatcctacaaaagtattattttccttacagcaaaatgatttggtatatatgccatcagaggatgatttagtgctaaatatgacatcagacgaattcgacgaatggattgtcatacctgaaaataaaaaacaatttagcaaacaagtatataaagtggttaagtttacaggtaaagattgtttctttttgcctcataatattgcaaaccctataaatgtgccgagagatttatcgaaagaaaaaagagatgaattgaaacaaatatataaagataagactattcccaaaacagaattaaattatcaggagtttagttcatttggtaattgcttgaaagtagaacacaatgataattttgtgaaaaatattcaaggaaaagaaaaacagaaagaacgaaaaatacaagattattgtataaaaatagaaacagattggttaggacaaattaaaatattcaaatgatcaagcgcaccctctatttcggcaaccccgcctatctttcgatgaaaaacgagcagctcgtcattcacttgcccgaagtggtaagaaacgacgatttgcccgaaatgttcaagaaagaagcggtaaaaaccatcccgattgaggacatcggcgtggtgattttggataacaagcaaataaccattacccacgggctgatggaaaaactgttgtcaaataactgcgcgttgattacgtgtgatagtaaccggatgccggtggggttaatgcttcctttatccggcaataccattcaaacagaacgtttcaaagaccaaatagccgcttccgtgcctcttaaaaaacaattgtggcagcaaacagtgcaggcaaaaattgagaatcaggcgtacgtgttggaaaattgttcgggcgccgtggtaaaaaatatgcaagtatgggctgcggatgttaaaagcggagaccccgataattacgaagcccgcgcggcagtatattattggaataatttatttccccaaattcagggctttacgcggggaagagaaggcattccacccaacaatttgcttaactacgggtatgctattttacgtgccgtagtggctcgttcgctggtgggaagcggattattgcctaccctcggcatttttcatcgcaacaagtacaatgcttgctgtttggctgatgatattatggaaccctatcgcccgtttgtggataaattagttttcgagatggttgccggaggcgttgatgtttcagaactttcacaagagataaaggcaaaactgctcggaattcctgttctcgatgtggaaattaacggccaacgcagtcccctcatgatagccgcaggacaaactactgcctctttggcgcagtgtttttcgggcgaaatccgaaaaataaaatatccaagctttacttaaactccccctttgggggagttagggggctttaatatggaacgatttagtgaatacagaattatgtgggtactcgtttttttcgatttaccgactgaaaccaagaaagaccgaaagatatatgcggactttcggaacaaactgataaaagacggattcacaatgtttcagttttctatctacctgcgtcattgtgccagtcgggagaatgccgaagtacacataaaacgtgtaaaaaaccttttacccgaaaaaggaaatatagggataatgtgtattaccgataagcaatttggcagtatggaaattttttacggtaaaaaaccccaagaaaagcagaccgaagggcaacagttggaactcttttagaataaaaaatcccgcctactaagcgggattttttattgctgaacaactattttttttattgtaatttctgttgcaactggttgtgatttagcgacataataatatcctgttgttcagaatatcaaagatacaaacttttgaaagcaattcacaagtagtcctgaattaatgaaaattttttcattgttgttcagaatatcaaagatacaaacttttgaaagcaattcacaagttagaaacgaaagtattgggtcaagacgtgttgttcagaatatcaaagatacaaacttttgaaagcaattcacaagtaccgtgaacggaagaaacgtaaacgacaagttgttcagaatatcaaagatacaaacttttgaaagcaattcacaagttcattgcagagtataatttctgcaatgatgttgttcagaatatcaaagatacaaacttttgaaagcaattcacaaggagcatcaaaacgcgattgaagattgcaacgttgttcagaatatcaaagatacaaacttttgaaagcaattcacaagtctatgggatcagcattcttgtcataatcgttgttcagaatatcaaagatacaaacttttgaaagcaattcacaagtcgttatttgggtttaatcggtgaatatgcgttgttcagaatatcaaagatacaaacttttgaaagcaattcacaagttatttcaataaattcttctgaggggttaagttgttcagaatatcaaagatacaaacttttgaaagcaattcacaagaaaatctttcgtaaagtgctgggttttcgggttgttcagaatatcaaagatacaaacttttgaaagcaattcacaagaacaacgcgcaaggaaactttgacgcgctggttgttcagaatatcaaagatacaaacttttgaaagcaattcacaagacattcatttgtcgcactaattcactgcttgttgttcagaatatcaaagatacaaacttttgaaagcaattcacaagatcttccataactaaaacatttgccgctatgttgttcagaatatcaaagatacaaacttttgaaagcaattcacaaggatatttggtagattacttttttggcgtgtgttgttcagaatatcaaagatacaaacttttgaaagcaattcacaagacggcgtgccagtaggcgtccgctttggagttgttcagaatatcaaagatacaaacttttgaaagcaattcacaagtcttctacgccgttatattttattccgccgttgttcagaatatcaaagatacaaacttttgaaagcaattcacaagttttggctgattattttacgcaaaacatccgttgttcagaatatcaaagatacaaacttttgaaagcaattcacaagtgttatttcaacattagctttttcttcgcgttgttcagaatatcaaagatacaaacttttgaaagcaattcacaagtcaagtgttggcgctgactattcagtatttgttgttcagaatatcaaagatacaaacttttgaaagcaattcacaagtaaaaaaacagtctgaaagcggatacgatggttgttcagaatatcaaagatacaaacttttgaaagcaattcacaagaaaaacattccaagttccgttggtgtccaagttgttcagaatatcaaagatacaaacttttgaaagcaattcacaagtcaattgtcataacttattgtattatagtggttgttcagaatatcaaagatacaaacttttgaaagcaattcacaaggttgaaacaacgttcttttatttttttccagttgttcagaatatcaaagatacaaacttttgaaagcaattcacaagacaatcacatttgcaagtccaatgaatgttgttgttcagaatatcaaagatacaaacttttgaaagcaattcacaagaatgtttttcgaccggataaactcaaaacggttgttcagaatatcaaagatacaaacttttgaaagcaattcacaagttcgccaatagacaacccgcaaaatacagggttgttcagaatatcaaagatacaaacttttgaaagcaattcacaagtagattaccattttattagttgatgtaaatgttgttcagaatatcaaagatacaaacttttgaaagcaattcacaagacactcaatcgagggcagaaatatgggcttgttgttcagaatatcaaagatacaaacttttgaaagcaattcacaagacctaccttcatatacccgagaatagcggtgttgttcagaatatcaaagatacaaacttttgaaagcaattcacaagagaaagccaaacaactttccgaatatgcaagttgttcagaatatcaaagatacaaacttttgaaagcaattcacaagtcatttagcgttcctcgaacccgaactattgttgttcagaatatcaaagatacaaacttttgaaagcaattcacaagctaa

SEQ ID NO: 1953 - DNA, 17616 bp, synthetic construct
  source 1..17616: mol_type = other DNA
  variation 17373..17467: note = n is a, c, g, or t
  misc_feature 1..17616: note = Synthetic
acaacaaagtttatttgcagaaaaatcactctccttgcttaatgaaagctatgatgaaatgcgctctatttcgcaccaaatgatgcccaatgctttaataaaatctggattaacttctgctgtaagagaatttatcaataaaattgacgagcaaaaacttaaaatcagtcttgaaacagaagggttagatgaaaagcttgatgaaaatatagaaactgctatttacagaatcatacaagaagcggttaataatgtggttaaacatgccaaagcttcaaagcttagtatacagatttttaaagacccgcagggcatcaccctaactatagaagataatggaattggttttaatgtgaaggaagtgaatcagacttctggcataggattaaaaaacatacaaaacagagtacattcattaaaaggaaatttagaatatgacagccgttttgggagtggcacattggtaaatatttatatcccaataagcccataaaaaaaggccggattgagattccagcctttaaagtttattttagattattattgtttatgcaagttttgctaattcttctgccattgcagcaccaataccagcaggagactccactactctgataccacattcgctcatgattttcattttagcagcagcagtatcttctgcaccaccaacaatagcaccagcatgccccattctacgtcctggaggcgctgtttgaccagctataaaaccaactactggttttgttccgtgttctttaatccaacgggcagcttctgcttccataccaccaccaatttcaccaatcatgatgataccatgcgtatccggatcattcattaacaactctacagcatctttagttggggtaccaatgatagggtcgccacctataccaatagccgtagtaatacctaaacctgcctttactacttggtctactgcctcataagttaaagtacctgatttagaaactacaccaacattaccttttttgaagataaaacctggcataataccaattttagcttcatcagcagtgataatacctggacagttaggtccaatcaaacggcaatctttatctgctatatattctttaacctgaatcatatccttggttgggataccttcagtaatacaaacgataactttaattccagcttcagcagcttccataatagcgtctgctgcaaatgccggaggtacaaaaatgatagatacatctgcaccagccttctcaactgcttctttaaccgtattaaatacgggtctgtctaaatgggtttgtccgccttttcctggtgttacaccgccaacaacgttagttccgtactcaatcatctgggtagcatggtaagtaccctcatttccggtaaaaccttgaacaataactttcgaatttttatttacaagtacactcatggtcaattttttgtatcgcaaaactaagataatcggctaaaaccgcaaaagatttggcaaataactttctaaaaaaataatttgtggcattcaacagataaaatagcgtaaaaagccaatttcagatctttttactttctacttaaatccttcaagtcaaaacctctgttaataatttcatttctatatgtggcgaatgtttttcataaagaatggcataaacagctctagcaataggcatgtttactttataagttttgttaatttggtggatagagttaaccgcatagtacccttctgcaatcatattcatctctagctgagctgattttacagtatatcccttccctatcatattaccaaaagttctgttcctgctaaactgagagtaagcagttaccagtaaatcgcctaaatatgcggattctttaatatctctgttaatcgggtgaatagcagcaacaaatctctccatttctctgatagcattagaaattaataccgcttgaaaattatctccataaccaacaccatggcaaataccactggcaactgcataaatattttttaaaacagcagcatactcagtcccataaatatcatcagaaatatttgttttgatatacctattgctaatcattgaggcaaatgtttctgccaattgtaaatctggcgaggctatggttaaataagaaagtttttctaacgctacttcttcggcatggcatggcccactaattactacaatatcttcaaacggtacttgatattggtgatgaataaactcggctataatttgattttcatcaggaacgatgcctttaattgccgaaataattttttttccttttaaatctttcggagttaaatcagcaaaagcatctttcaaaaatgctgcaggtacatttaacaataaaatttgtgcgttttttacggcctttcttatatcagtataaatatgatttgcatctaccttaatctctacagatgataaatagttggggttgtgtttatatttacgaatatgctcagcagcatcctcacttctcatccaccaatagatatctttttccaacaaattgtcgctcagcatcttcactattgctgttgcccaactaccacctcctataacggctatcctgtttaacttatcctgcatggctgaataaatagtttttaaataaaaatgtcccgctcttgagcagaacgggacaaattacagattttcctcgaaaatcaaacgattgcgtgatctaagttaacccaatcactatttcttttcggtattaaaaagctttgatttatctacaatttcaatctctattttatcttttaaagttttagatatggcaaagtaaggcgcactaattacttgctgaccagcttttaaacccgataaaataatgatgttttgatcatcctgaatacctgttttaacagctacttgtttagccaacccattctctgcaacaaaaacatattctttaggcttttctttactttttccatttttctcttcgttattgcttggtccatcctccttattctcgtctttattttcttcttgcctaatggttacactttgtattggaataaccaaacctcttgttttttctgtttgtatatcaactgttgcagataaaccaggtttaaaaggtgatacatcagcattttgttgtgctaaattttgataagatgttttcagaattctaatcttcactttaaaattagttacctgatctgctgtttctcctaccacatttgcagaacttgcaatttccgttacaatacccttaaactttttatccaaaaaggcatccacttctataatagcggtatcgcctaagcttaacctattgatgtcattctcatttacatccacattaacttccatactatttagattagctatggtcatcatctctgtacccgtcatttgtgctgtccctacaacacgctctcctctttctacagaaagtttagaaacaaccccatccaccggagcataaatattggtacgagccaagttatcactagcttcttttacaacagcaccagattgttctaacccaaatttagctcctatcagattttgcttagctgtttctaagtttgatttagccgttaaatactccgcttgtacagcatcaaactctgccgcggatattactttttctttataaagcgtttggtttcttttatatctagcttctatattcttgaaattagcctgcgcctgtacaatttgttgttgtgcactggcaactgttgctttttgtgcattgtatgaagctactgttcgctcatatccagaagctaaaatatctggttttatcttacataaaagctgacctttctttaccatatcaccttctttaacatgaagctctacaatttctccagacacctcaggactcagttttacttcaatttcaggctgtattttaccacttgcagaaactgtttcaataacatctttaacttctgctttggttacagccacttgtatagctttaggcttacctatccagcccattttcttactcacaacaagtgcaatagcaactacacctaatacaattaatatatttcttaatttcttattcattttgtattgatttataaattgataggattacctaaataaaagtcgataacttttgctctaaaaagcaaatcatacttggcctgtataaaatcaaactgagctttgttataattggtttgagaagtatttaactctatagcattagccaagcccacatcataccttttcttaatgacttcaaatgcgtcttgtgatgaagttaagctggattgcgtagaaacatatctcttttctgctgaacgtaaatctaaaactgcctgattgatgattttattcaaattgtttttagcaagctgctctgttactaaagcgtcttgatatcttattttggcgatgttaacaccagatctagaacgataattattaaaaatcggaatacttaaatcaacaccaatgaatttactcacgttattttctaattgacttttaaatgaaaaaggtgaaatattagaataagatgtccctaatccgccaccaaaagaaagagaaggataataccctccttttgcgacttttatagctgtttttagtgcttccgcattatatgctgcaagttttatatcaggataattttcaactgctttcatgtaaacctcatttccctcacgataaacatgtgtatattgaagagatacattaggagtttgcactataatttcttgctgaggatttaactccatcaattgctttaactctaaaattgagaggtcataagcatttttagcattggtcaaattcaactcattagttgccaattgggctttaacttgagataaatctgctaatgttttattaccaacatcaaaattcttttgttcaacattaagttgagcatttgataatgctacttgttgctcacttgccgttattaaatctctattggtcagaacctgtaaataagatgtaactactgaaagtgtaaggtcatttttaactttctcaatattggtcttatctgccagtagtgttactttattttgtagaatttggtttcttaattgcccaccttgaaaaagagtgacggatgaatttaaatttccatttaaaccatctgcgtcattaacaagacgaccagtaatttgatcaaagaataatccgaaacgcctattagcagaagcagcccctctaatattgggcaaaatttcatatctcgattgtttaaggttctcagaagtaatatccgtctgaaattgcgcctgcttaacctgtagattattttgcaaagttagcctaattgcctcattaagatcaattcttagagaatcttgtgcttttactattgatgaaagaatcagaaaaaaggcaaaagcactaaaattcttaagtaaaaacttcattttaatatatttcatatttatatttcatctttgcttcttataaataaagcaatcttaagcaatgtatttggttaaaacaccctggctactaaaaaagttctatcctaaaaacttagtttggaacaattccagagctgaaaaaattatttatttgacttttgacgacggacccatacctattgttacaccatttgtgttggaaatcttaaaaaagtttaatgcccaagctactttcttttgtataggagaaaatatcaacaaacatcctcaaatttttgaacaacttaaaaccgaaggacatgccataggaaaccatacttataaccatcttaacggctggaaatcagatgataaaacttacctccacaatattttaaagtgccaggaattaactcagacaaatattttcagacctccttacggaagaattaaaaagtcgcaaatcacgttattaaatcaatttcaaaacaatcaggatctaaaaattatcatgtgggatgttttaagtggagattttgatacacaactatctccagaaaaatgtctaaaaaatgttttaaaacaaacagaaaatggctctatagtagtttttcatgatagtttaaaagcttatgacagacttaaatacacacttccaaaagcactggaattttggcaatccaagggttataaatttcattcaattcaataaatttcttctatacaggtaaattatttttataattttccagaatccattcaagaattgatcatttaccctatttagactctatataaataataaaagtacacataaatggcattctaaagtgcttttttttgtaaattagccgcccaacatagaaacgtatattaaacttataatcaattcaataccatggcatttgatttagacatgatcaaaaaggtttatagcaactacggaagcaaagttgatgctgcccgtaaagttgtaggaaaacctttaactttaacagagaaaatactttacgcacacctttgggatggaaatgctcatacagctttcaaaagaggtacagattacgttgattttgctccagaccgtgtagctatgcaagatgctacagcacaaatggctttattgcaatttatgcaagctggcaggccacaagttgcggtaccttctactgttcattgtgatcacttaatacaagcagaagttggcgctgataaagatttagcaactgcaaatattcaaaataaagaagtttacgatttcctttcttctgtttctaataaatatggtttaggattttggaaaccaggtgcgggtattattcaccaagtagttctagaaaactatgctttccctggcggtatgatgattggtacagattctcatacacctaatgctggtggtttagggatgattgctattggcgttggtggtgctgatgcttgtgatgtaatggctggcctagcttgggagctaaaatttcctaaactaattggtattaaattaaccgggaaattatctggctggacttctgctaaagatgttatccttaaagtggcaggaattttaacagtaaaaggtggtacaggttatatcgtagaatattttggagaaggtgctcgttcactatctgcaacaggtaaaggtaccatctgtaacatgggtgcagaaattggtgcaacaacttccatatttggttatgatgaaaaatcagaagcctacttaagaaatacagccagagctgatattgctgatttagcaaatgctgtaaaagaacacttaaccggtgatgatgaagtttacaataatccagagcaatactttgatcaagtaattgaaatcaacttatcagaattagaaccacacatcaatggtccttttacacctgatttggcttggcctatctctaaatttgcagcagctgttaaagaaaacggatggccagcaaaattagatgttggtttaattggctcttgtacaaactcttcttacgaagatatttcaagagcagcctctcttgcacaacaagctatagacaagaatttgattgctaaatcagaatataccatcactccaggttcagaacaagtaagatacactgtagaccgcgatggtttcttagatacatttggtaaaatgggtggagttgttttggcaaacgcttgtggtccttgtattggtcagtgggctcgtcatggtgcagaaaaacaagaaaaaaactctatcatcacttctttcaaccgtaactttgcaaaaagagctgatggtaacccaaatacacatgcttttgttgcctctccagaaatggttactgcattagccattgctggcgatttaacttttaacccattaacagataccttaaccaatgaaaaaggcgaacaagttaaacttgatgagcctaaaggttgggaattaccagctaagggatttgctgttgaggatgcaggttaccaagctccggcagaagatggcagtaaagttgatgttttggtagatccaaaatcttcaagattacaattattagatccatttaaagcgtgggaaggcacagaccttaaaggtttaaaacttcttatcaaagctaaaggaaaatgtacaacagaccatatttctatggctggtccttggttaaaattccgtggccatttagataacatttctaacaacatgcttattggtgctatcaattattttaatgataaagctgataccgttaaaaatcaattaacgggcgaatatggtccggttcctgcaacacaaagagcttacaaagctgctggcattggttctatcgttgtaggagatgaaaactatggtgaaggttcttcaagagaacacgcagccatggagcctcgtcacctaggtgtaagagcaatactggtaaagtcttttgcccgtatccatgaaaccaatctgaaaaaacaaggtatgttagctttaacatttgctaaccctgctgattatgataaagttcaagaagatgatttaattgatatcatcggtttaaatcatttcgctcctggcaaatcacttcagattgttcttcatcatacagatggttcttcagatacatttgaagtaaaccatacttataatgagcagcaaatagaatggtttaaagccggaggtgcattaaacatcattagaaaaaatatgggagcttaattcttccttgatcataacacacagaaaggctaccaaaagtagcctttttttataccctttaattgctcgtgtaatcaagtcattaccttaataagtaaaagatattacatattataatgctatatgcttatatttgaatataatatcaataatttttatgttagaattacccgttggatcaagaaaagaagtaatgacgtatttagaacctttcatgttaaatgaaatgtctgaatatttaaagcctgtggaagagatgtggcagccagcagactttttaccagactctagcaaagaaactttttttgacgaagtaaaagaactacaacgcaacaccaaagaactttcttacgatttattagctgttttaattggtgataccattaccgaagaagctttaccaacttatgaatcatggttaaccatggttgatgatgtttctagaaatgaacaaggaggatggatgagatgggtaagagcttggacagcagaagaaaacagacatggcgatttactaaacaaatatctgtacctatcaggcagggtaaacatgaggatgatggaagcctcaacccaataccttattcaagatggttttgatataggcactggtcatgacccttacagaaacttcatttatacctcttttcaagaaatggcaaccaatgtttcgcacagaagagttgcaagtttagctaaacaagttggcgataaactactttctaaaatgtgtggtgttattgcatcagacgaagccagacacgccaaagcatacaaagcatttatcagcaaagcatttgaagtagatgccagcgaagtgatgattgcttttgaagatatgatgaaaaagaaaattgttatgccagctcattttttaagagaaataggcttaaaaatggggcaaacttttggtcacttcacagatgcagcacaaagattaggcgtttatactgctattgattatgtagacatcctaaaagaacttattgttgattggaagatagaagaagttaaggatttaaatgaagccggcgaaaaagccagagaatacttaatgagattacccgatagactaatcagaatagcagacagaataaaaaccccaactctagaatataaatttagctggatattataatattacagattatcttcattaaaacgatttaaaccgatatgtatgtatcggttttttttgtttatgaaattcttatcagttattgagaagccttaattgtaagtcaagacgagttacaaattaatcctccctttgattaaaaataaacagtaaaaattttacactacaagaaacaaaaaagccccgaagatagtcgaggcgctaaatgttttcacaacggaataatccttattgtgatttgctttcactatcaaaggtataatttattttttaattacaaatacggaaaaccgtaaactgtaaaaaaaattatttatatatttatcttaaaaattaattaactactatgacaaaacatatattaggccttgatttagggactaactctattggatgggcgttagttcaacaagattttgaaaataaaaaaggagaaattcttggaatgggaagtaggattattccgatgggaactgataaacaagattatgagaaaggagtaggaataactaaaaatgctgaccgaagaacaaagcgtaatattcgtaaaatgaataaacgttataaacttcgcagaaataaactattatatatcctacataaattaggaatgctgcccgaacaatttcagttcaagaatggtattcctgaacctactaaaattcaagatttggagcttcttcctattaaaaaaggaactttgcaattaaattctttgaaacattaccaattaaggataaatgcattagaaaagcccattgctcttgaagaattgggaaaggtgttgtatagtttcaatcaattgcggggttattcaggcggaaataatgatgatgacacaagaaataaaaaaaaagaagaagataatgatgatgaaaatgatgttataaaaaattatgaggttattactcaaaaagttctcataaagaaaattgaattatcaggcagtaaatttcaaggaagaggaaaaaataaaggacaggaatttaacaagttcgatgtaactgttttgatagatgatgaagaattagaaggtgaaacagaacttcaaaacttatctgaaaaaataaatcaggaagaagaattagaaatacgaatcagaagaaataaaaaaggggatataacatctgtagtttttgctttgcctcaaaaaacgaattggcgtaagcaaatggagaaaacagaagaagaccttaaacaggggaatttgtatatcagccaactgattttacaggatttaaaacaaaataaatggactaaaatcagaaatcgagtttttctgcgtagtcgctatcaagcggaatttgatgctgtttgggatattcagagcaaagctcattctattttaaataattgcccaaaagaaacgatagaaaaaatagcgaattatttgtttccgggaaaaagtgaaacacaagaaaaattaagacaggcagcaataaaaaatggcttgaaatatattataaaagagcaagtaatttattatcaaagactattaaaaccccaaacggaattaatcagtaaatgtccttttgagaaagaagaaacagttttagctaattctcatccattgtttcagcaattcagatgctggaagcaaattaacaatttgtacattacttcaaagcaagatgtgtataatgagaaaaagaaaaagaatgtttttcaatacaccgatagatttttgactaatgatgaaaaacaagaaatttttgatagactccaaactcaaaagcaattaggttttagcgaggtttcaagaattgtaaaactaaaaagtgacaaaaccgaatatttaaacggattaaatgtaaaagcgaaacttattggttgtgatacgcaaatcacaattaagaaagttttaggagagcattttgaaacacttaattcgattgataaaaaggcaatagaaaaaatttgggaagctatttttaataatgctaataatggtaatgaatatgacccaaatagtttaaaggtttcttcaattaaagaagttttaaacccactaaatgatgaagatttagcgacagagttggctttgaaatttgcccaaagtgttaagttcccaagaaagtatgctagtctttctgaaaaagcaatcctcaatattttgcctttgatgcaattaagtcctaaaaatgtctcggaacaaataaaaatcaaatttgacaacattaaagacaacatagaaagattaaataaaaatgagagtgttgatatacaaacaggagaaatttttaatgatttacaagattatgtaattgattttgttcaaagcaatccgaatgctctagaaaaaggcggaattatggaagcttttgcgatttctttagtttatggtaaacatacggctgaaaaaatttcagcacaattcaaagactatcacgaaatacagagagtagatagaaatttacgaaatccgatagtggagcaattaaccaatgaaacgatgcaagtggttaaagccatttggaaacaatacaaattcaaccccgaacaacttgagataagagtggagttggctagggacttaaaaaatagtgcaaaagaaagagatacgatttataaaggacaaatcaaagggcagaaaacgaatgaaaggattaaaaaagttttgactgaaaataatattgatttaacagaaagaaatattttgaaatataaactatatgagcaacaaaaatttatgtcgccatatacacaaaatgaaataattccattcagtgcgttatttgatgataaactttatgatattgaccatgttattcccaaaacaagatatttcgataactcgatctctaatttagtagtttgtgaaactaatattaatgaagaaaaaagcaatcgtactgcttgggaatatatttcacaacaaaattcaagatataaaattcaaagtactgatgcttatctgaagcatgttaatgagaattactttggcaaaaagaagaggaatttattacttgagaagatcccgaccaatcttgtagagcgtcaattaagagatacccagtatatttccatagctgtaaaaagcgaattagcaaaaattgtaggaagcgataatgtaaaaacaagtacaggagaaataacaagttttttaagaagccgttggggattgcgagatttatttatgcgtttgacacaagaccgatttaaacaaatggagctttgggatatgaataaagaaacacaaaaaacaaacgatgactgggtaaaattagaatttgatgaaagaaagaataaaaaagttttaaaaatcaaaaattggagtaagcgatacgaccaccgtcatcacgctattgatgcgttagttgtggcattaacagagcaaagtcatatccagcggttgaataatcttaataagtatctgcaagatgaacttttaaaaagaaaagaggaatttaatcttgaagtaaaagaagatgagacaattctagaagcatttttcaatttagaaaaaaaccggagagagaaaatacaaagacagatagaaagttcaagacattttgaaaaaccgttcgaagatttagttaaacaagctcaaacacttttggaagcaatggtagtatctattaagccaaaagataaattaggaataaagaaagatgataggggtaacgctcaattgaaaataagaggggctttacaccaagaaaccaattatggtaaaacaaaagaccctaagacaggattattgcgtgacaccaaaactattgatatatcgaaaataacagcaaaggatatttctcaagtcattgatgaagttctcaaaattgagattgatgatcacagaaaaaaatatgattctatgaaagaagcctttatgggtgaaggattaaaagcatttaatgaaaacaggtttcaaacaaagaaacctactgaacacaaaccacctgtttataaagtaaaagtatggtacagtaataaagtgacggaagaaagtacattgcaacgtctatatgataacaatgacaaattaaacgttgtcacaggcgacaattatctgtttatgattatggaaaaagcaggtaaacgagtttttgatattgcttctctatatgattctgctgatatagctaaaagggcattgcgtgagaaagacgaaaactataaacaacgtatctgcgaagattataggataaaacacaaagacaaacccgagaaagttttatttacattacaacaaaatgatttggtttatcttccagaaaatatagatgaccctgttttaaacttaaataaggacgagtttaaaggatggttagataatattgaaaataaaagtaaatttagtaagcgtgtttacaaagtagttatgttcacaggaaaggattgtaagtttattcctcataattatgctaatacaattattataaaaaaggatttaacggatgaacaaatagaagatatcaaaagtagaaatgaaggaaagaaaagtattcctaaaaatgaattaaactttgttgaatttggttcttatagagattgttctccttatgaagctggagaagtttttataaaaagtttaacaatagataagaatgagaagaaatcagcatctaaaccgttgaaaattcaggatagttgtatcaagttaaaaattgattggctaggcaacatctcaaaagcataatattatggaccgtaaccattttctaaaatcgttaggtctaggtgccggcggattaatacttccaaataacaatttcattaatacaaaacttgttaaaatatacgacaactatgttagaggattatctcattacgattttagaaaggcacaaaaattaataaaagatggcgatgaattaaaactattacgcgaacccgagaacatttacgatagttttgctattcaagtaaattctcaagaatatcgtttaggttacattgcagcttatgaaaatatcatcctcgccaatatgatggattcaggagttaacatcaaagcctatgttagccaaaaagacttacaacgttacccgcatgaaagcttagctatagaagtatttacagaactcattattcctaatgaaaagtttattgataatttattagctcaaaacagagctgatgatttagcagacatttaccgtttaggagaaatttaaatgagaataaaccctagtgaaaaactaaaatgattaaaagaaccctgtacttcagtaacccagcttatcttaatctaaaagacaggcaactacagatagatctcccccatttaaaaactttgggaacagaagaatccgttaaattggtacctattgaagatataggtgttatcattttagaccatcagcaaataaccataacacatgctagcatcgctgctttattagagaataaagtagcggtaattacttgcgataaaagccaccatccaacaggcatgcttcttcctcttgatggacatgatacgcaaagcgaacgttttagatatcaaatagatgcctcattacctttaaaaaagcaattgtggcaacaaactgtacaagctaagattttaaaccaggctgccgttttatttgaaagaggtattgcttgcgaaaatatgattcattgggctaaagctgtacgctctggagatccggataattacgaaggccgagcagcagcttattactggagaaacgtttttcctaaaaaactagacttctttaggggtagagacggcgaccctcctaataatttgttaaattatggttacgctattttaagagctattgttgccagagctttagtttcttctggactattaccaaccctaggcatacatcatagaaataagtataatgcttattgcttggccgatgatattatggagccctaccgcccttttatagataaaattgtgcttaaaattatagataatggcgagaatttcttagagctaaatactgccataaaatctcaattattaagtatagccagtgttgatgtaagttttgaaaaaggaactagccctttaatggtgggcttacaatataccacagcttcattagctaaatgctatgaaggtacggtaagaaaaataaattatccagtaatgagagatttcgataccagacgagtaagctatctaaaaaatgatgatgattatcaaaattatgctgctgaaaaaaccacaaaatatgaaagtaaaaaaagtacagacgagcccgaattacctttttaggaaatgcgcttaaatcaatatcgcgttttgtggatattggtattttttgatttgcctacagagactaaaaaagaaaggcagatatatactcgctttagaaaagatatcatgcgagatggcttttcgatgtttcaattttccatttacctgagacattgcagcagtcgtgaaaatgcagaagttcatataaaaagagtaaaaaaactgcttcctgccaaagggcatatcggaatcatgaccataacagataaacaatttgggatgatggaactgttttatggtaaggaagaaaagaacctgcccagcacaccacaacagctagaattattctaaaacaaattctagcatttaaattttaaacataaaaaaatccggaagatatacttaccggatttttttaattcctgattttacatttaaactactgatttacaatttcttatactaaggtatgttgttgtaaatatcagtagttcaaagaatgaaagcaaatcacaacttggccgggtttaccctgatgcggaaaaatgttgttgtaaatatcagtagttcaaagaatgaaagcaaatcacaacgataatacaaaccaaacgattgatttattgttgttgtaaatatcagtagttcaaagaatgaaagcaaatcacaacaatacaatactgttgtaactctctaacagtgttgttgtaaatatcagtagttcaaagaatgaaagcaaatcacaacggattacaaacccaaactatacaagaaacagttgttgtaaatatcagtagttcaaagaatgaaagcaaatcacaacctctccatataactggtaaaagattctctagttgttgtaaatatcagtagttcaaagaatgaaagcaaatcacaacaccacataagggcatttcccaaataaccctgttgttgtaaatatcagtagttcaaagaatgaaagcaaatcacaactgcttgtttgaatagtattctttaatgcacgttgttgtaaatatcagtagttcaaagaatgaaagcaaatcacaacttataagttaggtattacctcttcactcatgttgttgtaaatatcagtagttcaaagaatgaaagcaaatcacaacagaagttcattcatgttattgttaaactctgttgttgtaaatatcagtagttcaaagaatgaaagcaaatcacaacatgatactaatgtatatattattttttttagttgttgtaaatatcagtagttcaaagaatgaaagcaaatcacaacaatgatagtggtataacgtttatgaactctgttgttgtaaatatcagtagttcaaagaatgaaagcaaatcacaacttttgtgtatgtggccacacaatactaaatgttgttgtaaatatcagtagttcaaagaatgaaagcaaatcacaaccaaaagcgttcgcgtccctgctggcggatcgttgttgtaaatatcagtagttcaaagaatgaaagcaaatcacaacagctgctatagctactcttaaaaagtcttagttgttgtaaatatcagtagtnnnnnnnnnnnnnnnnnnnnnnnnnnnnnnnnnnnnnnnnnnnnnnnnnnnnnnnnnnnnnnnnnnnnnnnnnnnnnnnnnnnnnnnnnnnnnnnaagaatgaaagcaaatcacaacaaagggcattgcttgcaaatgcaagtagtagttgttgtaaatatcagtagttcaaagaatgaaagcaaatcacaactttgtccatgatttaattacgtcttgagttgttgttgtaaatatcagtagt

SEQ ID NO: 1954 - DNA, 16741 bp, synthetic construct
  misc_feature 1..16741: note = Synthetic
  source 1..16741: mol_type = other DNA
tattgcgaaggctattcacagaattttagtgaaccgagcgtcagaaaaactcatcaaggatcaggctaacgatatggtatggacagaagaggaattggaccatttagctttgctggaagtccgtgccgaacagaaaggtcttgagaaaggcttagaaaaaggtcttaaacagggccatgaacagggacttgaaaaaggtcgtgccgaaggtgaggcaaaaggcttagaaaaaggtcttgaacagggacgtatcgaaatggctctcgatatgctatccaacaacgaacctattgagaaaattgtcaagtattcacatctgcccgaaagcaagattcttgagctaaaggcttcatcgtcaaacgatgctatcaagtaacagcaagcatgggccgttataaaaaactcccgcatgattcatcatcaggcgggagctattttgtatgaattgtgtggcttaatgttatgcggcattttcctcttccttcgtttcggtgtggagcttggctaccgcggtttctgacgttacggtagttttaccctttcccttgcgaattttgagctgcacctttttctggtcgatgtggttatttatggcctttataaactgcgtgcaggcctcgtctttgttgaccgtagccttgacgatggcaagtgcggcaaccaggttgaaggcttccatgcatttttctcgatagactttgttgacaccagtttcttttgctgcaagttctttgttgcgcgtctgcacagcggccaagtattcggcttgcttgcgttcaagattttcgaggtatggcttgaatccgcatttgctcagggtatcattgccgaagttcttgaagcctgctataaggttctcgtaaataccggtagactggtcctgattaagcttgagcgggtccgcgttttcggtaatgagtttccagagcgccaagcctatggcctgcatttcgctgtcggggagaagcttgatgctcttcacgaagttcttgcaggcggtgtaggcaatgttgcgttccttgtcaaggcgggccgcaatgcttgctgcactttcgtcaacggaaacctcaatcgaatttgcaaattcagtcacggcggtacggtaagtttcgatagacggcagaatttcttctgcagtgatgttggctgtcagttcaacgaaattcttgtggagacccaaaaattcttcgttgcgtaattctttgtagtagagagtgttgattttcatcattgttttatcctcgttctagaaggttgatggtttctgtttttgaaaggctttccaaccgcctttcaataaattagatgtgctggttgcatgcctagttgcgttacttttgtttgattttgtacaagttttgtcacgtttgtgtaaaaattcgttttatctgtaaaaacttgtttgcgaagtgcgttttccaacgcgggaaagtacttcgacaaaagtttaaggggtttccgaaaaatgggaaagtgcttcaacaaaagtttaagaggtttccgaaaaatgggaaagtgctcctacaaaagtttgagagctttcccaaaagtgggaaagtacttctacaaaagtttaagaggtttccgaaaaatgggaaagtgctcctacaaaagtttaaggggtttccgaaaatttggaaagcgcttcaacaaaagtttaaggggtttccgaaaatttggaaagtacttcgacaaaagtttaaggggtttccgaaaaatgggaaagtgcttcaacaaaagtttaaggggtttccgaaaaatgggaaagtgcttcaacaaaagtttaaggggtttccgaaaaatgggaaagtgcttcaacaaaagtttaagagtaatttccgaagtgattacgaatggggttagccgattattgaaaacatccgttccggtttgataaaaatgcactgtgaacaaattatgaacgccgaagagtgctggcataacctgctcaagcacgctggcaaagcggaaaaaccatcaaggagcaggctaacgatatggtataggcggaagaaaaatggaatcacattgctttatgatgcacggctcgatgatgggggggggattttatcagaaaatttagggtaaaaaagaggacgatgctttcgcaccgccctaaatgttttcacaacggaataatccttattgtgaattgctttcagattatgcaaataatatagttaaagttttttgttttggaactgttttttatgaaaaaatgaaaatagtcaaaaaaaattgcaaatgtcactatatgacattttgagaatctatatttataaatttatactgtttctttgttttatgtaaatttgccgtttttgttgaaattttgcggttttttcagccttttttgctcgaaaaaagttactttaattgctgtaaaattttttgaaaaaaggtttattcatgaaaaaaattcttggtttggacttgggaaccaactcgatcggttgggctgtggtgaatgcggatgaaaacggcaatcccgtaaaaatagaaggtatgggaagtcgaattatacccatgggcagcgataaaatcgattacgaaaagggagtctctattaccaaaaatgctgatcgtagagcaaagcgttgcgctagacgtatgggaaaacgctataaaatgagacgcaacaaactccttttcattttaaatgaattaggtatgttgccagaccaattccaattcaaggatggatttcccgaagcgaagcatttgcaaactttagaattattgccaattcgtaagcatacattgcaattggattctttgcaacattatgaactaagagccaaagctttaaatgaaaaaattgaactaaaagaattaggcagcatcttataccaatacaatcgcctaagaggctatgcaggtggtggagatgatgaaacagaaaaaaagaatgtcacaaaggatgacgatcaagaagatttgaaaaaatatgagacacgtgtccaaaaatatataattaaagaagttgaaaaatcagaactaacattcaaagctaagggcggcaaagacaaaggaaaggagcttcctgtatacaatattacggtcttagaggatgacaacgaaataattggaacaacacaacttcaaaatctagaagagaaaattggacaagaaattgaacttgaaataagaattaaacgaacaaaaaaatcaacgaccatcacatttgctcttcctcaaaaaactaattggcgaaagcaaatggaagagacagaaaagactttaaaagaaaaaggctttttcccatgtcagttatttgtggaagatttaagaaaaaataaatggacgaaaatcaggaacagggttattcttcgccaacaatatataaaggaatttaacgccgtttgggaacaacaagcaaaattctatccttttttaaacaattgttctcaagaaacccttgaacatatcctcaactacattttccctggggaaaaagaaactcaagaacagttacgtaaagatggtttgaaaaatggtttaaaatacatcatagagaaacaggttatttattatcaaagacctttaaaatctcagtccgataatattggaaaatgtcaatttgaaaaagaagaacaggttgttcccgtttcgcatccgctttttcaagaatttagatgctgggatcagatcaaccgtctttacatcacttcaaaagaaagtgtctggagtgaaaaaaagaaaagagacattctgcaatataagaaccgttatcttactgatgaagaaaaaattacaatttacaataagctacagtctcaaaaacaagctggattttatgatgttgccaagattgtaaaactaaaaaatgacaatactgaatatttaaatggtttaaatgtaaaagcaaaacttaaggggtgtgatacagcgatttccatccaaaagattctcggcgcatcaggcattcaaaatgcaaatatagaggctatttggcaagctatctatgacaatgttcatgaaggcagtgaatacgatccaagtagcaaacgtgttcaatctatagtttctgcattacctgaaaaaaatgaagatgaatcacgtttagatatcgctttaaaacttgcccagactataaaatttccgagaaaatatgcaagtctttcaaagaaggccattgaaaatattttgcctttgatgcgattgaatccacaaccacaagaaatacctgatattgtcaggtataattttagccaaattcaacatttgttggaaacgggagaagccattgaggattatctacttaacgattatattattgaatttgtagaaaataatccaaacgcacttgaaaaaggcggtttgatgtacgcctttgcggcatcattggtatatggcagacatacaaaagaaaatgttaaacctcagattacaaactatcatgacataaaatatgatcgtgaaagagagaaaaatctaagaaatccgatagttagccaaattgcaaacgagaccatgcaagtcgtcaaagctgtttggaaaaaatatcaattgaatcctgacgaactagaaattcgtgttgaactagctagagatttgaaaaacagtgctcaagaaagagacaaaatctataaatcacaaataaagaaccgaaaaatcaacgaaaatatcaagaaacgacttattgaattaaatcaagaagtcaatgaaagaaatattgaattgttcaagatttggagtcgacaagaaattccattagataaaaatggaaattctcgtccaaaatttaaaaatgagaatgccccaacacaagatgaaatcgagaaaatgaaactatgggaaaatcaacaattcatttccccatacacgttaaaaccgattcctctttctaaattatttgacgatcggttatatgacatagaccacattattcctaaatcacgctattttgacgattcactaacaaataaagtcgtttgcgaaacaaatataaacgaagaaaaaggtaatagaacagcgtgggaatatatgtctcaacaaaattcatcattaggtatatgcagccttgatgaatatttgaatcatatcaacaagaatttctttggccaaaagaaacgaaatcttctagctgaaaaaattccttccaatccagtcaatcgtcagcttaaagatacacaattcatatctgtagcgataaaagatgaattggcaaaaatcgttggcagcgacaatgtaaaaacgactactggcggcgttactgattatctaagaagtcattgggggctgaagaaactctttatgaatctgacggaatccagattcaaacaaatggaattgtggaatctagacgaaaacggcaaccctaaagaatcttggattaccaaaggttttgataaaaaaagaaatagaaacatttatgagataaaaggatggagtaaacgatacgaccataggcatcacgccatagacgcccttgttgtcgctttaagcgacagtaaattcatccatcgcctgaatgacttgaacaaacatttccaagttgaattaagcaaacacaaaaacgaatttacgtatgacgatgaagaatccttagaagaagcatttttcaaacttagtaaggaaaaacgtgatgcgatcatgaaggaaatggaaagttctcgaagattcaaatcaccaattgatgatttaattcctgaagccaaagaattccttgaaacaatgattgtttctcagaagcccaaagataaattagccataacagaaaatcaagaagggaaaaaacaacttaaaattcgtgcagcattacaccaagaaacctattatggaaaaacaaataatagggacacaaaaacggtaagcatctctttattaaaagtaaaagacattccacagattatagattctgttttacgagaagaaatagaaaaacatcgcaaaaaacatgccaaagacactatgaaggaagctttttctggggaaaacctcattgaatttaatgaatctcgtcaccaaactaaaaatccaattgcacttaagcctccagtatacaaggttaaactttggtatagcaaaaaagaaggtgaagacagcggtttacagcaactctattcagacagacctaaacagagcgtactcacaggtgacaattacatgtttattgttatggagaaaaatggaaagagaatatttgatatcgctcccttatacgattctgtcgaatttgcaaaagaattaataaaggctaagcccacagatatcgaagaatcaaagagattaatttgtgaaaaaatccgtgtagaaaacaaggaaaaacttgataggactcttttttatcttcagcaaaatgacttagtatatatgcctaaaacaaaagacgacattcttggacttgatgccgaaaaactaaaaaaatggttcaaaaacaatgagaataaaaaggaattcgcacaaaggatatataaagttgtaaaattcactgggaaagattgtttcttcataccaaacaactatgctaaggaaataagcatagcaaaagatttgtctgatgcggatatatctgagttgaaaaataaatatgcagaaacaaaaattcccaagcaagaactaaactatgaagaatttagttctttcggaaactgtgtcaaatacgttccagacgaaagatttataagaaatatcattgacaaaaaaaatccaaaacctcctaaaattcaagacttctgcattaaaataaaaacagactggcttggtaatataatcgaatttaacggattacgattatgattaaacggacactgtattttgggaatcaggcttatttaagcctgaaggacaaccagcttatcgttaagaagcgtgatgacgaaatcgtcaccgctgctattgaagacatcgcctacattgttcttgattctccccaaattacagtgaccaatgccttgcttggggctttgttagaaaataactgcgcgataatcaactgcgataaaactcatttgccttcaggattgttgcttccgctttctggaaacacattgcaaagcgaacggttccaagcgcaaatagaagcgtcgttacctttgaaaaagcaattgtggcaacagactgttcaacaaaaaattttgaaccaggccgcaattttgaaaggtgcaagaaatgcagaaattggcaatatgactgcttgggcaaattctgtgcgaagtggagatgttgataaccgagaagctgttgccgctgcatactattggaaagaaattttccctgacattcccgatttcgtccgagaccgaaacgggattcctcccaacaacatgttgaactacggatacgctatattgcgtggcgttgttgcaagagctttagtttcaagtggacttttaccgactttgggaatacaccatcataatcgttataacgcctattgtttggctgatgatattatggagccttatcgtcctgttgtggataaattagttttagaaattttagcggaattagaagagtatcctacagatctttctaccgaaataaaagcaaagcttttaagtattcctgtactagattgtgttatagatggaaatcgaagtccgttgatgaatgccgtttcaacgactacggcttcgcttgccaagtgctatttaggaacgacaaggaaattgctctatccggaggtgtaggatggatcgatttagcgagtacagaattatgtggatcatgtgtttctttgatttgccgacggaaactaaaattgagcggcaaaggcacagcgagtttcgcaaaaatctgttaaaagacgggttttcaagattccaattgtccatatacattcggcattgcgcttctgtggaaaatgcggaagttcatattgctcgtgtaaagagctttatgccgccagatggctcggtcagtattctttgtattacggataaacaatttggaaaaattcaggttttttatggtcgtaaggaaaagccaaagcctaaatcaacggggcaattagagctttttttgtagaaaaagtggctccccaaaagaaaaaatcggcgttttaaagccgattttttcttttggcaatatcaagcctaactcgtttatagctgtatagttacaacacatcagttgttattgcactagtaaaactagaaaatctgaaagcaattcacaacgtctaatatcgtcaatattcatattgtaccgttgttattgcactagtaaaactagaaaatctgaaagcaattcacaacttgataccatgaatttgtttgcaccagtttgttgttattgcactagtaaaactagaaaatctgaaagcaattcacaaccatcttaccttacgaacgtgaaggacgggagttgttattgcactagtaaaactagaaaatctgaaagcaattcacaactattgttaacaacagtttatgttaatagtggttgttattgcactagtaaaactagaaaatctgaaagcaattcacaaccctaaaattaaagttactgacgctgttgggttgttattgcactagtaaaactagaaaatctgaaagcaattcacaaccattttcaattggttctacattaggttcatgttgttattgcactagtaaaactagaaaatctgaaagcaattcacaaccatcaacggaagcaagtgccgaacgaacaagttgttattgcactagtaaaactagaaaatctgaaagcaattcacaacccgtaccattcgaggaagtccttgattggggttgttattgcactagtaaaactagaaaatctgaaagcaattcacaacaccatgttgcgtattccgtttaatccttccgttgttgatgctctatcgaagatagaaaatctgaaagcaattcacaactaagcatttacagcgcctttcaaatgacctgttgttgatgctctatcgaagatagaaaatctgaaagcaattcacaacagcagatgatgacgcgctgcattgccgtctgttgttgatgctctatcgaagatagaaaatctgaaagcaattcacaacgttcatgaagcccgtagtaatacgggctttgttgttgatgctctatcgaagatagaaaatctgaaagcaattcacaacatttcccaactttcgtagaaattcacatcggttgttgatgctctatcgaagatagaaaatctgaaagcaattcacaacaggatatgttgtatcgaaaacatgtgcaaactttgcaaagattatggggtcaagacggaatatacggtacaccccggggatgtgatgcttgcgttttttgccaaagctgaagctcctatggaaaacgttacggagaaaactgcggagaaaatactgcgtcttcttcgcgaaaatccatctttgacaaataaagagcttgcagagaaatgcggaattacagaagatggcgtttattaccaaacgaaaaagatgaagtcgaaaggaatattgcgccgtatcggaggtgacaagggcggccgctgggagattttgtaaaatttcctttcttcaaggtggggcatgtcggcaaaactcgcggatactggaaagtgaataaatgaaggttagttgattagacgagatgaccaatatcgctgaattattaaaagccaatactgaaacggggtaaaattaatgtctgatgtcgcgacctttcacaaaaccaggtcaacgggcttgtcggccatgaggctatctggcgtgactttgcaatccaccacgaaaatttccacacctgctttttgggcgcctcggagagccttgccgaattccggatggattttgtcgtcggggccaaagcgcttgcagcctttcatctgtatcaggaacaggacgccgcattcgtagggcgtgccgttttcggcggtcatttgctccgattttatgcgggtgagttccgtcaggtgcttgattcccctttctgtgggggcgtcggggaaggtggcaaaaccgtcgtgttctagggtaacgcctttcacttccaggaacatcttgcggccattgaattcaatgtagaaatcgaatcgcgaattcccgaaggtaaattcagggcgtactagttgcaattttggaaaccgccgcttgtttgctcgaatccattctgccgctactttgtttggagcctggctgtccatgtttacgagaatcgtgcctcgttgcgtaactttttccaccgctatgaggtcgtaaggagtcttgcgggcgggattggtagattcttcgaggtaaacgacagcgccgggctgcaacagttccttgcatcggcccgtgtttttcacgtggactacggtcttttgccccttgatgttcacatgggctataaagcggttaggtcgagaaatgaatgtcgcctttacaattggaccgtattgcataaatcgtgatgaatatacatctttcgcaaagttcttgtcaatccgtttatttcgctttttgatgggcgagcaacaatctattattggcaagctgtgccagtatatgaagaaccgccggttttgaactgagccggcgggagttttttaggtgaaagcattttttacagtttgctgatttcgtcttcggagagtcctgatctgcggacgatgatttccatcgggactccgtcatcgcggagcccttttgctatttcacgagctttcttcagttcgccttcgttcaacccttcggtcttgccttgcgcaaaaccttctgcgcgtcctgcttcgcgaccttcggcgtgtccctcagttttgccttgagcgaaaccttccgcacgaccttcagcgagtcccgcttcacggccttcggcgtgtccctcagttttgccttgagcgaaaccttccgcgcgaccttcgacgagacccgcttcacggccttcagcgaggcccgcttcgtgtccttcggcgtgtccctcagttttgccttgaacaaaaccttcagcatgaccttctttcttgccttcggcgaatccgatttcatgttcagccatcaagtccgtcacgttttttacctcgcagttgaaaagctcttctgcaaaattaatcaatttcaccgagtcgagcaacctccggaacgtttcgttttgcataatcttttcgggaacgggttcctcgttgattgtcaccttgatggcgcgaagccactgagcggcttctgagttgtcgtttgtagtaatccccttttcttcaagcctgaaaaatttctcgatttccacgaaaatcttctggattttcgggaaaaacttcctcccgttgcacatttcatcgacatggtgaatgtatttctgaggctcctccgggaaaagtgtaaagtccaggagcccgaggaagtaaatacgtggcaattcgtacttttcgcttgtatgcacctgattctcgatgacgcgggacatgtaatattccacacggtcgcggtaaaattcgtcaccctgctgctgcacctcgaccagcacgcgttcgcccgcgttggtcgttccgataatatccacgatgcagtccttcttggtgaacgcgccggggaactcctgcatttcaagcgtgatttccttgatggtttcaccgccgtgcaagtcgagcatcgcgttgacgagcgaaataaggagcgtatggtccttttcttcggcaaacacaatcttgaaaatgccgtcgctgaggatgtaggcgtagttgtagatttcctggtacttgagaaggtttttcttgtcgatttccattgccctgagcaaggaataatgttgtgtgcgattcatctgaatctccgtataagtttgttatagcccgcatgcgaaagctgcaaagacaacaaccataaaccacggtcgccgtcaggcaatcgcttgcattttcaatgacactggtttaacgtccgccaattctaaggcagacggtgctctacgttgatagccacggagccggttctccacagggcaactgtctcgattcgcggtgtcgtcggcacagcaaagggaaacgacctcaagcagatagtggaacttcctgccctgaatagtactgagtcgagagtcgcagtttcaagcttggaaactatgaccgagactatgatacggacgccaacggcgtcaatttctcggtgtcggcaggattaatgcaatctacggggtaatatatacttgtccgataatgtgtgtcaaggggccgcttttttcgcgaatcagatgcaaaaacgagaaaaggtggccgctttcgcggtcacctttgtgtatttagctttatgtgtaaaaatctacttgatgagaactttctgcgtggcagcgattcctgcgcccttcgcgcggatgatgtactgacccttggtgaggttcttgaggctgaacgagtgttcgcctgcactgaggtttccgcggtagagtgttgtgacgcgcttgccgatcatgttgaacacgtcgatgcttgcgaagcccgccttgcctgcggtgagtgcgacgttcatgccgttcacgcggaggctagccttctttgtcgctgcgatggtcttgatggcgttcggagtgagcggcgtgccgtctttgttcaagagctcaatgcttgcgatgtggcccttgctttggtctgcagcggtgaagagttctgttttcttgttgaatccgttgatgatgattccgttgtcggtgaccatgttgtcgaagagcactgtgccttcaaagccgtttgcaccagccaatatgaaggtgacggagaatagtttgtccaagtccatcgggtgttcgacgcctttgtcgtcggtgtatgtttcgatagcgaattcgcaggtcaatttggcaccgtcgttgagccagcagccgtcagacggggactgttcccaagtccattccttgtccttggaaccgtcgcggacaaaagccatgccaatccagatgccgttatcggctccgccagagcccttgttttcgatggtcacggagatgctctttgcgcctgttaaattaggtacctttctgtattcgatattggcaccgctgtcattgatggccttgtaggtcacgcccatgataaggtcaacgttttctgggtttgccttggcggtgtctgcgccgaattttgcgttttgtgtagaggtcgggcatgcgtttgttgcggcggcagcttcgttgtagttgtcccagccgggcattttgtcgagggtgatgatgcgttcgtcggcgagattcttctgccatacgcttgcggaagtttggctaacgtatccgcctccccaagatggggattcgtaccacggcatccaccagctccatgtggctccgtcttcgtacattttttcgacgtcaggaatcgggccgttttcgctgagcgagatgagcttgtttgtgccagccttgttcgtgaggtcgatgaatgcggagctgttgctctggtgatcgtttgctgcgttgtaaatgtcaacgctcaatacgtcatagtaggtttcgcccggagtccaggacatggttgcggcgtctttcgggttaaagtcccaaatgaggttgttcacgccgttcgtgaataccatgcgttcgtagagcaactggtagagtgctgcgaactgcttgccggtatgcgtgctccaccagaaccagttcccgccggattcgtgcaacggacggaagatagctgcgacgccttctttctgcaagtcaaggaaaattttagagacgaggtcgatgtcgccgatgagtgctttataagcggtcgaaacggtatcccaattggtggtgccggtaatgaatgcttcggtgaaatcgaattcggtgtaggtttcgccttctttgcgtgcgctctttacgtaaaagtcggtttcgtcacccgggcgccagtgccatgtgaaagcgggaatgccgcccttcttccaggtcgtctttgcgatgtcgatggactttttggtgtattcctggaaccaagcgttattcttgtctccgccggtggcgttcatgaggtcaacgccgacgagggcggggtacttgccgcctgctttaaagactgcctgaacgtcttcgtgctgggtggcgtcgcccacggtgtaggcatccatgttgccggtcattacgccagaaatagtctttttgccaaagttattgacgaggaagttgtaaagcttgatggcagacggggtggcggtcttggttactggagcgttgcagaggttgaacgcttttgcttcgtagcccttgatgtcgatgtagtccacgtcgatccagccccagctattggtgatggcgatggtgttctcgccggcggcgaggttcatgactgtttcgacatcgacgaatttgcctttgtcggtcacatcgaacgtgactgcagaggaggctccgccgacttcgacgttgttgattttggaaccgccgtaattgttcatgtaatggattacgatggtgtatttacctgctttttcgactgaaaccttagaaaatgtgatgtcgccaccgttcatcttgacgtacttgccgccggatgctgctgtgctattgccaacggctgcgtccccggaaagggttgcgctctcggcttcgtactgagccgcaaagacggaacatgctgcagaaaggccgcatgttaacaaaacttttttgaatcccatgttcactccttaaaaggtatgttctcaaaatatataagaaaaagcaaaaatgcaaccgcatttttgcttgaaaggaaaaaatatgtttactggtagctcttaggggcgcctagccgattttttccaccgttgcgccaaagctgaacgtcttggtttcgcccggcttaattacaattaagtctctatggtggtttaaagtatcgggctctgcggtcattggttcaatcgcgatactcatacggtcaggtggtgtgtaaatttggatggcattatattgttcgtcgccggctttctgccaaatttggagggattttgtgtcgcttttgaactctacagtagctaaaatgttctcaaaatttttcttgtttttgaggacgtaggggccgtcgccctggtttaagcagaaacagtcgttgatgaattcgtcgttgatgaggcgtccacctacaaaacgggtatccggcttaaattctcctgttgggatgtctgccttgtcgaggagggcgaggtttgtttcggggagggtcatggtgaggttgtcgattttctcgccaagcgtgtaataggggtgccagccttcggaatagggaaggtcgtttgcgccgatgttcgtgacggtggattctacggtgtagctttcgccggtaaaggtgattttgttaatcgcgcggaaggggaacgggaatccggtaaatgctcctggccagtcgatggagaatgtcgcggtgcatttttcgttatcgctttcgaaacacacgaacttccattctttgttttgcaaaaatccgtggagggcgtgcggtgcccagctcacgttgttcacgagctggtaatcgttgccgttccagttaaatttggcgtaggccacgcgccctgggaatggggcgagtcggcaaccggcgttggtgtccgggcccattttgtaaatgtcgtcgccttcgcggtagccgaaaaggaggtcggtgagtttgccgcttgcgtcggagatgcgccaagcgtttaggcctgcgccgtaaccgcttaaaatttcaaattcagcgccgtcgtcacgctgtaaaacgtagcactcgacggtgccaatggggcgggaaataattttaaacttgctcatattgtattactagttgattgttattagttgctagagaatttagtaataagtggttggtagctagtggcttgtgattagtggctggtggttggtgcgtcatcctcgaagaggatccatacagtactgtttgcgaaaaatgtatggttcctcgcgtagcgagaatgactgtaacacagcttcttaactacagtttaccgcctactgtctgctaaaaagctatctttcccttcatggattcccagacgattgttgccccgatgacgcctgcgggcgtgagtgccgtagctgctattcgagttagcggttctcgcgtacgtgaggttgtgcgcttgctttttggcgaggctgcgttaaaaaatttgaaagcccgcgaagctaagttggcgactgcgagggattatcgcacgatggcaggcgatgaccgtgccacggcgcaagtcattgatagtctcctctacatcttttttgaaggtccgaattcctacacaggcgaagatgttctggaactttatccgcatggcaatccgattatcgtgcgcgaactgattcaagttattaaaagtgttgatggggttcgccttgccgaacccggcgagtacacgcgtcgtgcgtttttgaatggccgaatggacttggtgcaagcggaatccgttgccgatgtaatccacagtgccaatcgcgatgaactcaagaacgcccatcgtttgctcggcggtgcgctttcgaaaaaagtcaagacgcttacggaacaggtcatggacatttcggcgcgtcttgaattggatgtcgattttgccgaagaagaggccgacccggattacgccacttggggcacaaagattgaagcgattcgcgaaagcgtggaatctattttgaaaagttttaagggcaaggcgacagtgagtcgcttgccgctggcggtgctatatggcgctccgaatgcgggcaagtcgagtcttgtaaatgcgctccttggcgaagaccgcattctcgtgagtgacattccggggacaacccgtgactttgtcgaagttcgtttgttcttggatggcggtgaaattcgcttggtggacactgcgggtatcgcagacaaggcagccgatgctctcgatgcgcttagcatg

SEQ ID NO: 1955 - DNA, 16702 bp, synthetic construct
  source 1..16702: mol_type = other DNA
  misc_feature 1..16702: note = Synthetic
cttgttctagctctacagcatctaaagtgttaaagtcaaaatgggctttcattatttattctttaaataaattaattgatgtattgaggccttttccacgaaattgggctataacagaacagcactaagatggcaaatgatatagtgcacaagcgtaatacaaaagataatttttacagacatcaatttcatggttaggtggccaaaaatacccctattaccacttttatccgccacccgttcgggtagtttttcattttctgattaaaaatatgcgactaaaatccagaaaaactcctaccccattaggccgcaccatgaattttactcacagcttgcgctctgttgctgatatccatcttgaggtaaatattacggacatgaaatttaaccgtattggaagataaatataaagtctccccgatctgtttattcgttaaaccatcggcaattagtttcagtacgtctacttcacggtcgcttaaaccaaattgctcttgtatctgaataaataaatcgtcttgcgataaactctttaaattgtcagcagattctttaggttgttcttttaaataacgctgaatctcatctctataataggcatgttctttatgaagtttcctggcccggtgtagtattcccacactcaagataaacatctgcaaaatattggcaatttttaattcgctggttaccaaattcagaaagcttagctccagaaaccttagcaaaaaaaagtttaaggtaaaaatcaatgataatactgatgcaaaaacgtaaatacgggctgccagatgtttccggaattttgataatgccacagtccagtaaatcactagcactaatggcaacatcatatttcctaaaatggaggcacccgttaaatcaaacaacgcatatgttaaaaagcaggaagccattaagaacagtatcgcccggcttgcccaaaacagataggtgtattttttatccagttctaaaaacttcaccgaaaaaacaattattgcggtagtagctcctaacattactggtaaacttgcataattgagccatatagcgttacgacttattaaagcataaagcccgtctgcataagcatgtaaaagcataaccataaaaaccagcacactatagcataaaaacctgttatctttaaaactgaaataaagtgctaaattcactatcagtaccaccatcgcaataccgtaatagactcctaattttaaaaaactaaggctctctgttttgtaaaatttaagcgctgtatttacggctaccggaaaaagattttcttttttcagatgtgttttcagccatacggtagacacatcgcctttgattctaaagcgtacatagcgcaaataagtgctatctttaagcttaaaactattacccgcggtatcaactgctgaaatttttccgttgacagcctgatacaagaaaacggagtctaagtgtgggtttttgatgccaatgattaaatcttcctccggatttctattttgtatatctaaccgaaaccaatatgttcccttattatgaaatggtggattatcataaccatgttttaataatttgaatggaagtttcgtgatattttctggtgatacggtatccgtagaagtgtaaaaccaagaacgctgaaagcttacctgggcaaaggtattggctgatagtaaaataaaaacaacataaaatagaaaacgaaagtgtttcaattttagcaataattttaggcctttagtagcactaatatacagctattattaaaaaaacagctacaaaatggtaattgacgaaggaaatgaaaacggaatcaaaagaaaaccaccttcaaaccttttgttaattttaaaagctctgtactccaaaccaaatattgtaaagaatcatgtaagactaacaaggaagttctccggtggtttataaggcaatattataaattattttagtatttctttaatatctgcaattactttttctgcaagctggttagcttcctgctcagaagccgactcagaataaattctaataataggctctgtatttgattttcttaaatgaacccattgcttgccaaattctattttcacaccatctatagtattgacaggctgttctttatacttttcctgaatctttagtaataagccatcaatatccataccggcctgcagttctattttatttttagagataaagtataccggatagctggctcttagctgagaaatagttttgccagattttgccagatgcgttaaaaacaacgcaacacccactaatgcatctcttccgtaatgagattccgggtaaataatcccgccgttaccttctccgccaataatagcattggtttctttcattttggttactacgtttacctctcctactgccgcagcattgtattgttgtccggcctgctcggttacatctcttaaagctctggtagaagataggttagaaacggtattcccaggcgtgtttcttaccacataatcggcaacggctaccaatgtatattcttcgccaaacatagaaccatcttcattaacaaaacataaacgatctacgtctggatctaccacaattcctaaatcggctttattttctttaaccactttagaaatttctgttaaatgctctggcagtggctcaggattgtgtgggaaatggccattaggctcacaatacaactcgtaaatggtttctactcccaaagctcttaacaaagccggaataaaaatacctcctgtagaatttaccgcgtcaaccgctactttaaaattggctgctttaattgcggcaacatctaccaatggtaaagccaatactttatctatatgcttttgcagataagtatcatcaaaacttacacttcctaagctatctacgtctgcaaaatcaatttctgtattatctgcaatatcaagcacttcttttccgtctttatcgcttaaaaactcgcctttgctatttaataatttaagcgcattccattgtttaggattatggcttgccgttaaaataattccaccaccggcattttcgtccggaacggcaatttctacggttggcgttgtagacagtccaagatctactacattaatacctatactctgcaaggtacccaccactaaattgcgcaccatttcgccagaaatacgggcatctctacctactacaattttattatttcctgttttatttacaatccacttgccataggcagcagtaaatttcacaatatccgagggcgttaaagcatctccggcttttccaccgatagtacccctgataccagatatagacttgattaatgtcattctttaaatgtttggttaaaaactaatgcaatatctaaaaaatatgctttaaccacaaagacactaagaacagaaagaaaaaatagcttagtgctctctgtctctttgtggttcgggtcagaactcccaccttacaaaagcttcaatagcttcgtaatttgctagtcctaaagtatcgtaagctttggcagtttcgctggttctttcttctgctctcacccagaactctctagcgtcatctcccgggaaaaccggcacatctttttgcgattggtgtttatatatagccaggcgttttctctttacttcttgcggagaaagaggtactgccatttcaatttcgtgaatttcaaactcatgccatgcgcctctgtacagccataaccaacagtcttttatccactcgtcgcctgctgccttaatttgctgtaaagctttatatataatatcaaaacaaactttatgcgttccgtgagggtcggcaaagtcaccggcagcaaatacctgatgcggctttacttttctcaatagctccactgtttgctggatatcgtcttcgtaagaaacggttttagagaatttgcccctgtcgtaaaacggaagattctggaagtgtatattttcatccggcaagcctgcaaatctggcacctgcaatagcttcccctttacgaataaggcctttgatggtacgcacttcttcggtatctacctggtttggctgtttagtagtaaagaaagctctgctatctgtgtacaaagactccagtttagccacatccaaacctaaagctctaacataatctgtcgcaaattccatgtagcgcaatacgtcatcatcccaaacagctgtatttcctgaagtttggtaagccacatgcacctcatgcccctggtctgccagacgaataaaagtccctcccatagaaatcacatcatcatctgggtgcggagagaaaataacagctcttttcttagccggcaaagctctttctggacgctgactgtcatctgcgttaggtttaccgcccggccaacctgtaatagtatgttgtaatttattaaaaatttctatattgatattgtacacaggacctttttctgttgccagctgcgccataccgttattgttataatcatcttcggtaagcttaagaataggctttccggttgctttagccagccaaaccaccgcttttttaatgagctgaggtgtccattcacagtctttaaccaaccatggtgtagaaaatctggttaaatgagaagcagcttcggcatctaacacaaactctacgttgtttgaaagctgcaggtaagtagccggaacgtctgcagaaatctcaccctctactgctttttttacaatagaagctttcttctctgcccatgccataataataattttcttggccttaaaaatggtacccacacccatggtaatggctttggtaggtacattttctttaccaccaaaatcctttgccgcatctcttctggttaaatcgtttagcgtaaccaaacgagttcctgaatttggcgcagaacctggctcgttaaaaccaatatgtcccgttctgccaatacctaaaatctgtaagtctaaaccaccaaaattgctaattttctcttcataagctttacaatagtcaacaatatcttcttctttcagctttccattcggaatgtgcacattatccacatcaatatctacatggttgaataattgctctttcataaaggctacgtagctttgacgagcgtctggctgcatgggatagtactcatccagattgaaggttactacatttttaaaactcaggccttcttctttatgcagacgaattaactctttgtaaacgcctattggagtggcaccggttgctaaacccaataccgttttttcgcctgtttggtctttttctttaatgattgccgcaatatctgctgctacctttttagaagcaatatgctcgttggcataaatgctcaccggaagtttttcaaaccttgtttcttccagaagattcaatcgtgtggtattcataagtgacacaattttattgtgataattagtttaattttcaaattaatgtgttcgcacacaaatataactaaattacaatgtgttcggacacataaataaaaaatatttctaaatacaaattatagtttgtagtattgtgttatcggacacacaaagtttttacaatggaaaagaaagaaccaacgctattaattttagctgctggcatggctagcagatatggaagcttaaaacaagtggacagctttggcccatcgggcgaaaccattatagattattctatttatgatgccataaaagcgggcttcaaaaaagtttcttttattgttaaaaaggattattacgaaggttttaaacagatatttgacaccaaactggcaggcaaaattgagacagactatgtttttcaagattttgacctgcagaaattcggtatcgataaagacatcatcagacagaagccctggggaaccggccatgctttaatatcagccaaagatcaaattcaggagcctttctgcattattaatgccgacgatttttatggctacgaatcttttgagaaaatgattaagtttttaaaagaggaagccgacgatactcactttgcgctaatgggatacgaaatagacaaaactttatctgattacggaacggtttcccgtggtattttccaggcttctgatgaagggaatctcaccgaaattatagaacgcaccaaagtattcagaaaagatggacagattgtttttgaagaaaacggagagatttttccggctccagcacaatcttatgcctctatgaatttctggggctttacacctgctgtgtttcagaaagggatagcgctgtttaaagaatttgcggcggcaaacaatcaggagaatggtaccgcagaattttacattccttctattgcagaggctcttaccaaagaaaatgaagcctcttttaaagtcttaccgacttcttcaacctggtttggcgtaacctacaaagaggataagcctattgtacaagagaaattgctggctttggtaaaagatggagtttatccagaaaatctttgggatgcctgatgtttaatttttaattttgaaggcttagtgtttaagggacacctgaatgctaggcctttaaccaccagctactgcctgatactaattatttaatgttgaatgcttagtattaaatgcttatggtttataattaccgcaggatactaattacttgataccagatacttctcctgtttaacaattactattttactaacacctgttgaaatctagtaaaaaaccctatctttgcggcttcaaattttatcgaaatgaaccatcctgttaagattaaaaacgccttagtttcagtttattacaaggacaatcttgaacccctaattctagcattacaaaagcttggagtaaatatttactctaccggaggtaccgaaaccttcattaaaaacctgggagttgacgtaattccggttgaagaattaactacctacccttctattttaggtggccgtgtgaagactttacatccgaaaatttttggaggtattttaacgcgtagagagaacctgaaagatcaagagcaaattacccagtttgaaattccagaaattgacttggttatagttgacctgtatccatttgaggaaacggtaaaatctggcgctttagagcaggacattatcgaaaaaattgatatcggtggtatatcattaatcagagctgccgctaaaaaccataaagacgttatcattattgcatctaaagacgattacgaaccagtaagacagattttagaagagcaagacggtgtaacttatattgagcaacgtagagcattggcaagaaatgctttcaacgtatcttctcattacgatactgctatcttcaactggtttaattcgggagatgatgcattgaacgtattcaaacaaagcgagcaaaaagcatctgtactgcgttacggagaaaaccctcaccaaaaaggatttttctatggtgatttagaggcgatgtttgacaagcttaacggtaaagaactttcttacaataacctggtagatgttgatgctgctgttgctttgatagacgagtttaacgagcctactttcgctatcttaaagcataccaatgcttgtggcgttgcttccagacctaatttgttagatgcctggaacgatgcattagcttgtgacccggtttctgcttttggtggtgtgcttatttgcaatggcgaagttgacgaggctactgctactgaaataaataaattattctttgaagtgttaattgcaccttcttatacaccagaggctgaagcggtaattacttctaaaaagaacagaatcatcttaagaagaaaagatattgctttaccgagcagacagtttaaaactttactgaacggcgtaattgaacaagataaagataatacttgcgaaggtccggagcaaatgactaccgttaccagcctacagcctacagcacaagaattaaaagatcttttctttgctaataaagtggtgaaacatactaaatctaacactattgtgtttgctaagaacgatacgttgatagccagcggtgttggtcagacttcaagggttgatgctttaaaacaggccgtgattaaggcggagtctttcggctttgatttaaaaggagctgtaatggcgtctgacgctttcttcccattcccagactgtgtagagctagcggcagaagctggcattaccgcagttttacaaccgggcggttctattaaagatcaggattctattgataaggctaatgaaaaaggcttggctatggttactaccggcgttagacactttaaacattaagattttatcttataaagaaagcctttgatagccgtatcaaaggctttctttattcttaggttttgcttgtcgagccgaaccatatcgaaccctgcgatattcagctctttctactgatctcatttgaattacgaattatgccaaggattgcttttctgtcctcaatagccggacgggcctagttactttttccttcagctgaaaaagtaacccaaaaagccgcggctacagaatataagctaaaaaccgccttcgttcgctaaacaaaatgaactcgctatcgctcaaacagcattttgttcttaacgctcacatacgttggttttcttaacgcttatcttctgacgccggatggtgttcttagcaatggttatgctttttgttattgccgtccctactgtcaccctgagcagcctgccccgactccggcgggagagtcgaagggtttagccagttggggttacgctccgagctttccgggccttccgcgttactttgtccattccaacgaaaggaggaatctctttctgcttttttgggcttatgtacaagttaaatctaaaccagcgctacctgtttttaccctttttcactagcaatcgtggtatctgcaagtcgcttgcttcgccccttgtttacgcttttttatagcattcccttacctattctttaccccagaggtaacgaataggtaaaggtttgggtaaagaaaaggtaatactttaggtaataaaagggtaaagaaagtataaggcaggtatacaaacaaggtcaagaatttaagaagaacaggtaaaccatgggtaaggagatatgccttcgagtaaggtattatggtgtccgaaagcagttatttagaccagtagtagcaggaattcacatcctgctacttcttttactctcctagagcgtgaaaaattagaaggtggtattttcagcttattaattggcgctacaaacccttctagtcacaaacacacttgtgtaagtctttacggaattagatatttgcaggtgcaacccttccctgttaaacaactagcctgtgtacttttgtagaattaagtaaaggaatgcttatgtaggcgcatccttcgttcatctttcgttaaagataaccttatagaaatagcagttgtatggtgttgaaagattgcctaaataaggttgaagtgcgcagagctcttgtccgaattgttattcttctgctgatcatatataccacctacctgacaacttccatgcatttaagctaacttttatttttgaatttgagcacacggtgaatgtaaattaaaaacaaatgtaagttttcagccctacaaattgattatcaaaccactacccctatcaccaacaaatcttgacttattaattatatttatataaaatttttattctcaaaaagaaattgtttaaattcattttttgatttagagctaaacgtctaagcataatattaacgatatagcaactgcaaaaaatagagcaccttaaacaaagggctacataattttaagcagtaaatatgaagaactgctgtgctaccttgtccgaactttcggataggccggcagataggtctttatgctatgctattgatgttaaaggtactgaaacgggagagttagggttgttaaataaaaaaggcgagttgccccgccttgaatgttttcacaacggaataatccttattgtgaattgctttttctttgaactactaaataaacacttttaaattatatatccaaatctaaaccaaacgcaaatgaaaaaaatattaggacttgatttaggaacaaactctattgggtggagtttggtcgacaaagagaataagaaaattttaggaatgggttgtcgtataatacctatgggaactgacaaacaggactacgaaaaaggaataggaatgactaaaaatgctgatagaagaacaaaacgtactattcgtaaaatgaataaacgctacaaacttcgtagaaataagttattgtatattcttcacgaattagagatgttacccaagcaatttcagtttaaaaatggtattcctgaagctactaaaattcaagacttagaacttcttcctattaaaaaaggaactttgcagttaaattctttgcaacattaccaattaagggtaaaagcattaaacgaatccatagagccaaaagagtttggtaaaatattatacagtttcaatcagctaagaggttattctggtggtaataatgatgaagaggacacaaaaaagaaaaaagaagaggataatgatgatgaaaatgatacagtaaaaaaatatgaggtttttacacaaaaagtagccatacaaaaagtagccatacaaaaagttgaattatcagaaagtaaatttcaaggaagaggaaaaaataaggggcaagaatttaataagttcgatgtaactgttttgatagatgatgaagaattagaaggcgaaacagagcttcaaaatctatctgaaaaaatcaatcaagaagaagaattagaaatccgaatcagacgaaataaaaaaggagagacaacgtctgtagtttttgctttgcctcaaaaaacgaattggcgtaagcaaatggaaaaaacagaagaagacctcaaacaaggtaatttgcatatcagccaattgattttacaggatttaatacaaaataaatggactaaaattagaaaccgagttttcctgcgaaatcgctatcaagcagaatttgatgctgtatgggatattcagagcaaagctcaccctattttaaatagttgcccaaaagaaacgctagaaaaaatagcgaattacttgtttccaggtaaaagtgaaacacaagaaaaattaagacaaactgcaataaaaaatggtttaaaatatatcatcaaagaacaagtaatctattatcaaagaccattgaaacctcaaacagaattaatcagcaaatgcccgtttgagaaagaagaaacagttttagctaattctcatccattgtttcaggagttcaggtgttggaagcaaatcaacaatttgtttattacatcaaaacaggaagtatataatgagagaaaaaagaaaaatgtttttcaatacacagatagatttttgactgatgatgaaaaacaagaaatttttgatcgactccaaactcaaaaacaattaagttttggcgaggttgcaaaaattgtaaaactaaaaaacgacaaaactgaatacttaaacggattaaatgtaaaagcgaagcttattggttgtgatacacaaatcacaattaagaaaattttaggagctcattttgaaatacttaattcgattgatgaaaaggtaatagaaaaaatttggaaagctatttttgataatgctaataatggtagtgaatatgacccaaatagtttaaaggtttcttcaattaaagaaattttgaaaccactaaatgatgaagatttagcgacagaattggctttgaaatttgcccaaagtgttaagtttccaagaaagtatgccagtctttctgaaaaaacaattctcaatattttgcctttaatacaattgaatcctaaaaatgtttcggaacaaataaaaatcaaatttgacaacattaaagacaacatagaaagattaaataaaaacgagaatgtcgatattgaaacaggagaaatcattaatgatttacaagattatgtgattgattttgttcaaaacaatcctaatgctttagaaaaaggcggaattatggaagcttttgcaatttctttagcttatagtaaacatacggctgaaaaaatttcagcacaattcaaagactatcacgaaatacaacgagtagatagaaatttacgaaatccgatagttgagcaattggctaacgaaactatgcaagtagttaaagccatttggaaacaatataaattcaatcccgaagaactcgaaataagagttgaactagcaagggacttgaaaaatagtgcaaaagaaagagataagatatacaaaggacaactaaaaagtcaaaaaacaaacgaaacaataaagaaaaggttaacagagttaaaacaggaattaagccctaaaaatatagagttatacaaactttggagtaatcaaaatacagaaaattatcccgctccaaagaaagtaaccgaaccaacaaaggatgagatcgaaaaacttaggatttgggaagagcagggctgtatttctccatacacgttaaaacctattcccttgtcaaaattattttcgcctgaaagattatatgatattgaccacattgtgccaaaatcaagattctttgatgattctgcgtcaaataaagtggtttgtgaaacgaatattaatgaagaaaaaagcaatcgtacagcttgggaatatatttcacagcaaaattctgcttatgaaatttgttcaattgagagctatgtagctcatattaaccaaattttctatggaaaaaagaaaaagaatttgttgcttgaaaagattccgactaatcctgttgagcgtcaaataaaagatacacaatatatttccgtagccgtaaaaaacgaattagcgaaaattgtaggaagtgataatgtaaaaaccagtacgggagaagtaacaagttttttaaggaaccgttggggattgcgagatttatttatgcggttaacacaagaccgatttaaacaaatggagctttgggatataaataaggaaacacaaaaaacaaacgatgaatgggtaaagttagaatttgatgaaagaaagaataaaaaagtcttaaaaatcaagaattggagtaagcgatatgaccaccgtcatcacgctattgatgcgttagttgtggcattaacagaacaaagtcatatccagcggttgaataatcttaataagtatctgcaagatgaactcttaaaaagaaaagaggagttcaatcttgaagtaaaagaagatgaaacaatacttgaagcatttttcaatttggataaaaacagaagagcagaaatacagagacaaatagaaagttcaagacattttgaaaaaccatttgaagatttagtcaaacaagccagaactcttttagaagcaatggttgtatcagttaaaccaaaagataaattaggaataaagaaagatgatagaggtaatgtacaattgaaaataagaggagctttacaccaagaaaccaattacggtaaaacaaaagaccctaaaacaggggtgttgcgtgataccaaaactattgatatatcgaaaataacagcaaaggatatttctcaaattatagaccaagatattttagcaaaagaaattgacaatcatagaaaaaaatatgattctatgaaagaagcctttacgggtgaaggactaaaagcatttaatgaaaacaggtttcaaacaaagaaacctaccgagttcaaaccacctgtttataaagtaaaagtatggtatagtaataaaataacagaagaaagtacattgcaacgtctgtataatgataataataagttaagcgttgttacaggagataactatctttttatgataatggaaaaagcgggtaaacggatttttgatattgcttcgctttacgattctgccgatattgctaaaagggctttacgagagaaagacgaaaattataaacagcgtatatgtgaagattatagaataaagcataaagaaaaacccggaaaagttttgtttacattacagcaaaatgatttggtttatcttccagagaatatagatgaccctgttttaaattttagtaatgacgaatttaaagagtggttaaataatgttgaaaacaaaagtaaatttagtaaacgtgtttacaaggctgcgaaatttacaggaaaagattgtcattttgttcctcataattttgccaatgttataagtattccaaaagatttgacagatgaacaaaaggaaactttaaaagaacaatataaagacaaaaaaatacctaaaaaagaattgaattttattgagtatggttcttatagagattgctctccttacgaatcgggagaagtttcttaccagaagtctaaatgaagaagtcaaaggtaaaaataagcagtttaaacctctgaaaattcaagatacttgtataaagttagaaatagattggttgggtaatctttcaaaagcgtaaaccaatgaaacgtacagatttccttaaatcattaggcttaggtgcaggagggttgatactaccctccaatagcttgattaatacacagccagtgaagatatacgataattatatccgtggagctatgcattatgactatcgaaaaataaaagacgaaatcaaagagggggatgaagtgcagctacttagggagcaggacaacatatatgacagctttgccgtccaggttaataaagagcagtatagattaggctatttggctgcttatgaaaatattgtgttagctaatatgatggattcgggcattggacttaaagcatacatcagccagaagaatttaaaacgacatgcccaggaatggttggctatcgaagtttttgcggagctggtagtacctacacaaaagctcatcgacactatgcttgcagaaagccgggcagatgacgctatggatatttatagaaaaggagattttatagtgtaattaattcaacctcgacatacggcaaacaccatttataaacctaaatcagtatgatcaaacgaaccctttacttcagtaatcccgcctatttgagtcttaaagataagcaactgagcatagacctaccgcatttaaaagtattaggagaaaaagaatccaaaaaatcggtccctatagaagatatcggtatagttatactcgacaatcaacaaatcaccattacccatgcctgtattgccgctttgctggaaaataatgcagccattattacctgtaaccatagccaccaccctactggtatgattttgccgttagacggacatgatacgcagagcgagcgctttcgttaccagatagaagcatcgcaaccccttaaaaaacaattatggcaacaaactgtacaagctaaaatacttaaccaggcggccattttatttgaaagagggattccatgcgacaatatggtttactgggcaaggtctgtccgttctggtgaccctgacaattatgaagggagagctgccgcttattactggaaaaacgtttttccggaaaagctaaagttttttagaggcagagaaggtgatcctcctaataacttactcaattatgggtacgctattttacgagctatagtagccagagggttggtatcatctgggttgctccctacattgggtatccatcaccgaaataaatataacgcctattgtttagctgacgatattatggaaccctacagaccttatgtagataaaattgttttaggtatagtagaccgtggtgaaaactttttggaattaagtcaaaatctaaaatcacaattattctctatagccgaagtagacgtacagtttgaacggggagttagtccgctaatggtaggcttgcagcataccactgcatctttggcgaggtgttatgaaggagtagtacgtaaaatcaactatcccacgctaaagaatttcgacagtaaacgcgttgctatatacaaaaccccaaaaggagaaagtatagcagcagataataacgcggagtaccgcagcaatagcgacccagagcaactacctttttaaaatttatgcgtttaaatgaatatcgtattttgtgggtactagtattttttgaccttccgaccgaaactaaaaccgacaggcagatttacgctaaatttaggaaagatttaatgcgtgacggtttcagcatgtttcaattttctatttatttacgccattgcagcagccgggaaaatgctgatgtacatattaaaagggttaaaaaattacttccaactaagggccatgttggaataatgactattaccgataagcaatttggcatgatggaactttactatggaaaggcagaaaagaagctcccagacacgcctcaacaattagaattattttgacaaatgacaaaataaagacattctaacaataattattacccttagttaagctttatccggcaaacttacagaaagtagaaatgtcttaaataaaaaaatccaacactaaaaatgttggattttttaaatcctaattttagacccaacaagctgacattcaaaatattaaaccaaggtatgttgttctaaatatcagtatttcaaagaatgaaagcaattcacaacagcgatctatcaattcggttaattgctcttgttgttctaaatatcagtatttcaaagaatgaaagcaattcacaacagtaaattgcagcatcacctttagaattgtgttgttctaaatatcagtatttcaaagaatgaaagcaattcacaacctatcatgttttcatccggagcaggcagcggttgttctaaatatcagtattt

SEQ ID NO: 1956 - DNA, 15890 bp, synthetic construct
  source 1..15890: mol_type = other DNA
  misc_feature 1..15890: note = Synthetic
taatttgaatttctccattaaagtcatcaataaagtttgaatcggcatccattatttttccactaatagaaacattggacaaggctcttaaagtatcgttttcaatttctgggtcaataccatttatgcttgttgtaacgattttgtatttaggcaaactaattctaagggcagggtcgcctaacaaaataacacatctttggtcagagctaacaggagaaatactcctatcgttttttgtaacagcataagcttctccaaaagttcttgtttgattattctcattggtttctaaaatatattgatgaaatcttttgttcatcatatcatttgcataaattggtcttgatgcagaaatcaatgcaatcatacctccatttctactatataaagaatactctgctgctgaaggtttgtcaaccatatcaaaacgagcaaaagagcaagttgaggtaatcattagagggagtgagttataattagtccatcccataatatcagtaatggtaattaatctttcacttgagagatggtcttctgaaccatgtccaacataattaaaaattaaacaaccttttttcatttgttgattaatagcctttgaagcatcaggatatgtgtttccagaggaagaagcatattgtttatatgcgtccgaataaatcttaactgcatttatttgaggctgttgaaggtttgtttgttcaaatatgttttcaacgtctttaataaaataatgatctcctgggtcagcgtcatcagctgttagaacggagtaatttctccaatcagttattttgtcatttgtaagtatgtctttctttaaaagatacctttcagatttatcaactaagacttcagcttgttcaatcgttgagacaggaaatcgaccaatacctatcaataaagtgtctcttaatgacattggtaataatccttttgcgtttggagataaatagcccaagaaatcctcagcaggaaaatgttcattagctaatgatttattgtcaagttgataagttagaacaaagttattattatatttaaggatgtttttattatcaaaggttccgtctccaaacaataaaacattctttggatttttcccttcagccttatatttattgtaaagcattcttaaatactctttataagcaagaaaatcaggagttcctgaagagaattcattatatatttgttcagtcgtaacaacgctggttataagattattatgttctttatgtatctcagcaagtctattggcttgttccaagaaaagaggatgagtaataattacataatcaacaggttctgaagcatgtatgttttgatttataactttcccaattggctttatagtgttaaagtttgaattatagttgaaaacaacaacatcccttaagctatcacttacaagattaaaatcataggttttagcatttgagttgtaattaccaataatatgagtagggtttatccaattagtaacatcccaaacaacaacattttcgttttgaacatttgatattatgttctttacaaccttgttagttcccaaaaattctgtagtcttatattttagtataagtggggcagtatattggagttttctatcataattcactaaaatataatctaaccacccctttgaaagagattccccttgaaaagaaacacttactttattatttacattcctaatgctgttagtcacttttctaattattttatcatttggatgtgccccagcattagtaataacaggcaaaaatataatagtatctatcaaaacattattgtaattaaatacaaatgatgtagtagtctcactttgagcagctggcttatattcaataattgccggcttaatcaagttgttattctcatcaaccaaaggcgtctttatatctaatggatattcctcaattttattatttgagaattgtttcccgagccacagtcttccactttcaaaaatattaactaattcttgctttgatagaaagaaatctcttgtagaaattgcacttgtgtcggcaacaagattctgatttgaagaagaactaattcttttcttttctccaatagaatcattaaatgttacaaaataataatattggtcagaatatgggtgaagattaaagctccatgtgtcctcttctttattaaaattccaagtgtttccaccttccccataaaaaatcacataacccccttgagaaaaattattattgggatcatgcacgtagatagaattctccaataaatcggaatgtgtgcaaagagaactatttgtagaaattggtcttcctccattcccataaatagaaaggtttgaagagttaatttgcgatgcaggaactcccattgcaataaaatcattataggttaacttatataacccagaagaagaaatggaaaacttataccaatcaccatgagctaaaactgaagaatcaggataactaatagactgagcatataatccactactcaatgtcataagacatataataagcgatttaatgatgtttttcttttgcataacttgaaatatattcaataaaaataatccagcaccaatataaacataaaaattaaatttttattgttgagctaaaaacaaaagaagaaaagaatatgataaataattttgggcaaaatgaccattttgtgcatattttgtaacataaagtacaataattctgtataatgggataaaattctatacataagaaataaattaattgtctattttgtgcttgaaaaacaatggttaagagaattgaaagtaaatttttaatccgtatattattaatcatttgtaattttttcgtaatattgccaattgaatttatacactattaaggataaataaacaaactgataatgaaaaaaatcatactatttacactgatagcatttatggctttagttggagaattaaaggcacaagaccctcatttttctcaattctatgctaatccactatatgttaatcctgcacttgctggttcaaccgtatgcccaagactgggattttctgtaagagatcagtggccaagtttgggtgcatttcaaacagcaactgtttcatacgatcaatatgtggatttcttaagtggaggtattggtgcaataatcttaggcgataaggcaggtgatgctttccgttcaacttctttttcattaatgtattcacttagactaaaattaacaagaaaaatcaacatgaaccttgctcttcaagcttcggtagctaacagaagtttggactttcaaggacttacttttgccgatatgattgatcctcgttatggttttatttattcaactcaagcccaacttccaccaagtttaagcaatacatatgcagactttgctgctggaacagttgtttatggcgataactggtatggaggtgcagcttttgctcatttaactcaaccagatgatggatttgtttcctacaatagactaccaatgaaagtaactattcatggagggatgaagttaaatattagtagagacaaaagaagaacaaatgctttctttggagctccaataatttctccaaatgtaatttataatatgcaaggaaaattccatgacttaaactacggtctatatttagattggtcaccatttattgtaggtgcttggttccgtcaagggtttaataatccagatgcttttgtttttatggcaggagttcaacatggtatgtttaagataggatatagttatgatataaccgtatcttcgctttcaaatgtatcaggaggagcacatgaaatttcacttggaatacaatttgattgcccagaaaagcgtaagaagttaaaatcaatagattgtccatctttttaaaagataattgtaacaaaaaatactaaaattgagtatataaggaagtaaacacgaaaaataaatagtaaaaatatattttgtatgaaaaaaaatgcattcaaaaagattttatttagcatagcaatagtagccctactatttggatgtaaagggaagaaagaagcttctttcaccacaggctggaactatgacgaccctgaatggggaggttttgaatcagcaaagcctaatgatcaattagaacctaatggaatggtatttgtagaagggggaacttttgttatgggacaaacaacagataatgttcgcaaagaatgggataaccaacctcgtagagcaacagtgtcatctttctatatggacgaatgtgaagtatcaaatttagattacagagagtatttatattggctacaaagagcttatggcaatgactatccagaatatgtaaagaaagctttgccagatacacttgtttggagatcaaaattagcattaaacgaagcctatgtagagaactatttccgtcatcctaactatgcagactttccagttgttggagtttcttggttacaagcagttgagtatgcaaattggagaacagaccgcgttaatgaaagaatattggttgaaaatggatacttagaattagacttagatgctcaaggagacaacacttttaatactgatgcttattatgctggattatacgaaggtttagttttggaagaaaaagaaaacttagacccaagttctgaaggagtaagaaaaatcaagatagaagacgggcttttattaccaaagtttcgtttgccaaccgaagcagaatgggaattttctgcttatgcactaattggaaacagcttcgatgaaagaattgttgaaagaagaatttatccatggaatggttaccaagtaagaactgacgacaagaaatattatggagaaatgttagccaacttcaagcgtactaagggtgatgctatgggtactgcaggagctttgaatgaccattgggaatacacagcaccagttgctttctatttccctaacgattatggcttatataatatggcaggaaacgttgcagaatggtgtttggatgtttatcgtccttcaacaaatcaagatgcagaagacattaatcctttccgtggaaacgtatatacaactaaggtattagatgctgatggaatgatttcagaaaaagactctttaggaagaattagctatagagaagtaaccgttgctgaaaatattaaccgtacaaactacaaacaagccgataatattaactatcttgacggagatcttcgttcacagctaacagaccaatggaagaaagaacaatcagaagatgaggatatgatagtttatgaagatgatcctgatgcaatgccagtttctgaaacaaatgcaatgtatgagtatggagtttcttcactaattactgacaaggtaagagttattaagggtggctcatggagagatagagcctactacctaagtccaggacaaagaagattcttagatcaagcaaagagtactgaatggataggtttccgttgtgcaatggaccaagttggctcaaaaagtatatactaatacataataaaatatgataatgagtctcatcttttaggtgagactttttttatatcaatttttttcttaatttcgcaagctcgaatgataaagaagtacgaacaaattatagctgatcttaagaccaagaacctttctccaatctatgtattgactggagacgagcctttctatattgatgcattggcagaacaatttgactccttagttttagacgaaacagagaaagatttcaatcaacaagtgctttacggaagagatattacgattgatgatattctctccaacgcaaaacaatacccaatgatgtcagattataggttgattttggttcgtgaggcacaagatattgagaaagaggactggacaaaatttgattcctattttaataatcctgtcccaacgtcaatcatcgtaatctgctataagtataaatcaataaataaagcattcttaaagaaggttgaaaaggcaggtgtagtttttgaaagcaagaaactctatgacaacaacatacctcaatggacaattaattatgctaagtcaattggcttaaagataaattcttatggctcacagcttattgccgactatttgggaaataatttagagaaaattgcaaatgagctatccaaactaaagctaaatctcaaggaaaatgaggaaataacaataaatctcattgaagaatatattggaataagtaaggattttaatgtttttgaactgcagaaggcattaacttcaagggatatacttactgcaaacagaataataaactatttcgaagcaaatccaaaggaaaacccaatccaaaggataatgcctgctctattgtcctacttcacaaagattattattgcagcacaagtaaaggacaaaaccccagataatatttcaaaagctattggagtcaataaattctacctaaatgaatacttaacagccatcaacagctttagcttagataaattattcaatataatatcactaattagggagtatgacctcaagtccaaaggattggatgttgctccaaatctttcaaacggcgacttgttaaaagaattagtatataaaataactcattagcacccccaacaaaaaaacaattagaaaaatcaatttcacccatgaataaacaaaccctacttctcctattcacatttctttccctctcattagtttctttttcccaaacaggaatgattaaaggctttgtatatgataaaaaatcaggtgagccaattctctttgctaacgtaagccttcaaaagactaattatggctcaacaaccgacgataatggatatttcgtaataaataaggttccaaaaggggagtattcacttagggtaagctttatgggctttgaagaacaattcgttcctgttcaaatccttgctggaggaatgctatctttacgaattgaattagaacctgtctcaacaatgcttcaagctgtagagattaatgccgataggcttgctgcaaggacagaaagtcaagtttcggttgagaaaatcacaccaagagaaataacacaaatgccttcaattggaggaagtgccgatctggctcaatatatgcaagtattaccaggggttatcttcaccggcgaccaaggaggacagctttacataagaggaggctcagcaattcaaaacaaagtacttttggatggaatggtaatctataatccttttcactccattgggcttttctcagtttttgaaacagatataatcagaaatgcagacatattcactggtggctttggagcaaaatatggtggagccctttcatccatcatggacatctcaacaagagaaggaaataaaaaagaaacccacggcaagataggagcaagcacctttggaacaaacataatggttgaaggaccaataatcaaacaagacccttcaaaagaggtatcgctatcctatctcctaactgccaaaaactcctacctatccaaaacctcccaatcaatctattcctacattgatggctcactaccctacgacttcttagacatttacggaaagcttacccttagtggatacaacggttcaaagataaacctattcggatttaacttcatggacaaagtaaaccaatacaaatcaattgcaaattttgattggacaaatagaggctttggtgcaaatttcctactcctaccaggcaacacaacagccctaattgaaggaatattagcctattccgactacacaataaatatggatgaaaccacaaccaacaccgcaaggtcaagcaatattggaggattcaatgcaggactaacagcaacaaatttctttggagaaaacaaactaatatatggatttgaaatgattggctcaacaaccaacaccagcctaacccaatcagattccctaactaccacctccacccataacaccaactactcaaccgaaatgggagcctatatcctcttcaaaggaatatgggaaaaattcctctacgaaccaagcttcagaataaactactatggttcactaagcaaaggctcacccgaaccacgccttgccctaaaatataacctcacagaccgaatccgcctaaaaggagcagcaggaacctattcccaaatattcatcgacacaaaaccaagctacgacatagtaaacctcttcacagggtacctaaccatagacccagaaatgatgaatatagtcagcaactaccgaaacgaagaaataacctcctatctccaaacctccaaccactacatatttggagcagagtttgacctaacccaacgaataagcctaaatgccgaagcctactacaaaaccatgaaaggactaatatcccttaatagatacaaactatttgaagacgaccaagaacatagctcagcaggaacaagcccacagccagaacacctcaagaaagactatgcagttgaaaatggcaaagcctatggagtagatttcagtgcaaaatatgacgatggaagactctatgtttggacagtctattcactcggaaaagtagtaagagaagatgagcttatagagtacgcaccacactacgacagaagacacaacatcaacgtattgctatcctaccaattaggactctcacgctcatgggaaataagcctaagatggaactatggaagcggattcccattcaccccaaacaaaggaggacaagaactattggacttccaatcaggcataaactacgactatatatttgccaatggcaccctacaaatgctacttggcgactacaactccaaacgcctaccagaatatcaccgattagacctatccataaagaaacgctttgaaataaaacacacaatcttagaactaaacctaagcataaccaacctctacgaccgcaacaacctattctatcaagacagaatattagggcaaagagtagaccagttgccaataatgccaagcttcggactcaattggagcttctaattgttagcttttttttgtcagaattaggattcttgggattacaggattaattggatttttgttgtgtgggatttattgctgaggcaagcggcaagccgatgagtaatcccacacgttattactataaggactttcaatcctttacagcagctaaacaactaaacctttcagcctctaaaccccagtttaaaagttaaaaattaaaatttgcaattctcaaaataaagtattgactaattaagaaaaatttcgtatatttgcaaatacaaaatcttaagaataagtctgtagagatttaatacaaaattccccaataaagtttattaaaaaaagatgcacatcttttaccccgaaagatgtgcatcttttggtatgaaagatgtgcatctttcgagaattatctccttgttttaaaaatttataataaggttttgtgaaaatatatccttgttttgtaaaaatatctccttgttttattttgctgaaacaaggttttatttcacctattaatttttacttcataaagaattcttttccccatatttaggactcgtaaacttgttgactttcctttatatttttctaattctatattcataattttctttcaatttttaataattgagggttttgatacacttaaattttgtaactaattgattgatagctttcatacactattacaccccccttagtatagtgtaatggtgtaataagtttaataggttcagacttgcactaagacaagtttgcttagtgccaagtctaaactcttgatttattaaaaatattttatagctattttgtttgactgttgggaattctactcttactaattatcaattgatataaaaaaacgaaagtggaatataaaactccacttccgctttaaatgttttcacaacggaataatccttattgtgaattgctttaagtttgttcggcaaagatagaaaaaaaaactatacttgcaaattattttgaaaaaatttgaagatataaaaatatatttatacctttgaacattgaaataactaacgaataattacataattattatgaaaaagatattaggattagacttaggaactaacagtattggctgggctttagttggaactgatgaaaacggaaaaccaaataaaattgaagggatgggaagtcgtattattcctatgggaacagataaacaagattatgaaaaaggagtaggaataacaaagaatgcagaaagaagagaaaaacgttcttctcgcaaaatgaataaaagatacaaacttagaagaaataagttgttgtttatgttgaatgaattaggaatgttgccagagcagtttcaattcaaaaatggaattccagaagctacaaaaattcaagatttagaactcctccctattaaaaaagggacactacaattagattctattcaacattataaattaagagcaaattcattagaaaatccaatttctttaaaagaaataggaaaggtaatttatagttttaatcaattaagaggttattcaggaggaaataatgatgaaaaaaataataaaaaagaagaagaaaataatgaagaaaacgaaagctttaaatcttatgaagtaataactcaaaaagtaataataaaagatgttgaacaatcaaatattaaatttaaaggaagaggaaaaaataaagatcaagagtttaataagtataatgtggttattttatttaacgatgaagaaatagaaggagaaacggaacttcaaaatttatttgaaaaaataaatcaagaggaagaattagaaattagaattagacgaaataaaaagggagaaaaaacatctgtagtatttgctttacctcaaaaaactaattggcgtaaacaaatggaaaaaacggagaaagatctcaaagaaagtaatttatatattagtcagttaatattaagagatttagggcaaaataaatggacaaaaataaaaaatagagttttcttgcgtcatcgttatcaagcagaatttgatgtattttgggatacacagagtaaaacatacgaatttttaaataattgtccacaagaaaccttagagaaaatagctaattatattttccctggtaaaagtgagacacaaaagcgattaagacaggatgccataaaaaatggattaaaatatattatcaaagaacaagttatttactatcaacgaccattaaagccacaaacagaattgattagtaattgtagatttgagaaagatgaaaaagtaattgctacgtcaaatcctttatttcaagaatttagatgttggaaacaaatcaacaatttatacattacaactaaacaagaagtttacaatgaaaaaaagaaaagaaatatctacaagtataaagattactttttgacaaatgaagaaaaacaagagatatatgaaaaactgcaaactcaaaaacaaattggatttagtgaagttgctaaaatagttaaactcaaaaatgataaaacagaatacttaaatggtttaaatgttaaagcaaagcttattggttgtgatacgcaaattgtaattaaaaagattttaggtgaacactatgataaactttattccgaagactataatattgtagaaaaaatatggaaggtcatatttgataatgtaaacaatggaagtgaatatgacccacaaagtccaaaggttttatcaattaaagaaaagttatttcctttgaatgataatattatttcaacagaattagctttaaagttggctcaaaatgtaaaatttccaagaaaatactcaaacttttctaaaaaagcaattgagaatattttacctttaatgcagttgaatccaataaatatacctgaaaaagttaaaaagaatttttctgttattcagaatttaattgaaacaggtgaagttttagacgaaaatcttttagaagattatgtaattagttttatccaaaataatcctaatgttttagaaaaaggaggtgtaatggaatcatttgcgatttctcttgtttatggtaaacatacattagaagaagtttctccacaatttaaggattatcatgaaatacaaagagttgaaagaaatttgcgaaatccaatagttgagcaattaactaatgaaacgatgcaagtaataaaagcaatttggaaacaatacaagattaatcctgaagaacttgaaataagagtagaattggcaagagatttgaaaaatagtgctaaggaaagagatgcaatatttaaaggacaaattaaaagtcaaaaaacgaatgaaagaataaaaaagaaattatcagaaaataatatcgatttaactgataggaatatattaaaatacaagttatatgaacaacagaaatttatgtctccatatacaaaacatataattattccttttagtgaattatttgatgataagttatatgatatagaccatattattcctaaatcaagatactttgataactcaatttctaatttagtggtttgtgaaacaaatattaatgaggaaaaaaataatcgtacggcttgggagtacatttcacaacaaaattcaaagtttaatattttaagtattgatacatatttaagtcatataaatgaaaatttctatggtaaaaagaagaaaaatcttttacttgaaaaaattcctactaatcttgtagaacgacaattaaaaaacacacaatatatatctatagctgttaaaaatgaattagctaaaattgttggaagtgagaatataaaaacaagtacaggagaagtgacaagtttcttaagaagtcgttggggattaaatgatttatttatgcgtttgacgcaagatcgttttaaacaaatggaactttgggatataaataaagaaactggaaaaccttacgaagaatgggtaaaagtagagtttgacgaaaagaaaaataaaaatattcttaaaatcaagaattggagtaaaagatatgatcatcgccatcattcaattgatgcattagtagtggctttaacagaacaaagtcatattcaaagattaaacaatctaaataaatatcttcaagatgaattgacaactcgacaagatgaatttaaacttaaagtaaaagaagatgaaacaattcttgaagtatttttcaatttagaagagaatcggagaaaagaaattcaaaataagattgaaagttcaagatactttgaaaaaccatttgacgatttaataaaacaagtaagtaatcttttagaaacgatgatagtctctattaaaccaaaggataaattagggatagctaaagataagaaagataataatacaccagataaggaattaaaacctcagttgaaaataagaggaggattgcatgaagaaaccaattatgggaagacaagagatccaaaaactggaatgttgagagatactaaaaccttaaatttatcaaaaatttctacaaaagatattccgcaaattattgatgaagttcttaaaaaagagattaataatcatagaataaagtatgattcaataaaagaagcttttacaggagaaggattaaaaacctttaatgagagtagatttcaaacaaaaaaaactaacgaattaaaaccaccagtttataaagtaaaagtatggtatagtaataaaccaacagaagatagttcattgcaaaggctatatgatcataatccaaaacaaagtgtaatcactggagataattatttgtttatagtaatggaaaaagcaggaaagcgtatttttgatatagcatctttgtatgattcggctgacatagcaaaaagagctttgaaagataatattgaaaattataaacaaagtatttgtgaagattttaggataaaacacaaggataaaccggaaaaagttttatttactttacaacaaaatgatttagtttatttacctaaaaataacgatgatttagttcaaaaccttaataatgatgagttaaaagaaaggttaagtataattgataataaaattgaattttgtaagagagtttttaaagttgtaaagtttacagggaaagattgttattttattcctcataattttgcaaatgttattgttatgaaaaaggatttaacagaggaacaacttaatgaaataaaaattagaaataaaggtaagaaaagtattcctaagagtgaattaaattatgttgaatttggttcttatagagattgttctccatatgattctttacataaagaaaatgaaaaagttaagatacaagatagatgtattaaactaagaaccgattggattggaaatatttatttttaatttatgattaaacgcacgctatactttggttctggtgcttatcttagtgttaaagatagtcagttggttgtgcaattagcagaagatacgaccaatactaagaaaacaatgcctattgaagatattggtgtagttatattggataatcctcaaattactattactcaaagggtgttagttcaattacttgaaaataatgttgcagttataacatgcaatcaatttcatcatccgataggacttcaattatgcttggatagtaatactttacagagtgaaagatttcaaactcaaattaatgcttctgaaagcttaagaaagaatctttggcaacaaacaatcgttagtaagatttataatcaagcaatggtgttgaaagattttgatgttccaataaggaatatgattacatggtcaaactctgttttgagtggagacagtaagaatcatgaagcaagagcagcagcttattattggaaaaacttattagaaagtcatgataattttaaaagagaacgttttggtgaatatccaaataatttcttcaactatgcttatgcaatacttagagccataactgctcgttctttggttgcatctggtcttttgccaactcttggaattcatcataaaaatagatataattcctattgtttggcagatgatataatggagccttatcgaccatttgctgataaattaattattgatattattagaaaatatccacaagaagaaactttaacaactcaaattaaacaagaaattttaaaactacctattattgacgttgagataaataaaaaaacaagcccattgcaaattgctatgcaagaaacaacttcatcgcttgctcaatgttttaattcgacaagaagaaaaataaaatatccaatttttggaacaaagatttaatgcttataaaataatgtgggttttagtactatttgatttgccgactgaaacaaaagcagataggaagaattatgcaaattttagaaaagaattattaaaagatggctttactatgtttcagttttccatatatttgcgtcattgtccatcaaaagaaaatgcagatgttcatatagcaagagttaaaaggctattgcctcattatggcagtgtaggaattctttgtataaccgataagcaatttggcaatatggaaatcttttttggaaaacaacccaaagagaaccttaatgttgttcaacaattggaaatgttttaagaataattaactgtaaattaacgtaaattaactattggggattccccaaaaactatatgaaaattaatttttcttctaaaaagagagcaaaaaataaaagtttaggaattataaaaccctaaacttttatcctttaattgagtttgaatgatgatttaataaatcctaaacacttttctaattgtctcaaatacatttgcttaaagcaccctctgttgttgctgtaaagcaaagatacaaacttaaaagcaattcacaacggataacctcctgtcgcaacatagatattagttgttgctgtaaagcaaagatacaaacttaaaagcaattcacaactaatttgcataaacatagcttccacgtattgttgttgctgtaaagcaaagatacaaacttaaaagcaattcacaacaggtaaaa

SEQ ID NO: 1957 - DNA, 14874 bp, synthetic construct
  misc_feature 1..14874: note = Synthetic
  source 1..14874: mol_type = other DNA
ttggattaaacaatcaatgtatgccaagggttggaagagagcaaagcgggacaggtatataccatgtaatgttacgtggtatcaatcgccaggatatctggaaaaacaatgaagaacaatgattcaaaattcaatcaaacctgtccctctgattgttctgtattatgcctctgctctcagttcttcaacaagtgcgtcgagattagaaaggttctttcctgcaaagcgaccttcttgagcttcgcgataccctctcgtaatagtctcttcaataaaagccttcttgctccgcagtcgttcagcaaatttggcatccactttcttttcccatgcctctttacgctgacgggcagcattgagccacgagagaatctcattgattctcgctgcaaatttaagaaaatattctgaataaacaagaaaagaaatgaaaggaatcaaatatcaacagaagtattgagatactgggctatacacttccaaaaagtccaccgttaaaggacgatggaccaggacctaatgttttcacaacggaataatccttattgtgatttgctaaaaattagtgctgcaaagataaagttttttaatgatagtaccaaatgtttcaaaagaaatttgtacatttgtagcagaaataattaaaaacgctaaaaattatgaagaagattcttggtcttgacttagggacaaatagtattggatgggcagtggtaagtgcggatgagaatggtaatccaaagcacatagaaggtatgggaagccgcattatccccatgggaagtgataagattgattatgagaaaggcgccacaataaccaagaatgcagatagaagggcaaaacgttctgccaggcgcatgggaaaacgctataagatgagacgtaacaagttactttttattctttcaaagttgaacatgttgcctgaacatattcaatttaagacagactttcctgaagcaacgaaaatccaagatctggaattactgccaatcgcaaaaaatactatgcaactggattctctacagcattatatgttgagagagaaagctcttcatgagaaaattgaaatgcaggaccttggcaagattttctatcagtacaataggctgagaggttattctggcggtggagatgacaacgattctaaaaaagaaaaaacagaagatgacgacaacaaaaaatatgaagttagaattcagaagttcatattaaaagatgttgttaagacaggcaatacatatactgcaaagggtggaaaagacaaaggcagcgaactacccatttacaatgtcattgcccttgacgaagacgaagaaattgaaggaacgacgaaactgcaaaacttatcagaaaagataggcgaggaaatagaattagaaatcagaataaagaaaacaaagaaaggtgatagtatcgcatttgctttgccacagaaaacaaattggaggaagcaaatggaggaaacagagcaaattttaaaggcaaagaattattatccctgccaactatttgcagaagacttaagaaataacaaatggactaaaattaggaacagagttatccttcgcgaacaatacaaacgagaatttgatgctgtatgggacgaacaagcaaagtattatccaattctaaagaaatgcccagatgatattctgaacgaaattgtcagttatatctttcctggtccaagtgactctcaaaagaaattaagagaacttggattaagtaatgggctgaagtatatcattaaagagcaaatcatatactaccagagaccactaaaatcgcaatccgatcttattggtacatgccaatttgagaaagaagaaaaagttattcctgttacacatcccctttttcaggaatttagatgctgggatcagattaaccgtttatatatacgaagcaagcagcagatatggaatgagaagaaaggcaagtttgtcttacagtatcaaaatcgatacctgacagaagagcagaaatactctatttacaaccggcttcaagaacagaaacaactaggtttcaaggaagttgccaagattgtaaatttgggagatgacaaatctgaattcttgaatggactacatgtaaaggcgaaattatccggttgcgatacaaaaatctcaattaagaaaattcttaaaggatattgcgaacctgacacagcactcatagagaacatttgggaagcagtctataataatgtacatgaaggaagtgaatacgatcaggccagcaaacgggttttatctatcagaaacgcattacctgagactcttgaaaatgaacgaagaacggaattggctctgaaaattgcccagaacatcagattcgtcagaaaatacgcaagtctctcaaagaaagcaatcgagaacattctccccattatgcgacctaatccaggagttattcctgagaaggttaagaataattgggagaaaattaaatggcttatcaatactggtgaggttattgacgagtcagtactacaagattacatcatagacttcgtaaaagataatccacaggcattggagcatggcggtttaatgtacgcttttgcttcttcccttgtatatggtagacacactaaggaggatgtcaagcctcaacttaaagattatcatgatatcaaatacgttgaaagaaatctgaggaatccaatagttgagcaaatcgccaacgaaaccatgcaagttgttaaatcattatggaaacaatttcatttaaatccaaatgagttggaaataagagtggaattagccagagatctaaagaacagcgcacaagaaagagaaaacatattcaaagcgcaaaataagaaccgtagtactaatgagagaatcaaggaaaggctaaaacaggagaacgttcccgttacagacttaaacattctcaaatacaaattatacgagcagcaatcgtatatctctccttatacgaaaaataccattgtttttagcaaattatttgacgatagcttctataatatagaccacatcatacctaagtctcgttattttgatgactctatcgctaataaagtgatttgtgaaagcaatattaatgaagaaaaggataatcgcacggcatgggagtatatcagtcaacaaagctctcaatacactatactgacgccagaggattatcttaatcatatcaacagctcattctttggccaaaagaaaaaaaatcttttggcagagaagataccgtccaaccctgtggcaagacaaatgaaagatactcaatacatatctattgctgttaaagacgagttggcaaagattgttggaagtgagcacgttaagacaacgacaggtggcgttactgattatcttagaagccaatggggattaagaaaactgttcatggaactgactgaggctcgtttcaaacagatggaactatggaatctaaatgaagacggaacttccaaagaattatgggtaaagaaaggctatgacgaaacaactcataaaaatatatacgagataaaaggttggagcaaacgatatgatcacagacaccattctattgatgctcttgtcgttgcattatgcaatgagaaattcatcaaacggctcaacgacctcaataaatacttccaagaagaattatccaagcatcagagctccatcccaatcgtagatgaagactcaatagtaattgccttctttaacctcccaaaggagaaacgtaacaagataatgcaagagatggaaagctcccgcaaatttgatgctccctttgacaatctagttgcagaagcgaaaactctacttgaatcaatgattgtttcacagaagcccaaagataaattattaataaaggaagacctgaatggcaagaaacaattgaagattcgagctgccttgcatcaagaaacatattatggaaagactaatggtcgcgatactaaaaccgtcgctatttccatgttaaaagcaaaagacattcctcaaattgttgatgaagtcttgaaaaaagaaatagatgcccatcgcaagaaatatgaatcaatgaaagaagcattcactggagaaggtcttatcgcatttaatgagtctagattccaaacaaagaacaaatcagctcttaagccacctgtatacaaggttagattatggtatagcaacaaagaaaaagaaactggcaacctccaaccactatatggagaaactgcaaagaaaacggttgttaccggagacaattatatgttcgttgtgatggaaaagagtggaaatagagtctttgacatcgcatctttatttgactctgttgcattggcgaaagagtatgtaaaacaaggagttgctgacataaattatattaaagagaaaatatgtgatgacctccgaatttctagtaaggaaaacaaggctgacaaaatcttattctatcttcaacaaaacgatttagtgtacatgccaaaagaggacgatgagatattaagatttaataaattggagcttaagaactggctattaaataccagtaacaagattgaatttgcaaaaagaatatataaggtcgttaaatttacgggaaaagattgtttctttattcccaataatgttgcaaaggaaataagcatatctaaggaattgtcaatagaggaactcaaagaactgaaatccaagtacaaagacaaagccatccccaagcaagaacagaattatatagaatttggcacatactctaattgtacgccattagaaatgaataaactattcacaacatctatgcgagaagggaaaagatacaaaggcgagagacctcggaaaatacaagactattgtgtcaagataaaaacagactggctcggcaacgtcattgaatttaatggtatgaaattatagcctatgatcaaaaagaccctatgttttagcaatcctgcatacctctcattgagagatgcccaactggtaattaaacttccagaagtagaaaaggccgagaacctctcagcagacttcaaaaagtctgctgaggttactcgtccaatagaagatattggtgtagtcgtattggacaataaacagattacgattacacaaggagcattggaagcaatgctcgaaaacaactgtgcagtcatcacatgtgactcaaaccacatgcctgttggcctgctactgccattagtaggcaacaccactcagaacgagagattccgagaacaactcgacgcttccttacccttacgaaagcaactctggcagcaaactatgcaacagaaaattaggaaccaagctgcagtacttaacctctgttccaatgctgaaacaaaatgcatgctggcatgggcaaatgatgtacgtagtggcgacccagacaactacgaggctcgtgcagctgtctattattggaagaatctttttggtcatatccctggattcatcagagaacgtgaaggtgttgctcctaataacttgttgaattatggttatgctatccttcgagctgtggtagcacgttcgttggttgcaagcggtctactccccaccctaggcattcatcaccacaacaaatacaatgcctactgtttggctgacgacatcatggaaccttatcgtccctatgtggatcgtttggtttatgatattacagagcaatatggtgtagacgtagagctctcaaaggacatcaagtctgaactgctcttcatccctacccttgacattatcattggtggcaagcggagtcctttgatggttggtgttgcacaaacgacagcctctctttataaatgtttcagtggcgaattacgaaaaatcgcttatcccgatttatcatgattgcagaacgatttagcgaatacagggttatgtggctcttagtgttattcgacctgcctacagagacgaagaaagacaaaagagaatatctaaaattccgcaagcgtctcatcgaagatggattcactatgttccagttctccatctacgttcgtcactgtgccagcatggaaaatgcggaggttcatcgcaaaagagtcaaggctatactaccagagtttggcaaagtaggtatcatgtgcatcactgacaaacaatttggtaatatagaattgttctttggcaccaaaccacagcagccaaacgcgccaggtcaacagctagagctgttttagaatgtttggcaaatctttagattatttaaatccttattgtggccattcaagagcaaatcacaactctcttggggcagtcctacgtcggccatcgagtgtttatgcctctgcaaagatactaattttttagcaaatcacaaccggcatgataggaggcaagtttttcaaccaagtgtttatgcctctgcaaagatactaattttttagcaaatcacaacggatcgtacgggtattattacaccaaaggcagtgtttatgcctctgcaaagatactaattttttagcaaatcacaacaataaatctgacgttcaaaagttcattaagagtgtttatgcctctgcaaagatactaattttttagcaaatcacaaccagcgccacgatgcttatccatatcctgtgagtgtttatgcctctgcaaagatactaattttttagcaaatcacaacggtcagcatgacggaaatggcagtagcaaaagtgtttatgcctctgcaaagatactaattttttagcaaatcacaacatactccaagatctgaagaagtaatctgatagtgtttatgcctctgcaaagatactaattttttagcaaatcacaactgagtggcgacgagaatgccgagtgctactagtgtttatgcctctgcaaagatactaattttttagcaaatcacaactatctatcttgtcgtcaagcgcaccctcggagtgtttatgcctctgcaaagatactaattttttagcaaatcacaacggcctgcgtcatggtgctccagtccagggcagtgtttatgcctctgcaaagatactaattttttagcaaatcacaaccgctgagggcgcatacaggcgggcaccagcagtgtttatgcctctgcaaagatactaattttttagcaaatcacaacccattgtgcgctgtataattattttgtttcagtgtttatgcctctgcaaagatactaattttttagcaaatcacaacccttgcggttatttatgctgtcgagctgcagtgtttatgcctctgcaaagatactaattttttagcaaatcacaacgaagtgtttctacagcgtgttcaactatctgatgtttatgtcactgcaaaggtactaattttttagcaaatcacaacttttccatttgataaagggcacggttccgtgatgtttatgtcactgcaaaggtactaattttttagcaaatcacaacaactcatcatagttggtccactcggtacgagatgtttatgtcactgcaaaggtactaattttttagcaaatcacaacatttcatactttttctcgcccgacataatcgatgtttatgtcactgcaaaggtactaattttttagcaaatcacaactctggagtgatagtttccattttggatgctgatgtttatgtcactgcaaaggtactaatttcttagcaaatcacaacagactttggatgaagttaaagtacatattgatgtttatgtcactgcaaaggtactaatttttttagcaaatcacaacacggttgttgcttttctttacaaacggatagatgtttatgccactgcaaaggtactaattttttagcaaatcacaacatgttgatagtctttgccataattgtttcggatgtttatgccactgcaaaggtactaatttttttgaggcaccccccgccttcgaagcagaattgaacgagatgaaggtgctgtattcaaaaaaacacttgcactggatacgtattcagcacggtagacgagattgggtctgtgggctggaatttagaacagatagccaacggcaattgtctgcatgttgtttcgttccgtcacaccatctaacttactggcattgaccacgccaaacttatagcctgccatcagcaagcatcttgccaatgtctttgagacgggagagctgaaggaagaagcaactatttccaaaatggaaacagttcagcaagaaggcagcagaactgtaaaacgctctgtcgtgatgtataagctcgacgctatcatcgcagttggctaccgtgtgaacagcatccgtgccactcagttccgacagtgggctacgagcgtgctgcggcaatatgccattcgcagctatatgcttgacaagaagcgcatggagaataatagtttcgccgttagcatactcgcggcgggccttattgatgtcggctatgagtgcgttgtcttccaacgtaataatcatctgtgagggtttggaaatagagatacccaaaaatagtgaattttaatgcacactattgcatggttcatggaaaatgattacttttgcagtgttaatacttattaggtatgaagaacgtgaagatgtatgagcctcaggacaagatgataacgctcatcaaggacaactacagcgtattgcagtcgctgagtagttttggcatcaacctgggatttggagataagacggtggaagagacttgccaactgaacggcgtggactgctacacgttcctggcggtggtgaactacaccatcaacaactatgccatagatgctgacgacgagcgcatcagcatacctactctgttgcactatctggaggccagccaccgctactacctggacttccagttgcccttcatacgccgagaactggaggagagcatagccggcgacgacacgctggggcaattgatgctgcgcttctacgacgaatatgcgcaggagatacgccgccacatgaagtatgaggagaagacgctgtttccctatgtgcagtcgctcattgacggaaacccacagccagactacaatgtggagatgttctccaagcaccatgagtcggctgacaagaaactgcgtgagctgaaactactcatcatcaaatacctgcccggcgacgctcacctgaacagcaaactgacggctgcactttatgacatctacaacaacgaggaatggctgcaactgcacgctgaggtggaggaccacatcttcacgccagccattagccgcatggaacaacggctgaagcagagcgacgtgacgaaaaacatctcgtcgatggtgttcaagggtggagtggactctggcgaggcactgtcggagcgggaacgcgacgtagtgattggcgtggtgcagggactgcagaacaaggagattgctgagcggctgtatatctcggtcaatacggtaataacccaccgccgcaacattgcccgtaagttgcagattcactcgcccgccggactgaccatctacgccatagtcaacgggctggtagacatcagcagcgtgaaactataaagttctattgttttactttttccatctccacatagccgtgggtaacggcatagatggtcagggctgacacactcttcagtcccagtttctccatgatattcttgcgatgggtgacaaccgtcgagagtccgatgttcagcttgtcggccacctctttattaatatagccctggacgataagcgacatcacctctatctcgcgccgcgagagaatgtcctgacggacggattccttcaccatggccggcatgttgcgtgcatctccgtgtccatgctgtatgagttgcaagagcgagtggaccaactgcttttcgggaagattgatgtagatgctgttgaaaccggtgagttgcgacgtctcggtctgagccgtagtcatcacgatggttttacgcttgcgctcttggaagaaggacagttcgctcagcaagatgtctgtagagacgaaataatggaaatactggtcgggctggttggctgagagttcggcaaaagagccataggtgtcaatctccaacatgggcgacacgctctgcaacagttgtctgagtcctatcagcgccagcgtgttgctgccaacaatggccatcttgggcctgcctgtcatctgcatttccatcataacgggtgcaaaggtacgaaatttatttcatattagggtgtgtcgatcagaaatatttctctcatatttatacaacagcctgtcgggaggaatgcagaaaacaaaccggaggccaccctaccccgacagcaggtgtcgctggatggtctccggtcatgtgtgtggctgttgcgccgtgatgtcttctccgcttaacgaatgtcgaagagattgaagaatccggtcatcataaacaccttacgaatatcgtcgttgatgttctggataatgacggtaccgcccttggctgaagcctctttgcggatggttaggaacaggcggagacctgaggagctgatgtactccaggtctttgcagtcgagggtaatcactttgtttgcattagctatgagtggggtaatctcctgctgagccttgacagccgagggagtgtctaaacgtccactaacggtggcatacatgccttgttcttgttcttgaatgtcgaaaatcatagttataaagtttttaaagattattttataagtgctttgcgggcgccctcaatctctgacttcaggctgtccatttgttctttcagttcctctacagtcgtggcattgagctgttcaagcggagccatgaccgatgctactggcgagatttcagaatcgtactgcgacaggtggttgagggcatcaatgaggagattgacacggaaggaaacattggatgctgtctcgtctgtgaacgtgctgaggaacttttcctggttctgactgacgaagtagatttcttcaacgagcgacgaggcagccatctgccagtagtagttgatgcgcccattctcttccatggcctgatagaggactgccgaagcctcaaagagatctccaccagacttgacattcttgaacgaggggtcgtcgatgtctgcaagcagtttggagatactcttgttataggcatcttcaggcatttcgtagagtcgggcaatgcgtctgtcaatgcccagggcagcgagtacgcgatacttctcggccagtgttacagcctcgtcagcaatgctggcatcaagaagataggtaggcttcacctgcttctctttcttggtgagctggaacttaccgtcggtttctgtcaggaactccggccgtttcaggttgccaagctcggtagcaagactgtccaagtggattttgatgctgctctctatctgccgctgctcgaaggttttcagggtgtctgtctcctctgagctttcaacattcttgtggcctccacatgcagcgaagacgatagccgcgagagcaaggattgttaactttttcatttgtcttgtactttaattatgagttattattaatgtttactgttttcttttttaactccaccgccccaccctaacggaagagaaacggggcttctgcgtgttgtgttaccgcctcaaatagcgacctgggcagtcggtgagtagcagaacgatggccagaaggctcatcagcagcagaaccgacagattgaaccaaagcgtcttgacgtgcagcgggcccaccaccttttggctggagtagaagggcgaattgccccacgtggtgaagggcgtcaggaatacgaagccggcacggggtaccaagacgttgcctacaacgtcaacaacagtctgctggtcggcgccaacgacgcactcttctaacttcaggttatagttgtcgcgcttcagttgcacgacaccctccttgccgtactgttttatcagtcggttcataacggcctcgcgctgcagggccaactggttgctgcgcttgctgagcagctgttcagcccggtgcatgtagtcagagagcgactggtagccatagtcacccgtatagggctgcagtccgcagaaggtggccagtctgggcatattggtacgtataacgtccaaatggtgttggtcgccagtcagtcctctctgctgttcgttgtgcagggtctgcagctgcgactgcaattcatagaggtagcccatgttgaagaactggttctcatacttctgacggtcaacgtcgaagaaatgtctctcataaggattgtcggtaaacgacgtaaccgccagcgcctcgtaagcccaacgggaaggtatgaggttgcccaccagcgggacgttacccgtggtgctctttggcgtcaggtcctgaaagctaaccaccagtccgcagagcagtatctgggggataatcagcagaggtatgctgatgtagatgcctacaatgctgttgagacactgcgagagcagcaatcccgtgaggttagctaggaatgcagtaacaaagaggacgagccaccaggtgaagaacagtccgctgatgcccatcaccagattgcccaccacgatgaagagcagcgtctgcaccagcgagagcaagcccatgaagaccaccttcgaccagatgtagccggcatacgacaaatgcaggaagcgttcacgtttgagcagtgcgcggtctttgaagatctcctcggcactaccagtcatgccggtaagcgtagccacaatgactgccataaagaagtagctgacgaggtttttgttgttcatcacgctgtagccctccggtggagcaaagcgcgtcagatagctacaggccagtgccagcagaggtgcctggagcagggcaatggcccaatactgcgtattggaaatcttggaatgaacggtacgacgcaggaagatgcagaactgcttcagcactccgggattcttctggtcggaagcgggaatatcggttacagccacaggctcctgcagcagcttttcttgtttcttgaggtacaactcgtgccactcttccggactggtcttacgcacgtcagagagttcaccgctactgttcagagccttctcgttaatgatgttaagcaccacctcaggattgatgttgccacaggtgggacaggcgctggtttcggcgtcagcatagttggcggcctctttaaaataggtgacggcgtcaatgggattgccgtcgaagacaggatagcctcccttgtcgagtagccacagacggtcgaagagcttgtagacatcgctggaaggctggtggatgttgacaacaatgagttttcccttcagcgtctgctctttcagcaggttgacaaccttctccgtatcggccgacgacaaaccgctggtaggctcgtcgaggaacagcacggccggctcgcgaatgagttccagggcaatgttcagacgcttgcgctgtccgccggagatgagcttatgaatgggcgagccgaccttcaagtcctttaccgagtcgagtccaaggtctttcagcgtcttcatgacacggcggtccaagtcggcatcattcataccctcgaaacacagtttggcagtgtaccagaggttctggtagacggtcagttcctcgatgagcaagtcgtcctgaggcacaaaacctatgagtgccttggcagcgggctccgtgatgctgtggccgttgatggtgagggtgccctgctgaggagtgaggctaccgttgagcaacgacatgagggtggtcttaccggttccggagccacccataacagccagcatttccccactatgcagggtgaagctgaggttgtgcatgccattgtcactgccggggaaccggaagttgacgtcgcgcccacagaaggtgacggactgggtagtcatctcgtcctgttcgtagctgcgaatgatggtagagtaatagagcgggtgcccatctcggcttttcagtacactgctctgcagccacacctgataggtgcccggcagcacgggaatatcgttgagcaacacggtgtcgtggccaagataggtgaacagcagaaaaccggtagcggggtcgagcagtgttttcagctgtccgtcaacatgtttcagactgtgaaacttgacgtattctgttggtacgttgttgacgtagtccaaatagcagcgatagtggctggcagggatgttgaagatgcgggccatctccttgaagatgctctcagcctgcagaccgtcgtcgctgcagaattccatcaagcgcaacagcagcagcgcctcttccgtagcacgaatgttgccgtgcagtgttgagcagatgtcgctgacagccaccctggtgtccaagttaccgctggattcgtaggccaggcgcatgtcgctgtaaaggtcgagatagagatcaacgttgcgtataccgaaatggcgtcgcagataactgacgagcatggcctttgcccgtcttccatccacctgttcttctttaccaaagagggcaaacaagctgatgaagctggatagaatgatgtcagtcattaatctattttcttgcgaagcgtcagaatattcttcccgtcgctgcgttcataattgacgctgtccatcagctggcgtaccagatggatgccgagtcctccgatggggcgttcctcggcagagagggtggtgtccacctccgccttcgcagtggggtcgaagggtttgccgctatccgtgacggtaaatgtcagcacatggtcggcatctgtggcttcgatggtaacgtggccttccgttccctctggataggcgtaactcatcacgttaacgacagcttcttccatggccaggttcatctgtatagccacagcaaggtcaatgcccacctcttcacatacctggtcgacaaaatcggccaacgtcggtacttgttcgatatcgttgtctaaggtaatactgtgctgcatagtgttatcttttgatatttggctacaaatatacaaataattcacgaaatatttgtacctttgcagacgattttttatataatgatgaaaaaacatatc

SEQ ID NO: 1958 - DNA, 11949 bp, synthetic construct
  misc_feature 1..11949: note = Synthetic
  source 1..11949: mol_type = other DNA
atatacgtttcggtaatccaaacctcgaccccgagtactccaattcgttcgagctaaactatattaagacgcttggcaagcaatctttgtccgtatccggatactttcgcaataccgacaacgtcattcagcgtatatcgtacctatattccgacataatgtacaacactagcgacaatatcacatcgtccgtatcttcaggtaccgagattgtgttaaaaaactctattgccaagtttctaaacatcactactacggcaaatatttattattattacctcaacggcttcgattatcttgtgcccgcaacgggctatcaccttatcgggcagtcgcaaagtaacgtctcttggaacgttcggatgatggcacaagccgttttacctgccggttttacccttcagctcaacggcggatacaatgctccgcgtgtcgtttcacagggaaagaccgacgccgatttttcgatagacttcggcttacgtaagtcgctcggtaattttatttttatgctcaatgctaaagatattttcgattcgcggcagcgtattgttaccacgactgccgataatttcacgcagcggtcggtgatgaggcgtggcaagcgagagattactctgtcggttacctattcttttggtaatatgaagcaaaacaacaacaaacgtcgtaccaacaacaacgatacttccaatggcgactatcagattctcgacacaggtatcgattgataccgtttggtcggctgtcgtcgatttttcgcatatttttagtatctttgcagcatagagtaatatattgtcacgatgaattaccaagccataatagataagtattatcctgtcgatacgcctatatatcatttgcttatgtcgcatagtcgttccgtagccgataagtcgctatctatcatccgtcggcacggtttcgatgtaaatacggcttttgtcgaagaggcggctatgcttcacgatattggtatttttctcaccaatgctcctgttatcgaatgttttggttcgcatcaatatatcgagcacggttatcttggtgccgatatcgttcgtcgcgagggatacccatttcatgctcttgtctgtgagcggcatacgggtacaggcttatcgaccgacgaaatcgtacgtcgtcggcttcctttgccgcaccgcgatatgcgtcctatctcactcgaggagcagattatatgctatgccgaccttttcttttcgaagacgcatctcgatgtagagaaacctatcgatatcgtgcggcagcgagttgctgctttcggcgatgagtcgttgaatactttcgagcgttgggtctctatatttgagtaatatttattaatgtataatatatttcaataaaatatgttgtttcgtgatgttatagggcaagacgatattaaggctcggctcatacgtagtgtcgacgaagggcgggtagctcacgctcaactattttacggtgctgccggcgtgggatgtctgccgatggctttggcttatgctcaatacctctcgtgtgagcatcgcaccgacggtgattcttgcggacaatgtgcgtcgtgcaggcagtatgccaagctatctcatcccgaccttcatcttgtctttcctattgttaataaaaaatcttccggcgacgatggctctatttgcaacgattttctaccgctttttagagacgccgtgctcagcaatccttatctgtcgttcgaagattggcaagaggctttgggcgacgacaagaaacctgtcatatatactcgcgagggtgacgaaatcatacgaaaactcaatctgaagtcgttcgagtcgccttataaggtgatgattatttggtgtgccgaccgtatgcacgaggcttgtgccaataaggtactcaaaattctcgaagagcctcaggggcagacgcttttcatccttatttccgactctgtcgaagacattattcctactatacgttcacgtgtgcagcaggtgttttttcctcccatagagcatcgctatcttagcgaatacttgcaacgcttcggtatcgagggggccactgccgatttcttcatacgcaattcgcggggaggcattagtgagctttctcttcaaatatcgcaatccgatacccgacagcaatactttcgtatgtttaccgatttgatgcgtagctgctggaacctcaacgaagagactttcaccgaacattggaagccactcctcaaccaatttgtagctctgggacgtacggggcagttgtctttcttgcaatacgcacagcgacagctacgcgagaacttcgtgtacaacctctccgctgatagtctggtgtatctcagtagcgaggagctcgattttgctcataagtttgcccgtttcgtcaacgaaaacaatatcgaagaacttgccgacgagtttgctcttgccgagtcgcacatcgaccgcaacacgaaagaccaatacgtcttcctcgaccttatgctctccgtccatcgtctcctaagagcctgacaactaacgatataaccctttaatacggataaacaacggtactgctctccgataaaaatttatgcttagataaaaattgggggctgacttctttctcataggcaaacacctttcctttttgcatcaattttcccataaaaaaatgctccctgttgatgtacaaggagcaaaacaaaagttttcactacggaataatccttattgtgaattgctcaaaaatttgtaatgcaaaggtacaatatttttcccaatcaacaaaaaaaaacattaacttcgcaaagttttcaaccacaacacacatataattcaataaaatagttttttatgaaaaagattttaggactcgacttgggcacaaacagtatcggctgggcattggttgataaagacaatcaaaaaattttaggaatgggaagtaggattattcctatgggcaaagacaagatagactatgaaaaaggagatggagttacgaaaagcgctatgagaagagccaagcgatctactcgtagaatgaataagcgatacaagttacgaagaaataaactattgtatattttacacacgttaggtatgttgccagagcaatttcaatttaaaaaattaaatgaaaaagataaggacggctctttgttgcgacttaatggaacaaaagaaaacaattcttttaaagagacaaataacggaattcctgtccctacgaaaatacaagaattagagctgttgcccatttcaaagaaaacactacaagcagattcaataagtttttgtcaattgaaagtagatgctctcacaagaactattgacataaaagactttggcagaatactatataattttaatcaacttagaggatattctggtggcgatagcgatgaaagaagtaaaaaagaaaacgacgaagaagaaagtcttggcaacaaaaactatgaggttattacacggaaagttggtattatcagcgtagaacaatcagaagatacatttaagattagaggaggtaagaacaagggacaacaactcaataagtttatcattgtcatttcattagatgaccaagagttagaggggactacagaacttcaggatttcaaagaaaaagtcggtcaagaagaagagctacagataacaactaagagagataaaaatggggaggttactagtaggattattactctaccccaaaaatctgattggcgaaaagagatggaagccaacgaaaaaatattaaaagaagacagactctttattagtgaactgaaattaagagacttacagaataatggtaaatggacaaaaatacggaatcgcgtatttttgcgaaatcgttataaagaagaatttgataaaatgtgggatacacaagctcaaaaatataactttctgaaagaatgtcccaaagagactttggaaaaaatagcaaattacatttttccgggaaaaagcgaatctcaacaaaaacttcgtaaaaacgctattgaaggaggattaaaatacattataaaagaccagatcatttattatcaacgcccattaaaaccacaaacagagcttatcagcaattgtcggttcgagaagtcagaaaaagtcatagctgtttcacatccattgtttcaagaatttagatgttggaagcaaattaataacttatatattacttcgaagcaacaagtctggaacgaaaaaaagaaaaaaaatgtttggcaatacacaaatcgctatcttacaaatgaacaaaaacagaggatatatgaaaaactacaaaaccaaaaggggataagttttaatgaagtaaaaaaaatagtcgagataaaagatgataaaatagaatatctcaacggattacatgtaaaagcaagattaatagggtgtgacacattaatctcaatcaaaaaacaattaggggattatgccgaatctctactagaaaaagacatctcaattattgagaaaatttgggatgcaattttcgacgtaagaaatcacgaaggcagtgaatatgatattacaagtaaacgagtaacccctatttttgagattctaaaagaatatcttgatgattctcaaaaagcagaggaattagccttgaaattagctcagaaagtaaagttcgttcgaaaatatggcagtttgtctgcaaaagctatacaaaaagtattgcctttgatgcaacttaatccgcaaaatatctcagaacagattacagacaaatttaacaccatcaaaaattttatttcaacaggcgaaattttggataatacagactataatttccaggattatgtaattgattttgtagaaaaaaaccctaatgccctcgaaaatggaggactaatggaatatttggctatttcactggcatatgacaaacatacagcagaaacgatggaagctcaaatctctaattatcacgatataaactacgaaaaaagaaatttacgcaatcctatagtggagcaacttatgaacgaaacaatgcaagtggttaaagctatttggaagcaatataacatagacaccaaggaattggaaatcagaatagaattggcaagagatttgaaaaatagtgcaaaggagagaaaagctatttatgatggacaatcaaacaaccaaaaagaaaacaacaagacaaaggaaaggttaaaagaaaatcaaatagctctcacaagtgaaaacattttaaagtatcgtctatatgctcaacaaaaagaaacttcaccatacacggggaagcctatagatttttctaaactattcgacaacaaagaatatgatattgatcatatattgccaaagtcgagatactatgatgattcgttttctaataaggttatttgcgaaaaaaatatcaatgaggagaaaagcaatcggactgcttgggaatatatttcgcaacaaaattcaaaacacgaaatattacccacagaaaatttcatcaaacatgtaaataataattatttcggcaaaaagaaaaaaaatctgcttgcagaaaaaatccctacaaatccagtatccagacaactcaaagatacacaatacatttctattgccgttaaaaatgaactcgcaaaaattgtcggtagtgaaaatataagaacaagcactggggaaattacagactttctccgtagtcgttgggggctgaaaaaactctttatggaaatgaccgaagaaagatttaagcgaatggaattatgggatttagacgaaaatggcaatccaacgactacgactaagtgggtaacaaaagaagtgatgaacgatggtgagaaagataaaaatgtttacgaaataaaaaattggagcaaacgttacgatcaccgtcaccacgcaatagatgctttgattgtagcattaacagaacaaagtcacattcaacgactaaacaacttaaacaaatatgttcaagaccaattagaaaggcgaaaagaagagtttaagattaccaccggcgaagatgaaactgtttttgaagcattttgtaatttggaagaaggacgaagagacgaaatacttcaaaaaatggaaagctcaaggtatttcgaaaaaccttttttatatacaaacaaaaagggagaaattgtttcttcattatgtcgtcaagtaaaggagcatttagagacaatgattatctcccaaaaaccaaaagacaagttatccattagcgaagatacactagatcctaatactcctaacaaaaaactcaaaaaacagctaaaaataagggcagcaatacacgaagacacctattatggtaagaccaatgaacgtgatactaaaaggataaagctctcagccttgtcggcatctgatatagacaaaattatagataaatcacttgcatccgaaataaaagagcataaaaagaaatatataaaaaaggaagatgcatttattggtgaaggtttgaaagaattcaacgataatcgtatcaaaaaaaacaagcaacctgtctataatgttaaagtatggtacaacaaaaacgaaaagaaaaaggacagcttgcaacgtctttacgacaataatgaaaagcaaagcgtcataactggtgataattatttgtttatagtgatggagaaagagacaaaaaaaggagtctcacgagtctttgatatagctcctttgtacgactctgtcgcattagcaaaggaatatttaaaagaaggcaaacgtaactttaaacagcttatatgcgaagattatagactaaaacacacagacaaacctcaaaaagttttgttttacttacaacaaaatgatttggtgtacctacctacgtcaagcaacgaccctgttttaaatatgacaaacaacgaattaaaagagtggcttaataaggattgtgaaaacaaaaaatcttttgcaaggcgaatttataaagttgtgaaaatgacggggaaaaactgtttctttatcccaaacaattatgcgacaactataagtactcctaaagacctatctaaggaagatttagaaaaattacataaagaatacaaagatcaagataaagacattccaaaacacaagaagaactatgaggaatttggatctttcggttcaagtatcaaaactgaaatcaatgacaattttgttaaagaattggtacttaaagaaaaatttgatgggaatcaacctataaaaattcaagacacatgcttgaaattgaaaatagattggctcggaaatatcgaatttgactaacaatcgcatattttacctatgattaaacgtactttatattttggtagtccgacatatctgtcgttgaagaaagaacagttggtaatacaactacctgaggtagtcaaaaacgattcgctaccggataccttcaaggcagaggcggtcagaactattccggtagaagatatcggcatcgttatacttgacaataagcagattaccataacacacggagtaatcgaaagtctcttggcaaacaattgtgctttaatcacttgcaacagcaatcgaatgcctgtcgggttaatgctccctctcgacggcaataccacacagaccgagcgttttcgcaatcagatagacgcctcaataccgttgaaaaaacagttgtggcaacagactatacaggcaaagatagagaaccaagcgtacgtcttagcaaaaaacaccgattgtattgtaaaaaatatgcaggtatgggctgccgacgtaaaaagcggagaccccgacaattacgaagcacgggctgccgtctattattgggcaaatatcttcccacaaatcaaaaacttcactcgtaaccgtgagggtgtccctcctaacaaccttctcaactacggatatgccatcttacgtgctattgtagccagagctttggttgccagcggattgcttcccacattaggcatacaccataggagcaaatacaacgcttactgccttgcagacgatattatggaaccttaccgcccatttgtcgatacggtagtttacgacattgttaccaatgtatctccctacgacgaactgacacaggaaataaagacaaaactcctcaagatacctgttttagacgttattatcggtggcgaacgaagtcctctaatgattgccgtcggacaaacaaccacctcgctctacaaatgtttctcgggcgagtgtcgaaagataaaatacccttcatttgcataatattttgttgtggagcgttttagtgaatatagagttatgtgggtacttgtatttttcgatttgccgaccgaaaccaaaaaagaccgtaaaaactatgctatttttcgagacaaacttataacagacggctttacaatgtttcaattttcgatatatctgcggcactgcccaagtcgcgaaaatgccgaagttcatataaaacgagtaaaaaacaatcttccgcccaatggacacgttggtattctttgtattacagacaaacagtttggcaatatggaacttttctacggaccaaaggaagagcagatacgacctccttgccaacaactcgaacttttttagaaaaataaaaatcctgccgtatagcaggattttgttttgaaacaactctttttttagatttctaatttagcctgtaactttatatttttatgcatattacatacatccagttgtttcagactacaaagatacaaacttttgaaagcaattcacaaccgaagcggggtttagaagctccatttttgtgttgtttcagactacaaagatacaaacttttgaaagcaattcacaacgatactattgcacaagttacttgccccgacgttgtttcagactacaaagatacaaacttttgaaagcaattcacaactcaagtagctgcggagcttctgggtcgagtgttgtttcagactacaaagatacaaacttttgaaagcaattcacaactccatggcagaaacacagaaaacaactgaagttgtttcagactacaaagatacaaacttttgaaagcaattcacaacgggcattgtgtcgcttatacagcgtgggctgttgtttcagactacaaagatacaaacttttgaaagcaattcacaaccacgttgccttgcatcgttgtgaagttcgcgttgtttcagactacaaagatacaaacttttgaaagcaattcacaactttcgacaccaggcatatcaccggcaatatgttgtttcagactacaaagatacaaacttttgaaagcaattcacaacccagtactacgagtgtgtgccgtgcgcagcgttgtttcagactacaaagatacaaacttttgaaagcaattcacaacattacatttggtgtttctttttcttctcttgttgtttcagactacaaagatacaaacttttgaaagcaattcacaacagctgctacaagctgcggcggtcaatagagttgtttcagactacaaagatacaaacttttgaaagcaattcacaacagctgctacaagctgcggcggtcaatagagttgtttcagactacaaagatacaaacttttgaaagcaattcacaacttcgtatcgtatatgggcgcgtgcgcgagagttgtttcagactacaaagatacaaacttttgaaagcaattcacaactggaataacaatagagttcgaagtgtcttcgttgtttcagactacaaagatacaaacttttgaaagcaattcacaacgataaagtccataaggaatttgatagaatcgttgtttcagactacaaagatacaaacttttgaaagcaattcacaacagctgctacaagctgcggcggtcaatagagttgtttcagactacaaagatacaaacttttgaaagcaattcacaacacaaacgccaaaccgctcaaaccataccggagattgtagccggtgatggcggttttaagaaagaatttccaagagagccaacccacgagggcggttgtaataaggcgtttgttcactgttttcgtagtctttgtttgtacacaaatatacgaaaaaaaaacgagatacgcaaatttattttcgtttgcgtatctcttacagtcgatttataagcctgttttaatccatatatatgtgtctttcggcggtttctctatccttaaatatatgtgcgataatactgtatcgtacttctgtaggcattgggagacatctggcagacacgaacatatacctatatccgtctttatacagaattttggtagcacgttcaaagcattctcggtactgctcctcttccgataaattggggtttagtgaataaaaaacgtgtcccaaacaaaactctttcatattgccctcttcgttttcgtaaaccatcacgccgttaatttcgcggttgtttaccggcttggagtagtctattgttttattcatcatcgcttcggatatggcatttttgtctggtttatggcatatcaagcctaaagaatcgagatagttgagcagactttttccctcttttgtacgttcgttgattgtgattgtgtatgtcgccataatatcaataactaaaaagtataacagtttcagactacaaagatataaattttctcaaagcaattcacaaccaacgggactatttttgcaacagtatgttggttgtttcagactacaaagatacaaacttttgaaagcaattcacaacatatgggagtatggcaacgatagtgctcctgttgtttcagactacaaagatacaaattttctcaaagcaattcacgacggcacactaatgaggctatttgtaggcaaacgattgagactctgcccggcttaaccacaaaatttgcttcacacctgagggcgcgtaatttccaataatatattacctttgaagccttattgtttttacgtctgtttaccacaaaaatatgaatgtagaccaactaaaagaggctatcgatatcctacgggcaggtggggtaatactatatcctaccgatactatctgggggatagggtgcgacgccaccaacagcgaagcagtacggcgagtattcgatataaagaggcgcccgcacgacaaatcgataataatattactcgacgacacatcaaaaatatcacgctatgtagaagaaatccccgatatcgcttgggacttaatcgagtgtgcctcccggccacttaccgtgatattcgaaaaagccaaaaatctccccacaaacgtagtaaactcagatagcagtatcgctattcgcatcacaagcgaggaggtatccgctacgttgtgtcggcttctggggcgaccgctggtatcgacatcggcaaatatcagcggcgagccgtcggcaaagagtttttgcgacatatccgacgagctaaaagctgctgtagactatatcgtacctctgcgacagtcggaaaaaacggagtctgctccttcacagataataaaactctataacgacgggcggttcaatatcatacgacaataatagcattcgaagatatggcagcgagaaacaatctttagtctgcaagcaaatggtgtgaatcagagaagagcgaggcaataaatcgggctgtaatcataatttttttaataaaaccgatggtttttggtataaaatcattgaaaaaccaaacagcatgttgcctctatggataatatactaatagacattgtattatttcggcagtttctacgttttagttctatttggagcaaccgtctgtaatacacacttcaacgtaatattcaactacatacctacgaaaacggcaattatatttatgacttttaaaaatcaataaatatgcggtttttgtgctataagattattatttttgtctgcattttataacctttacagtactcattttcacaaaatgaacacgatagacaatatactcaaaagaagaagtatacgacattacaaaagcgagcagatacctgccgatacgttgaaagagataataaactgcggtataaatgcaccaagtgccctcaatatgcagccttggcaaa

SEQ ID NO: 1959 - DNA, 9566 bp, synthetic construct
  misc_feature 1..9566: note = Synthetic
  source 1..9566: mol_type = other DNA
atcatcgacttgagcggctacctgcgcgaggagaaatacgaaatcgccaagcgccacctcatccccaagcagatgaaggaacatggcctcgacaacaagcaaattacgattccgaaggaaatggtgatgcgcgtcatcgaggactacacccgtgaggccggagtgcgcaacttggagcgccgcatcggtgacttgatgcgttatcgcgccaagcaagttgttgtaggtgaggagtttgacaagaaaatcaaggttgaagacctgcgcaaagtattgggcgttccgatgcatcatgatgaggacgaaatcaaacataccatgcccggcgtggccacgggtttggcatggacgcaagtgggcggcgaaatcctctccatcgaagtcagcctgagtcgcggcatgggtcatctgtcattgaccggcaacctcggcgaggtgatgaaggaatccgccaccatcgcttttgagtttatcaaggcacacgcttcacaactcaacatcaaccccgatgccttcgacgcttggaatgtgcacgtccacatccccgaaggtgccacgcccaaggacggtccctcggcgggtatcaccatgctcacggcattgacctcggccttcacccaacgcaaggtgaagagtcagttggccatgacaggtgaaatcaccctcagaggccgcgttttgcccgtgggtggcgtgaaggaaaaaatccttgccgctaagcgcaacggcgtaaccgaccttatcctttccattgacaatgagcacgatatcaaggacatcaaggaggattacatcaacggattgaacttccactatgtggaaaacatgatgcaggtgctcgaccttgccttggagaaggaacaggacaagaacgacctcgactataacaagtatctgcacaacttgcatccggaagtgattggttttaaggtgaataagtaatgcggaaagtttggttgggtgtattggctttggttttgttggctgcaggatgcagtcagcgacaagaggacgatgagagtttggccatcttcaagtacaacgaaagcgctggcatcctcaccctcgacccgatttatgccaaggacttgccgcatatatgggcttgtaaccaattgtttaacagtcttgtagcgtttgataaccacatgaacctcgttccgatggtggccaaatcatgggacatcagcgaggatggattgcgctatactttccatttgcggaacgatgtgcaattccatgaggatgagtgctttagcaagccgcgtttcgtgaccgccgaagacttcgtctattccttcaaccgcgtggtggacaagcagttgagttcgcccggagcgtggattttcgcttccgtcaggcacgaggatgagcaatatgccttcactgcgcttgacgattcgactttccaaatcgagctttccaagcctttcccgccgtttttgggcattttgtccatgacttacgcctcggtggtgccgcacgaagccgttgagtattacggcgatgacttccgcagccatcctgtggggacggggccgttcaagttccagtattggaaagaaggcgtgaaactcgtttgccgcaaaaaccccaactatttcgagcacgacgcggcaggggagaggcttccctacatcgatgccgtttccgtcagtttcttgattgacaagcaagtggctttcttggagttcatcaagggcaagttcgacttcatgtcgggcatcgatgcgcgctacaaggatgaacttttgacctacgacggacaactgcgccaaaaatacgaggacaaaatcgagctgattaccgagccttatttgaacacggagtatttttcctttttcattgaccccaacgacagcctaggtccagaccgctcaaaagcgttgcgccaagctgtcagcctctgcatcgaccgcgagaagatgttgcgttacctccgcaacggcatcggcgaacccggcacgggtggcatgattcccgccggattgcccggacacagcagcaccatcggttatggctatgacttgaaacgcgcccagcatcttgtggcggaaaaccatttggagggctatctgctgcaactcaccaccgtcgccgactacgccgacatcgggaagtttgtgcagagccaagtggagcaaatcggcctgcagtgcaagatggaggtgatgccgcccgccacgatgcgcagtatgcgctccagcggcagcctgcagtttttccgctcctcgtgggtggccgactatcccgacggggagaattacctctcgctgttcacgaccccgaatttctgtcccgcaggcccgaactatacgcattattccaattcgaaatacgacaagctgtatgacaaagcgctgctttgcaacgacttgcaggaacgcgcccgctattacaccgagatggacagccttatgatgcaagacgcgcccgtggtggtgttattttatgacgaggtgctccgtttcgtgaacaagcgcgtgaaaggcttgggcagcaatcccacgaatctgctggatttgcgacgggtgaggattggggaaggtttttagtttccaactgtcatgtaaaaaaagacgagggaaaaacccccgtcttggatgttttcacaacggaataatccttattgtgaattgcttcaaaaaacttgtgctgcaaaagtagagattttttcaatacgacaaatatttaatcgaaaaattttgtatctttgaagcctaattgtaaaccagcaaacacgcaaaacaatgaagaaattattaggacttgacttgggcaccaacagtattggttgggcggtggtgaacgcggatgagaatggtaatccgcaaagcattgaaggcatgggtagtcgcattattcccatgggtagcgacaaaattgattacgaaaagggagcaaccataactaaaaatgcggacagacgagcaaaacgctctgctcgtcgcatgggtaaacgctataagatgaggcgtaataaattgcttttcattttgaacaaattggaaatgttgccagaacagtttcaatttaaaaatggatttcctgaagcaaatgaattacaaaaactggaattactgccaatacggaagcaaactctacaattggactcactacaacattatgaattgagagaaaaggctctatttgaaaaaatagaattaaaggaattgggtagcatattatatcaatataatcgtttaagaggatactctggcggtggtaatgaagacaatgaaacaaaaaacaacaaaaaagaagatgaccaagaagatgttaagaaatacgaaacacgtattcaaaaatttatcatcaaggatgttagtcaatctgattcgacttttaaagtaaaaggcgggaaagacaaaggaaaggagttgcctttgtttgatttgatagtcattgacgatgacaaagaaataagtggaactacgacgcttcaaaatctcaatgaaaaagttggatcggaaatagaacttgaaatcagaatcaaacggaccaaaaaaggcgaagacatagcttttgcacttcctcagaaaacaaactggagaaagcaaatggaagaaacggaaaaggttttaaacgaaaggcaactgtttccttgtcaattatttgcagaggaattacgaaaaaacaaatggacaaaaatcagaaatcgtgttatcctcagacaacaatatgccaaagagtttgatgctgtttgggaagagcaaagcaaacactatccttttttaaacaattgttcacaagaccgccttcaagagatagtggaatacattttcccgggacaaagcgactctcagaaagcactgagagaagaaggcttgaaaagaggtttgaaatatattctaaaagaacaagtgatttattatcaaagacctttaaaaccccaaacagaacttatcagcaaatgtcagtttgaaaaagacgaaagagtaattccaatttcacatccattgtttcaagaattccgttgttgggatcaaatcaaccgcctttatattacttcgaaacaaaatgtatggaatgaacggaaaaagaaagatgtcatacagtacaaaaaccgctatttaacagatacgcaaaaactatcaatttacaacaaattacaagcacagaagcaactgggatttgcagaagtcgccaaaatagttgaactgaaaaacgacaattccgagtttttaaatgggttacatgttaaggctaaactaaaaggttgtgacacggcaatatcgataaaaaaagtctttggtgatactccaattgatgacgtttccatcgaaagaatttggcaagctatatatgataatgttcatgaaggaagtgaatacgacaaagatagcaaaagagtacgttcaatttttgatgcactccccgaaaacattgaagaaaacaaacaaattgaattggctcttaatctcgctcagaaagtgagattcgttagaaagtacgcaaatatctcaaagaaagccattgaaaacatcctgccaattatgaggttgaatcctcaaaacctgccagaaaagataaaaaccaatttcgagaacattaaacatttgatagatacaggggaaataagagacgagactttattacaggattatattgttgattatgtcaaagacaatccccaagcaatagaacatggtggtttaatgtatgctttcgcagcctctttggtatatggaagacacacaaaagaaaatgtgaagccgcaaattacaaattaccatgatattgtgtatgttgaaagaaacttgaggaatccaatagttgaacaacttgccaatgaaacaatgcaagttgtcaaagcactttggaaacaattcaaattgaatccagaggaactggaaattcgcgtggaacttgctagggatctgaaaaatagtgcgcaagaaagggataagattttcaaagggcaggataaaaacagaaaactcaacgagtctataaaaaagaaattgttagaactgaatcaagatattaatgatagaaacatcgagttatacaaattatggagtagacaagaaaatcttttcgatgaaaatgggaaacctttatctagaccaaaatataagaatgaaaattctcctacaaaagaagaaattgaaaaaatgaggctttgggaagagcaacgctaccttgacccgtacactttacaacctattccattgtcaaaattattctcacccgaaagattgtatgatatagatcatattatcccaaaatctcgtttctttgatgattctttagccaataaagtggtttgcaaaacaacaataaatgaagaaaaagataatagaacagcatgggaatacatctctcaacagaattctaaaattggcatatgctctttgaaagattatcttgacaatgtcaataaaatatttcatggacaaaagaaaaggaatcttttagcagaaaagataccatcaaatccagttgctcgacaactgaaagacactcaatatatttctgttgcaattagggatgaattagcaaaaattgttggtagcgaaaatgtcaaaacttccactggtggagttacggattatttaagaagccattggggactgaaaaaactgtttatggaattgactgaaccccgattcaagcaaatggaattatggaacttggacgaaaatggcaatcctaaagaatattggatttcaaagtattttgacaaagacagaaacaaacatgtatacgagattaaaggttggagcaaacgatatgaccacagacatcatgcaattgacgcacttgttgtagcattaagcaacgaaaggtatatcaaacgcttaaatgatttgaataagtatttccaagaagaattggcaaatcacaaaaatgacattcctgttaatgacgaggagtcgttggaagaagcatttttcaaacttagcaaagaaaagcgtgacgaaatcatgagagagatcgaaagttcacgcaaatttgatgctccgatgaagaatcttgtttcagaagttcgaaaattccttgaaacaatgattgtgtctcagaagtccaaagataaactatcaattaaagaagataaaagcggaaagaaacaattgaagattcgtgccgcattacatcaagagacatattatggacaaacaaatggacgggacacaaagaccattcatatttcggaattgaaagcgaaagatgttcctcaaattgttgattccgtattgaaggatgaaatcgatgctcatagaaaacaatatgacactatgaaagaagcgtttacaggagaaggacttattactttcaatgaatcaagatttcaaagaaagaacaaatctgcattaaaacctcctgtttataaggtaaaagtatggtatagcaagaaagaaacggaagaaagcgaattgcaacaactctatgatgacaattcaaagaaaagagttgtcactggagataattacatgtttgttgttatggaaaaagacggagaaagactatttgaaattgcttcattgtttgattctgtagaattagcaacaaatgaaatcaaagaagggcggcaaaatatcgatgcaataaaacggattatatgcgaaaacattcgtattatggacaagaaagacaaaaaagggaaagttttgccgaaacctgacagagttttattctatttgcagcaaaacgatttagtctatatgcctcgatacgaagacgatgaggtgctcaaattcagtattaaggaattacaggattggctgtcatctgaaaccaacaaaaaagaatttgccgcacatatttataaagtggtgaaattctcagggaaagattgtttcttcattcccaataattatgcaaaagagataagcatccctaaagacatttctgaagaagaaaaggcgagattagaaaaaaagtataaagacacaaagattcccaaacaggaattgaattacgcagagtttagttcatttggcaattgcatcaagtttgtaccagatgaaaaatttgtaatgaatattattgacaagaaaaaaccaaagccaatgaaaatacaaaattattgtgtaaaaatcaaaatagattggcttggaaatattattgaatttaacgggcaagagttatgaccaacataaaactattccaagacaaaaaaatccgttctgcatggaacgatgaagaagagcaatggtatttctccgtgtatgatgtcgttgaggcactgacagatagcaacgacccgaaacagtacatcaaacgaatgcggtcgcgcgacgaagcattaaatctcaactggggtacaatttgtaccccccttgaaatgatagcccatgatggtaaacgtcgaaaagtacagacagctaacatcaaaggcctattccgtatcatccagtctataccctcgcccaaggctgagcctttcaaacagtggttggcgcaagtgggttatgagcgtttgctcgaaatcgagaaccccgaactggcacaggagcgcatgaaggaactctatgagaagaaaggctatcccaaggattggatcgacaagcgtttgcggggcatggccattcgccaaaacctgaccgatgaatggaaacggcgcggcatcaccgccgaacaagattatgccatcctgacggcggaaatctcaaaggcgactttcggcatgacgccttcggaatacaaggaatacaaaggcttgaccaaaaagaaccagaacctccgcgaccacatggacgacctcgaactgattttcaccatgcttggcgagcgcgtcaccaccgagatttcccaaaaagaagacccggagacttttgagcaaagccgacaaattgcgaaaagaggcggcaatgtggcaggtgtggcccgaaaggaaaccgaaaaggaactgggtcgaagcgtgtccaatccgaacaattatctcccaacgcaaaccaacttggaattagaataagcaaccatgatcaaacgaaccctctttttcggcaatcccgcctacctgtcgttgaaaaacgcgcagttggtcatcaggttgaacgatgcccaaacacaggaagaagtgaccaaaaccgttcctattgaggacatcggcgtggtggtactcgaagaccggcaaatcaccatcaccaacggggctttggatgccttgctccaaaacaattgcgcagtggtcacgtgcgacgagaaacacatgcccgctggtctgctgctgccgctcgaaggccataccgtgcaaagcgagcgtttccgtatgcagattgaggcttcgttgcctttgaagaaacaactttggcaacagacagtgcaggccaaaatccgcaatcaggcttcggtactgaagcggatgagtggagcggaaacgggctgcatgatggcatgggccaacgacgtgaaaagcggcgacagcgagaaccttgaaggacgcgccgccgcctattattggaagtcggtcttccccgaaatggagcgtttcgtgcgcgaccgcgaaggcgatgcgcccaacaacctgctcaactatggctatgccatcgtcagggcggtggtggcgcgggctttggtagccagcggactgttgcccaccttcggcatacatcatcataaccgctacaatgctttctgcttggctgacgacatcatggagccttatcgcccgtatgtggacgaattggtgatacagatattaaggagcggcgtggattgcagcgaactgactaccgacttaaaacgccaattgctgggcttgcccgtgaaggaagtcgtcattggcggacaacgaagcccgttaatgaacgccgtcacgcaaaccacggcctcactttgcaagtgcttcagcggtgagttgcggaaagtggtgtatccgttaatggagctttgacatggatcgatttagcgaataccgaatcatgtgggtgctggtgcttttcgatttgccgacggaaacgaagaaggagcgcaaggcctacgccgacttccgcaagcgcatcatggccgacggtttcacgatgttccagttttccatctatctgcggcattgtccgagtagggaaaacgccgaggtgcacatcaagcgggtgaagtcgttcatgcccgagtttggcgacattggcatcctgtgcatcaccgacaagcagtttggcgacatggagattttcagcaactgcaaacccaagacggtggacacgccatgccagcagttggaactgttttgaatcggaaaaatgggtcagaacaaagaaaaatcccgctccaatgagcgggatttttcttttctgaaacaacttctaaatagttgtggctctttgagttatccatatcgtgttgtttcaaagagcaaagatacaagttatttgaaagcaattcacaactgtgaaaatagactaaatttgtatagatttgttgtttcaaagagcaaagatacaagttatttgaaagcaattcacaactccagcttagaccttaactttggcgacagggttgtttcaaagagcaaagatacaagttatttgaaagcaattcacaactgtgactcagtcaacacatacaatcggtgagttgtttcaaagagcaaagatacaagttatttgaaagcaattcacaac

SEQ ID NO: 1960 - DNA, 6253 bp, synthetic construct
  misc_feature 1..6253: note = Synthetic
  source 1..6253: mol_type = other DNA
gcggcggggtgtttaggaggaagggaagttttgtgttgataaggtagggttgattgggagtgaaagtccagtactaaaaagtttttgagtttttaagcacatcttttgcacgaatacgggaacccctcttatttccatctaattttttttaaattttcggctaacttgggttacacgtctcgattattatttaaatctagtatcctttggccggattagtatttaatggattattctatatatagtaaacgttgtaaaaaatataatcccggcgagagccgggatctaaaaaaattcactacggaataatccttattgtgatttgctttcagcgtaaagaaaaatactttatttcaaataaacaaaaaaatatacaatgaaaatccttggacttgatttgggtactaatagtgtgggatgggcattggtggataaacaagaagggcgcatcatcggaatgggtagtcggataattcctatgggaaaagacaagcaagattatgaaaagggccttggaatatctaaaagtggcgatagaaagacgaagcgaaccattcgaaaaatgaataaacgctacaagcttagaagaaataaactgctcttcgtgttgaatgaattgggtatgttgcccgaccaatttcaattcaaatacgggatcccggaaccaaacaagttgcagcaactagaattgcttccaataccaaataaaagagaatacgacagtaacggcagaagactagacaggaaatatgaggggaacaagaagataaagtgcgagcccaattctataatcaactatgaattgagagtaaaagcgctgcgacatcccgtggaacttaaagaatttggaaaaatactctatcaatttaaccaattacgcggttattcaggcggaagcaacaatgatgataccaggagcgtagagaacgaagacaatgaagacagtgaaataagaaaatacgaggtctttactcgaaaagttgaaattttaaaagtagagcaaacagacaaaaccttcaaatcaagaaggggcacaacccaagggcaagaatttaaaaaatttgatgtaaccattcttctcgatggcgatgaacttgtgtgtgaaacggagcttcaacatcttaaggagaaagaaggacaagaagaggaattagaaattcgaatcaaacgtaacaaaaagggcgaaactacatccgtaacaattgccgcgccgcagaaaacaaactggcgaaaacaaatggaagctaccgaagaagagctcactcgaagtaatctgcacgtgtctgaattaattctgaaggatctcagagaaaacaaatggaagaaaataagaaatcgcgtgtttttacggcaacgataccaggcagaatttgatgccgtatgggaaactcaatcaaaagcacacccgatattgaatagctgcccacctgaagtattggaaaaaatagcaaattacattttccctggtaaaaggaagtcacaggaagaactaagacaagctgccattaacaatggattaaagtatatcatcaaagatcaaattatatattatcagcggccgttaaaacctcagacagatttaattagcaattgccagtttgaaaaagatcaaaaggtactggcaacctcccatcccttgtttcaggagtttcggtgctgggaccaaataaaccgtatgtacatcacttcaaagcgggagtcctttaacgaacaaaaaaacaagaaaatttatcaatatactgatcgattcctttctactaaagaaaaactcgaaatatacgataaacttcaaattcaaaagcaactctcatttagtgaggtagcaaaaatagttaagctggcaaatgacaattcggaattcctaaacggcctacatgtcaaagcaaaattaaaaggttgcgacacaaggatatcgatccagaaatgcctgggagaacactttcaaaccctcttgtcaaatgccccccacattgttgaaaatatttggcaagccgtctttgaaaattcaaataatggtagcgagtatgaccccaatagcccgaaggtagcttcgatcaaatccttactaagctcgcttcaaaacgacaaacttgaaactgagctcgcattgaaattggcgcaaaaaataagatttccaagaaaatactcaagtctctccgaaaaagctattcgtaacattcttcccttaatgcaaccaaatccgacaaaaataccggaaaatataattcgcaatttccaagaaatacaacatttagttgacactggggagatcttgaacggaaaactgtgggaagactatgtaattagctttgtaaaaggcaatccaaatgcacttaccagtggtggcttaatgtacgcatttgctagttccttagtatatggtcaacacactgctgaaaaaatatcgcctcaatatggccactacaacgatataaaattccagaagagaaatttgcgtaatccagttgttgaacaacttgttaatgagtcaatgcaaatcgtgaaagcactttggaaacaatacgatcttaacccaaaagaactggaaataagaatcgagttgtcgagagaacttaaaaacagcgcggcggaacgaaacaagatatataaagcgcaaattcgaaataatagagcaaacgaggcaatcaagaaaaggcttgaggatgaaaacataccgacaacagacgaaaatatcctgaaatataaactgtatgaacaacaaaaatacatctcaccgtactcgggaaaacctatggaagtttcaatgttctcctcatacgagattgatcatataattcctaaatcaagatactttgacgattcaatttcaaataaagttttggtagagggctatttaaacaaagagaaggccaatagaactgcctgggaatatataactcaacaaatttcatcgtataagatcttaagtattgaggactatattaagcatataaatgataatttctatggcaaaaaaaagaagtacctgcttttggaaaaaattccaactaatttaatcgatcggcaaatgaaggacactcaatatatttcggttgccgtcaaaaatgagcttgccaaagttgttggtagcgaaaaagtaaaaacaaccaccggcgaggtaacaagttttcttagaagtcgttggggattacgaaagcttttcatggagcttactgaaagccggtttaagctgatggaactatgggactgggatattgaaaacaacaagcctaaattgccgtgggtgttgagatactttgataatgaaaaacaaaagcatgtatatgaaattaagaactggagtaaacgttacgatcaccgccatcacgctattgacgctttggttgttgctttaacggaacaaagtcacatacacaggcttaataatttaaataagtttcttcaagatgagttagccaaaagaaaagaagaactgaatttagaaattgaaaatggcgaaagcattctggaagcatttttccggctcgaagagaaacgcagaagtgaaatactggaaaaaatggaaagctccaggtatttcgatcagccatttgaagacttgattaatcaagccaggaccttacttgaggcaatggtcatttccatcaaaacaaaagacaaactcgggattacaacagaccagtttgacgagaatacgccgcataagcaactaaataaacaattaagaatcaaaggcgcactacatcaggagactaattacggcaaatccaaagacccgaatacgggcttatctcgcagcacaaaaactgtcgagctttctaaattgtcggctaaagatattcctaatatcattgataaggtactaaaggaagaaattctaacacacagaaaaaagtatggcacaaacaaagaagcatttactggtgagggtcttaaagcattcaatgaaaacagatttcaacgaaaagacccatcaaaattgaagccacctgtttataaagcaaaggtttggtacagtaacaaagacgaagaaaatagttcattgcaaagactttatgaaaataacgaaaagttgagtgttgtgccaggggataattatctttttattattatggaaaaggcaggaaagcgtgtatttgatatcgcgtcattgtataattccgctcagctggcaagggaagctttaaatgatggaggcgagaattttaaaagaaaaatctgtgaagactttaggcaaatgcacaagcaaaaacctgacaagatactttttactttgcagcaaaacgatctggtctatctgccggaaaataacgaggacccagtatcaaaaatgaacgatcaagagttttcggaatggatttccaatatagaaaataagaagaaatttagctcccgaatatacaaagtagcaaaattcaccggcggagattgtttttttattcctcacaattatgctacgactattagtgtacctaaggacctatctcaagaacaaagagcagctttagaaagaaggttcgcagataaaaaaataccaaagagtgagctaaattttgttgaatttggctcatatcgagactgttccccatttgaatccggtgaaatttttttacggagcctaattgacaaaaagaacagtaaaaagaagcaaagagctcctttgaaaattcaagatcattgtatcaaactgcgagttgactggatcggtaatatttcattacatagggggatatagtcactctcatttagcattaaataaccaatcagaaaagggactcaccttttttatatgaaataaaattctattactaccgttaaatagtatacgaaccaatatccaatgataaagcgaacgctttatttcggcagcccagcatacctaaaaaccgccaacgagcagttggtaatagaaatgcatgattcgggagaaacaaaaaatgccccgatcgaggatattggtctgcttattttggaccaccaacagattacaattacccaggcattattagcaaagctccttgccaacaatacggcagttgtaacctgcaatcatacacatcacccagttggattactgctcaaccttgatggaaacagccttcaaagccaacactttagggatcaaatagaggcttctatacccttaaaaaagcaattatggcaacaaacggtcacatcaaaaatcctgaatcaggcagccttgcttcaagctcaaaggcaggaaaacaaactattgataaatctcgcaaaagaagttaagagtggtgacagcgaaaaccatgaagccagggctgcggcatattattggaaacgcatttttcctgaatttctggaattccgccgggatagagaaggtcccccacccaataaccttttaaattatggttatgctattttacgtgcgctggtagcccgaagccttgtcgcatcaggacttttgccaactcttgggatccatcatcgcaatcaatataacagttactgcttggccgacgatattatggaaccatacaggccgttcgttgacaaagtagtatgccaaatcatccgcggaaatggcaaattcctcgaaatgactccaagtatgaaaaaggagcttttatcaatccctaccatggatgttcgcataaacggacaaaagagcccattaatgaacgccgtgcagcgcacaacctcaagcctggcaaagtgttttgaaggaaggtcgagaaaattactttatccgcaaatgatttagttcatcgaagcggttttaactaacatgtgatccagctcaatgaaactaaaatgttgtgtttgaacgtttaaatgcatatcgaatcatgtgggtcttagtgttcttcgatctgcctactgaaaccaaaaaggatcggaaaatatacgcgcggtttcgaaaagatataatggcggatggtttccaaatgtttcagttcagtatatatctgcgtcattgcagcagcagggaaaatgccgccgttcatattgaaagagtaaaacgaatactaccttcaaaaggtcatattggaataatgtgcataaccgacaagcaattcggaatgattgagattttccgtggccacgagcaagttgaggctcctgaaaccattcagcaactggagctattctgaataatttgccatcctcctacctaccgttttaggattaaaaaaacggcaagaaattccatttttttaatcctaaaattcggctaaaatgcacaacaggactgggttctaaccaatcctgttgtaccaaacctaagctacagaataatttgaaagcaaatcacaac

SEQ ID NO: 1961 - DNA, 23429 bp, synthetic construct
  misc_feature 1..23429: note = Synthetic
  source 1..23429: mol_type = other DNA
cgatccctatgagcggctgatgccggggttgctctccgcttcggcggagcaagccgtgtaccgcaaggtctgcatcgagctccttcgggagctgttcgataccctgccgaagaaggacagggacattctcggcaagacctgcggcgtgttcggatacccggaggcaactttgaaagagatcgggatatatcacatgatgaaggagtccgccgtggagaaggcgaagaaccgcgcggtcgagaagctgagagaatcctattccggcagcaggcttcaggtatggaggactgttcatcgtatgctgcggaggccgatcctgccatcgggggaggatggtgagctgcggcgcaatttcccgcagtatgtccgcaccttggcggaggtctatggcgtactgaacgaagccacctcagatatggatcaatttgctgagtaaaaaacctatgcaaacatttgtacatccaactgtgttattatcctatacaagcccatccgcagatgctatactcaagtaaagtaagtgaaagaagggatatgtaccatgctgactgaaaaagccaacgccatctgcctcttggaagtcctgagagaatactccgacgcggaacacattctgcccatgcgggagatcattgtaaaaatgcagtccctctacggcatcaaaatcgaccgccgcaccgtatacggagccgttgcgcttttgatcgagctcggctacgatatctccatttacgaggataatggcgccggctattacctccgcagtcgagaattggagcagtcagaagtccttctgctgaccgacgcggtatattccttcccgttcatccctgcaaagcagaccgagcagcttgtccagaagctgcaaaagcagcttagcgtctaccagcggaagcgttatcgctatctgaccatatcgcggcaggaccgcaagaccgacaaccggcaggtattctggaacatcgagcagttggatgaggcgatcgcgcagaagaaaaaagtccggctcggctatctccactacgggctggataaaaaacagcacgagacaaagacctatacgctcagcccctacgaaatggtttacatgaatgagcggtattacctcatttgtgttcctgaccacgcgccaaatacgcgtctttaccgcattgaccgcatgaaggatattcaaattttggatgatcctcgcagcgaggctgtcgcccgtcaggaggcacaaaatgctgtctatgcctatgtcggcgcacctgagcgcatcgtcatgtactgtgaccgagccatcttagacgatgtgattgaccgcttcggcacagaggtgcagatccgtgaacgcgacgaaaatacttttaccgccggtttcaccgcgccgccgcgcggcgtcaaattctgggcgctgcaatacctgccgtatgtcgaggttgtagaaccgaaatggctgcggggtgaaattatagagagccttggaaagaacaagtatttggcgctcattaaggtggtctgacagatggatacgtttgtgggaaaatcgcaaaaaattcgaatcgatgtatcgagtattgaaattgagagcaaaaaaacttcgacttttggcagcaagcatatttcttgtgataagatcaccaaggtcgaccaacgagggaactccgtttttattagcgtaggcagtggcttttacgcatcgcctacagaaatcgagtttaatgaccgcttcgaggcggaaagagcctaccgtgctgtctataatgcaacgcctatgtcttggccgcttagcattgaaggtaataccctatacataggcggacgatatagctttcatggaaaaagtatccgcatatcggacattcaggaagcttctgctaacggtgaaggaaaactaaccatacggtgtaagcgtagctatgattctttttccattcaaagaagagatccgtatgaagcaagaaaagaagctgacatgatcaacgcccggctccaaaaaacgcaagatcgttccaaccaaagtgattttgcttcatgggttatcgcatcgggaagatcatcctcctcaagtacgcgggcatcgcaaacctctcaggaatcaactcaagcacaagtgcagcccaaggtcaggcaaaagaaaacatctgtatttaggaatgttgtggcgattgttattgtcctcatcctttgcagccttctcaatagggtaatagataacgacagatctgcttccgtttcagtctcagcccaagcagcgatgatcgattacattggcttgacggtcggcgatattgaagatatgtttggaaccgattatactaccgattactgggaaggtggatacaatatgtactactctgataccagtggctgcccatatgttttcatttataatccgccggatatgtctacttacgacggacgccccaaccgggattacaccatcaccggtatttcctgttccactttgaatagcgttgtatttggagatgcaaagattggaatgcctcacagcgatttcgaaaaagccattgggcaaacgtacaaggttgattttccaatcggctggagttacacgctgcctggcgatgttctgaccgttaatgcgcaaggagcaaacgggcttcaaaacggagcacacaaattaattgttttggaggacaatagcactgtagtctttgctttgctatggagaatttctgaggactcataaagaaaaggtgggttttgtaatgtcaggaagcgagagtaagtggaagcaagattacctctaccgtatgttttcgcaccataccaagggtaaagagaaggaaaactacgttgtcaacgcgatatgggcgaggctggacgatctgaacgtcaaacctgtaacgcagcaatatgtccgccgccccaatgggtatgcgttgatcgacctctatttcccgcagatcaactacggtgtagagtgcgatgaagcgtatcacaaggacaatacgctcaaggacgccgcacgcgagatcgacctgcaaacggcgctgtccgcctgcagcgaagatggattgacgatccgccgtgtggatgcaacgctggatgcagatgcgcttcacgcccgcatccgcgagatcgtctgcgagatcaagcaaaaggtcgcagaaaaaggagaactgctctctccatggcttgagcatgaagaggaatggtgcagcatcaaagagcgcggtattcttcggacggaggatacctattcctttaaaacgattgctgatatttgccaaaaatgcttcggcaaggatgcgaactatcgcatccagcgcagctttttccatgtggccgatgatcggatgctttggtgtcctaagttggcgattgaactgcctgacggctcaaaggtggcgcagtctcgcggctggatcaatgagctgtccgctgactggaatgtgatcatcgaacataatgacagcggcgctaccccagtaaagcgcccggatcagccacgctataccttcgcaaagagcaaggacgaacgcggcgaagacgcttaccggtttgtcggcatgtttgagtggagcgagaccacgccgagcggtgaacacatctataagcgcctggcaagcgatatgaaactgaaatagaaccatgcacagcgtccctgtacagacatttgcacagggtgccgtgctattctatcagcagaacagagagcatacggatagtgccgtagtacggcgccaagaaaggatggacaaaatgaaatatacttctgcccaggccaataagctgctgaaaaagctgaatgacgaatattccgccctgctggataaagagcagcgcagccgcgacttccgcgctgcaatgggcgaggacgtggagtccgtacgccccgcctacgattacgcggaaacacaggcgcgcctcgcagaactcgaagggaaaatccgcgccctcaagcacgcgatcaactgcttcaatatgacgcattttgtcgacggctttgaaatgaccatcgacgagatgctggtctatatcccgcaactcacaaggcgcaaaaataagcttcttgagatgaagagccgccttcccaaggagcgcattgaggagcagtacggccggcagtcaaacatcatcgactaccgctatgcaaactacgatattgccgcagtggaggccgattacgacaaaactgtcgacgagctttcccgcgcgcagcttgcgctcgacgcgatcaacgggcgcgaaaccttcgatcttggcgaatgatctttttccgtcatttccatacgaatgtctgactattttataacagagttacgatctccgttcgggtttacagttcggtgagagcatcggttattttgatggttatttgttatgctgccccatgttcaaggttcgtgggaccaaccattacggcatcgatggagcgagaaaactttttttggaggcggaagtacggttatatgcctccctctagaattgtggaaaaagcgtccctgtacagtcaaatgtacaggggcgtgggctatacttcttaatgacaaactcctatgttaccaaggagatccattaaaatgatctatttgaaaaatttcacaatactaagccgcgaacaggaagaaagaattcttgattcgatcagagaaacctgctataccacgcgatatccgttcaacatcttccgttaccgcgatgtgccgcagctcgaatttgagcctctaaccatattctacggcggtaacggaagcggtaaaacaacactgttgagcatcattgcagaacgattgcatctttcgagagagaccgtttttaatcggagcagcttttttgaagattatgttcgagaatgcagctacaagatgacattcgggaaaattgctcctccgggtagccgcatcataaccagcgatgacgtatttgactatttgcttgacatcagatacgtcaatcaaggaatcgacacagagagagtcaaactatttgatcaatatgtaagcgacaaatatgagccgttccagttaaaagggcttgatgactacaaggaattcaagcgtaaatgtgacgccaaatcaaaatcgcgatccagatttatcaaagaacgtttaatggaaaatgtccaagagcaatctaacggggaaagtggtttatattactttaccaactcaattaaagagaacgccctctacctgctagatgaaccggaaaacagtttatcagcctcactgcaattgaaactaaaaagttttcttgaggattctgcgcgattctatcactgccaattcatcatctcaacacattcaccgtttctgctttccatgcaaggtgcaaaaatatatgatctcgactcagatccaatcgatgtaaagccatggactcagctggaaaatgtcaaaacgtattacagtttcttcaaaagccatgaaaaagagtttttctgataacaagcccaagtgcattttcaattgattatattagcggctgcgcgtcatcataattaaaccctaacaaacaaaagacatccaagagaatttgtcttggatgtcttttatgtcagcagttcttttcattctgtttcatcttgtacgctttgtttcaccgaagcgctggaagtgtacgatctcgcgcgcacgcaggaatttgatgacatcactcacgtccggatcgtcggaaaggcgcagaatgttgtcatacgtcacgcgcgccttctgttccgcagccaggtcctctgtgaggtccgcgatggtgtcgcccgtgacctgcatggtgctcgccgaccacgggtaacccgaggcgaactgcgggaaaacgcccgtcgtgtggtcgacaaagtacggctcgaacccagcctccttgatctgctcctcggtcaaattgcgcgtaagctggtgaacgatcgtgccgaccatctcgagatgccccagctcctctgtgccgaccgtggaagcccaagggccacaagtacgaaaaagccttgcgccgcaagggttacaggccgaaaaagagagggaaaacgcgaatgtgcaaaatgccggttggctccattcctttgacgcggactaccactatcgcggctccgaccttcactaccatgtgaacgtgtccgccgcgctttcggagggaggggcggtatggtgaaggaatttatctcgcagcttccaccggacaagctgacgccctttgcaaagcacccttatcaggtgcgggaggatggtgctatggacgagctggtggagagtatccgtgtccacggcgttctatcgcccctgttggcgcggccaaaaggggagggctacgagttggtcagcgggcatcggcggcgcttggcggcgcagaaattgggcctgcccaccgtgccggtgctggtgcgggagatgaccgacgacgaagcggtgatcctgatggtggacagcaaccttcagcgggaaaacctgctgcccagcgaaaaggcattcgcttacaagatgaagctggaggccatgaaacggcaagcggggagaccacgtaaagataatccccgacaacttgtcgggaattatgaaacagcagatgttattggcgaaacaatcggcgaaagtggccgcaccattcaacgctacattcgcctgaccaatcttgttccgccgctgcttcagatggtggacgatggacgcatcgccttttctcccgccgtggagctgtcctatctcacccgcgacgagcaggcggagctgtgggacttgatcgggcgggaggacgccacaccatcgctgtcacaggcactccgcatgaagcagctctcccgcgaggcaaaactgacgccggaggtactgtacgccattcttaccgaggaaaagcccaatcagaaagagcaaatccgcatcaaaaccgagtcgctgcggaagtatttcccacgcaattattccgcgcagcaaatggagcgggagatcatcaagctgctggaggcccgttaccacgcgaagggcaggggagagcgatgattttcgcatactggcgctatacagatttctcccgtacaatgttggcagaaaggggcgaactatatatggaacaaaatttaccgccattgccgccggtcatttttgagaacggcctttactacgagctgcggggcgagcagtattatccctgccttttgccgccagagccggacaccacagaggacaagcttctggaaaccatcatacgccaaatggcggaagcacagggcatcgacgaggacttgaaggcgcgggatcaaatggcgtgggtaggtgcgatgaacaacatcaaaagcgccgcgctcgagatcctgcgagagtccaaataacgccccaagaaggaaacaaaagccaatagtaaatgcaagcggagacaggtcaaatgcctgcctccgctatttttatgccccaatgggcaaggaggaacgatatggattatttctacgagcatgaatcagagctatttacattttaccgtgttccaaaggtgctgtttacggaggaagcattcaaaaacacgaattgtgaagcaaaattactttacggattattgctggacaaaatgggactttcccgcaaaagcgggtggttcgatcagcaagggcgcgcctttgtttactatggcatcagccacattatggaggacttgggctgcgcccacaacaaggcggagaagctgctatccgaactggagcaagccggcctgctgcgccggaaacggcagggattggggaaaccgtctatgctgtatcccctgaaattcgaaaaccgaatttcttgactttcgatttttgaatttcaagaacgctgaaaatcagcgttcaggtgcgctgattttcagcgtctaataagactgagtagagcgatactaagataaatatataccaagccgaaaaaagaataatagggagggtcatcagatgaagaacaaagagaacttacgggaaaagcaggtaaatctccgcttgacgcaggcagaatatgagcggctcacccgcaccgcgcaggaccacggcatcgggcgggcggcgtatctccgcatggtgctgcggggcgcgtggctgcgggaggacggcagaaaatcagaatagctttttccgctggaatttgatgcaggccgtcacacggtcacggatataaggaacatcccgcttggcgtaaaactccagcggctctgaaagggccgccatgatctctttttcggcaaagtcgcagcgaagctgcggcccatagagattttgggccgcacggacctgtcggacaaagcccgttttcatgggctgagccttgagctgacgcaccaatgcggccggttcgatttccatgggatagtcccgtgtgttggacagcaaacccgcgccgaagtcaaagatggggcagtagtcaaagccatcaccgcagcgcagcacagcgatgttgttcagatgccggtcctcgttgccgaacagcatatccacctcgaacagcagcgtcagataggtgccgaagcggtcaagtcccgtcagccgctcaacctgctccaccaaccacgcaaggcggctctgaagattgggcaggcggtttaccgtggtctgccagtccgggccaacgccttttcgcagcagctccgcaagggtcaggatggcctcgccctgacgtagaaaattggcactggaacagccgttgcgggtatgaccgtggacttccagccgctccatgcggtaggtcacatagcgaaagcccaacgcgccggtattggtttgtgccagcagcgcagaggttacggtttctgccagcccttcatagccgaacagatccagcttgtaccagcggccatctgccagccatttttcctgattgcccttagacgaagtttccgcgatgcggcttcccgttgtcagtctgatcgacatattcagccctccacaattttgatccagcacgaatcctctgccatgcgcccttcggtcttgcggatgatcgccagcgggtcatagcagtccagtcccaagtcagacaggtaatatttcaagccgtcccgctcctgcggcacacagcggtctttcaagaaggtttgcaaatcgtcccatgtgggcttgcggttcacgccgaaagcggtggaaaggggagaactgacctcgttttcgatggcaagttgatgagtggtttggtcagcgcagatctttgtacagagcttgttcccatcgtagtagtacaggatcaggagggtgtgagcgctgcttcgggcattggccagaaagacatcgtaatcagacacggcagggcggcggatggtgatgctttccccatcgaattgcagcgttacggtgcggctgccctcagagatgcccagggccttcatccaggcagatggaagagccacgcggtagccattggcatccggcccggcgtttccacccgccttgttgataagaatatttgcagttcgttcctcgtgcagcacggtcattcacctcaaaagtttctcgcaattattatacatattggacaccaataaatcaagaagttaattttacaacagcgttgtcacgaaaatgaaagcgctatacggaagctgctttcgcaagcatagcatttggctatccaaatgcgcttgttaagggggcaaccccttaaaatccccgatgaaaggagaatatctatgcgccagagaaaccatgcgcttaccttgcgcttaaacgacgaagaactcaagcatttgaaagatcaggtcgtcgcgtccggactgaccacgcagacttttttgcgcctgttgatcgcgggacagaaaatcaagccccggcgtccggaggtttttattgaccttttgcatgagttgtcagccatcggtaacaacatcaaccagatcgcccgtgttgccaacacctgcggctatgtccgtcaatctgatttggatgaaatcaaagagatgcagtcgagaatttggcaaaaggtgaaatggatgtaatcgatagcaataaatcatgaagagaacgtaataatatcgcttaatgcgaatttctcattggttatcccacacgaggtaaattaagtatgtgttgacattcttggtgaaaaaggatatattgtatatacccttatactactacgagggaaaatcgtgttactacgataaggtagaacacctcgaagccctaccccggccttatcggccggggtatcttcgtattttaggaaaggagccctctcagatgtcggaatttcattatgcgcttggattggacattggcattggttctgtcggctgggcagtcctccgaaatcagccgaacggagaacctgaccggattcaggacttgggcgtgcgtatttttgacaaggcggagcagccaaagacaggtgaaagccttgcggccccccggcgggacgcaagaagcgcccggcgccgtctgcgccgccatcggcaccgcttggaacgcatccgttacctgatggagcagcgcggcatgatgtcggtttcggatatacaggccatgtatgccgccggtggcttccaaaaatcgccctaccagttgcgcgccgaggcgctggaccgcccactctccaaggaggaagcggttcgggtgctgatccatcttgcccagcggcgcggctacaagtccaatagcaccgcggaggcggcgaaggacgaaaaggagacagggaaggtcaagaccgccatcgaggaaaaccgccgctgcatggccgagcacggctaccgcacagtaggcgagatgatgtatcgggatgagcggttctggcagagcaatccggacggcacacgctaccagcagactcgcaacaagacagacgattatcgctttaccgtggagcgttcggctatcgtggacgaagcaaagcagatattcgctgcgcagagaaaactgggtgcagactggtcaagtgaagatttggaggctgcctacctttccattttagagggacaacgaagtttcgacgaggggccgggcggagaaagcccgtttcgcgggggcatcggtgataaagtcggtttttgtacctttgagccggatcagcagagggctgcaaaggcgacctatacattcgagtattttaagctattgcaggacttgaaccatatgcgtcttgcagggagagggatgtcgccgcagccattgaatgcgcagcagcgcgaaattttaaaggaaacggcgctgcgatcagcctctctgagctatggacagcttcggaaaaagctggcgctcgctgatgatacatttttcagcggtctctattatggtgataagtcgagagaagaagcggagaaacgcaagtggccgcagatgcagtcttatcataaaataaggacagctctcgacaaggttgggaagggcacgattagctctttaacagaggaacagctcaacgccattgcttccattctcacacagtataagagcgacgccaagcgcatcgaggcgctgcggatggcgggtattccggtgcaattcgatgaagcgttgctgccgctctcatttagcaaatacggaagcctttctgttcaggcaatgcagaaacttatcccgttgcttgagcagggaatgcgctacgatgaggcatgtacacagatttacggcgatcatcgcgggctgcattcagaacagcggaagaatcggctttccttaacggatatggatgaaatcacaaatccagtagtccgcagagcagtatcgcagaccatcaaggttatcaatgcgatcgtccgcacctatggcccaccggatgtggtacgcatcgaattggcacgcgagatgagccgaaactttgatgaacgccgcaaggcggaaaaaaggcaggacgagaatcgcgcagcaaacgagcgcgcaaaggagcagatcgcagaatacaagggagaccatgcgaccggcttggatattgtcaaattcaaactctatcaggaacaggatggcgtatgtttgtattccgggaaaaatttagatccttcccgactctttgaaccgggctatgcggacgtggatcacatcgtcccctatagccgttgttttgacgacagctatcaaaataaggttctggttctggccagtgaaaaccggcagaagggaaaccgcctaccctacgaatattttgggtacgatgaagttcgctggcatgaatacgaagtgcgggttgaaaatttgatccgcaactaccgcaagcggcaaaaattgctgaaaaggcagttgagcgaagaggaaagcgcggaatttattgaccggaacctcaaggacacgcagtacatcacaagaactgtctataacctgattcgggatcacctcgcttttgcggagtctgcctaccggaaaaagccggtgcaggcggtgaacggcgcggtcacagccatgctccggggccgctggggtgtgcagaagatccgcgaggacggcgatctgcatcactgcctggacgccgcggtgatcgccgcgaccacccccggtctggtacagcgcctgaccgcgtacagcaagcaccgggaaacatgggaaagaccgcctgctggctatgtcgatcccgccacaggcgagctgatcgaactgccgcaggaagcgcggcgcgacccattcccgaagccgtgggagcgcttccgtcaggaactggaggcccggctcgaccccatcgaccctcggcatcagatcgacctgctgaagcttgagacgtacgaaagcgacgaggagatcaagcctgtttttgtttccagaatgccgaaccataaggtgactggtgcggcccacgccgagaccatccgcagcagcaaaggcggcgatggcttcaccgtgacgaaaacacctctgacgaatctgaagctcaacaaattcggtgaaatcgaggggtattataatccggcaagtgatacgctgctgtacaatgcgttgctgtcgcgtttgaaagacttcggcggcgatggcgcgaaggcctttgcccagccgttttataagcccaagaaggacggcacaccgggtccgcgagtggacaaggtaaaaatctgcgaaaaagccacgatcggactgcctgttcgaaacggcatcgcggcaaacggcagcatgatccgcattgatgtgttctatgtagaggatgacggctactatttcgttcccatctatgtggcggatacgaagagagagaaactgcccaataaggcggctgtggcaatgaaaccgtataatttatggaaggaaatgaaggacgaaaactttgtcttctctctttatccaggagatttggtacgtatccagagccgcaagggaatcaagttgaatcttgccaagggcggcacgggagaaaaggaaatcgttcggcaggatggaatgtattattaccggagcgcaggcattgcggtagcacagatctttgtggaaacacatgataggcgatatttgcagccgagcttaggcattaagaccctgcaatccatcgaaaaatatcaggtggatgtattaggaaactatcaaaaagtagatctccccgaaaaacggatgacattttccaaggagggttgagatggaatatcggaatatctttttggcgaaccccgcgcggctcagtgtacagcgagagcagctggtcatcgaacaggcggaaaaaatcacggttccgttggaggatatttcgtctgttctcattgagtctccgcaggtcacgctgaccgcttacgcagctgcagcgatggcaaatcatggcatcaccgtcttcctgtgcgacgaaaaacacctgccgagcggtcaaatactgcccatcaaccagttctgccgtcagcgaaagctgctgctatcgcagtgcgagatgggcaagccgctgcaaaagcagctttggcagcagatcgtaagccaaaagatctggaatcagtccgagtgtttgcgtataacgaataaagctggctgggaggatcttcggcaaatggcaggaaaagtgctctctaacgacagcgacaacagagaagcggtagctgcggccggttattttcccgctttgttcggagttgggttttcccggagttcggacgacccgagaaatgcggcgctgaattacggctatgcggtcatgcgggccggaattgccagaaatcttgttgtgcatggcttggagccctgcatcggactgcaccatcgaagcgagttgaacaacttcaatctggcggacgacctgatcgaaccctttcgccccgttgtcgatctctatgtgacgcagaatttctccaaagacgatgatgtgctgacaccgcggcagaaagcggggcttttcaatctcaccaattatctcgtaaagcaagcgggcagacgatacagggtcatgctgtcgatcgaccgggtgtgtacggctttggccaatagcgttacagcgggggagaatctgctggaattgccggagctgatccccttggagctgcatcagtatgaataggcttatgagaattttggtgatgttcgatttaccggtcaaaacgaaggcggaacgccgcagcgcaacacaattccgcaactttcttacaagagatgggtaccacatggtgcagtattccgtctatgcgcgtatttgcaacggcagagattcggtagaaacacataggcgacggatattatccgcacttccgtcaaagggttctgtacggatgttggtcatcacagaaaagcagtatggtgccattgaactgttggtaggaaaaccaacgccatacgataagccgcagcaatttgagcagctcatgattttttaaaaaaataaagaacggcttcttcgtgaaaccgttctttatttttcgctttttccccttttttcgccagatagcgaagagaaaagtgcttgttttttgttcccaatgcttcgcctattataccactacgagagaaaacagggaactacgacgcgaagctcgttctggtttgacgcttcgcgattataccactacgagagaaaacagggaactacgaccgcttgccgttagaattcaagccagtgctgattataccactacgagagaaaacagggaactacgacttatgaagcgttctgcgtggcgttcttaccattataccactacgagagaaaacagggaactacgactatgcgctcatcgttgttggcgctatgtacattataccactacgagagaaaacagggaactacgactgggcacgagtgacaccaagacacgcaaacattataccactacgagagaaaacagggaactacgacaggagatgctttctaacactgctcatcagcattataccactacgagagaaaacagggaactacgactgtaggtgatagaatgaagagaatgttgctattataccactacgagagaaaacagggaactacgacctcggaaaactgtttgtgtcggtgcaaatgattataccactacgagagaaaacagggaactacgaccttctggttcttcttatgctattcatcctcattataccactacgagagaaaacagggaactacgacgaatgcctcatttacgttgacaccaaagttattataccactacgagagaaaacagggaactacgacgaatatctggtacagggcgaaagcattacgattataccactacgagagaaaacagggaactacgacgcgcacaatatcggggaggttgtctctacaattataccactacgagagaaaacagggaactacgacggtgctcttgcgctcgtcttcgtgggcacaattataccactacgagagaaaacagggaacaacgacgctgtaccatgacaacttccagaatttcaaattataccactacgagagaaaacagggaactacgactttggaagatgcgtggttgctggaaatcaaattataccactacgagagaaaacagggaactacgacattctatgcttactatgagaggtaacaagcattataccactacgagagaaaacagggaactacgacctcaacggctgcgacttcacgacggggcttgattataccactacgagagaaaacagggaactacgactactgccacccgtctggcaggccgaccatgattataccactacgagagaaaacagggaactacgacaatgcgactacattgaggaaataaatttccatcatattgtaattcttgcggcggcggggagttgcgcacgagaggggcacatagagcacaaaaaagaaaacaccggcacagttctgaacatggaggaaaatctctccacaggttacacccaaagcaccacagcgcgctgatgtttcctttcataatattttatcacaggagagcggcgtcaaggcatccggaggttctcattctagatttgacattttccctgctattttctttcttttgcttgtggagatggcgttttatggtataataaatttgtgaagttataggtatggtagcagctttgcagctctatcgaagggagtgacgggatgacggcatatggatttgaaccaacggtcatccggcagatttccactttgacaaaaaaacccctcttacaaaaagtgattctttttggctcccgagcatgagagaacttccacctcacaagcgatattgatctggctgttcatggcggcaatatatgccgcttcaggctggatgttgaggaggaaacacatacgctgctgacctttgagtttatcatcagcggtatcattgaagcgttggagaaaagcatctgtgagcgatatgccaatcttctggatacgctctgagaaactattttacaaacacatggaggcccacgatggcacttgaaaataaacttggtatcaccaactccgccgagctcgcccgcgaggaggagcgaatcagcaaaaggaaagccgtggaactgtttgaaagcagcgctctggacaagctggcccccggcagatttgcgtcattgcaagccattcataaggcgcttttcgaggatatttatgactttgcaggcgaactgcgcacggtaaatctggcaaagggcaattttcgttttgcccctttaatgtatctggaggcagcgcttggaaacatcgacaagatgccgcaatctacctttgacgagatcatcgaaaagtatgtggagatgaatattgcccacccgttccgcgagggcaacggccgaagcactcgtctgtggctcgaccagatgctgaaagccggtatcggacaggtggtggattggagcaaagtggataaggaggattatctcctcgccatggagcgcagccccatcaaggacgtggaaatcaaggtgctgctgaaagcggctttgaccgacgagatcaacagccgcgaggtctatatgaaaggcatcgaccacagctactactatgaggggtatacgaccttcaagacggaagatctgagcaaggaatgaggtgcagatatgccggatacgaattggcaaattgatctggaggaatatatacggggttgattttgcggacgagagcgcttcccaaagtatcagccccaaagtttcaaagtatcaatttgatactttggactgctcgctggaggaactagctgttttggagcggatcgcacaaaacccgaccatcaagcagcaggagcttatgagcgcaactggcaagtccatcgcaaccgtgaagcgggtcacgaagtccttgcaggataagaactatatccgcagagggaacggcaagtgatacggaaaacagtctattttattagattgcttttgaaaataagatggataggaaaatggagcttaagaagattagaaactatcttgcatcactcgatgtcgctgactaaggaggataccggagtctgttaagcattatgagttccatctgaaaaacatgaagacgtattgaatacgcggagtatgtgagttaagacctccggttttcactggcggtcttaactctacatatccaacaatatccttgcccgtttctgtacctgccgctccactatccgcagcctattttcaggcatgttatagcgggagtgcttcttgaacttgaagttcagcagatgccgcagcttctcgcgcagctccggcgtcagtgcggccttggctgtgccgagaaaatcatcgtacacgctggggtacagcgtttcgatatattcctccaatgcggtctcgttcgcccaggcgtccgtgcccgcaaagttaaagagggaattgccatggtcgaacaggggagcgggggagacgatggtattcgtccggttatcgaccattacgccaaagttcccaaaatgccggtccacattgcagattaccgcatcaaacaccagcatttcgttcaatgcattgacaaactcagtccccagcttttcgtagtatgctttcacagcctccatgccgcccttagaaacgagatggccgatagggaggtaggcatacaccttgtcggtaaaaagctcgcaggtggaacagagaacgcccttccaacgggataagccgtaggggatcgcgtgaacgcccatggcggaggcgatttgtgcagcgtaaaactcagagtatggctcgttgccggtattggccgccccctccgtgccgcccttgtaaagataaaccttgccgccgatgcgccgccagcatttgcggagcattccattggtggtaaactccgggctggagagtagggaagtgcggacgctgctgccatagccggtaaaggcaagctcggccagaacattgctgaatgggttgtcgtagagatttactttgtcaaaagaagcggtgtcaccgtcctcgacgacccaatagcaatcgttaagggatagtcctttacaaacgctgataatagcgagcggacggttgaggtttaagccgcattttgccaaaaggctatggacataggcgcgattcttcgggatcgtgcggcggcgcagccaacggctcaatccatccggtgtcagcgtcagatcaagcggcagaaatgccgctttttcttcgtttgtccaaagaatttggatctccggctcactggtatctgttgtcgcggagaatttaaccaacggttcatcgaactgctttaaaatatagttcatgataaatccccctcaaaaagttacttcagaccacacaggaaattttctacattcaaatactgaacaccctcggcaaacgtatcttttccgcgataaagaacgaatttaccgctgatcgggccaaagcgtttttcaacgatttggcatttctctgcatcacgcagatgaagtgtctgcttttcgttggcctcggtgctgtgcttgatttcataaatgcggcaattttgattagttttatcataaatcaccatgtcaaactcgccgccggcatcgaacttgaatttgaacgcttccatcgtactgggcgcggttttgcggacttccagcagaacaatgtcctccagcatccggccctttacatcgtccagaatctttcctgtgatatatgccttatctgcttcggaaatcgatgcgaaatagacatcctgcatcagggagtagaccaaagcctttgcgatagcatagcgcataccgggctgggaaaagacgaaatgctctgcctgcttaccgctttcataccgttccggacagttgacgatcagatccagcataagcagatacttcttcactttgtcgatatgctcctgcgtgatcgggacggttgtttcactcttttccttgacctcaataatggccttcaggcgctccaatatttgcttttcatcgacatcatagagaacagtcgcccgttccgcagggagatcatgcagaaacagctcctttgcggagccaaagtcatgggacttaaattcgtcctccaccacgcgcagcacaaaccggtggttcatgtgctgcacaatgcggttgatgacgttggtcagttcgcctttttcgtaaagttcccgcagttgattgaagtattcgccgtaatggtcgtttttcagtgtatgctgaatgttgcggctgatggcggtatcaatatacttccgggtactttcatcgtcccgaaacgcgacctcgtcaaaggcggcatccggatcgtcaaagctcatattttccattttcagtgttccgccgtattcaatataagaatcgacagaacggatgttcaggagccgcgcatactcccgaaagggaataaaagaggtgtggatcgtcacgcttctgtcgtacagttcatcgcggttcgccatagcgaaaccaagagagtccgtaccggaaacaacgattttcatgcccatcatgctgaacacatcggaaagcacggcagcggtgtcgatgaagtcgctcaggagtgtaatttcatcaataaacgcataccgatagcccagttcatacagagctttcaagtcctttgtcagccgtgacatatcatcggtggtctgcaccttgatgtaggccgttttttctatgggcagttcggaaagcatttggaacagaagtgttgtctttccggttcggcggagaccgtataaaatacagatcttcccatcataggagccgttcacaaacttctgtaaggtgctgaagcagtcacgcttaccgtactttgccacgctgtttgccagcgcctgcaagcccgtacccgtgacaacattcgtataaaactcaggtatttgtgaggggacagcggctgtaacaacaggctgaccatagatttccaacttttgataaatcgcatggtatctggctgtatttgcttttgcggcatcgttttcgtaattctgatagttgcgtgtggacataccgaggtattccgcacattgggcctgattcagcccttttgaaatacgcaattcttttaaggtcacgctcatcacctcgcctttattatatcacagtatacgcaaaggacaagaaaaatacgcaaatatttcgcattttcttcgtctatttttcgcctttcttcttagggagctgtgtgagagcggccaattcctcgtaggtcaattcgccgttcacgtagcggtttcgtgcattctccgcttgtgctttccagatttgaaatgcggcatctgtgtaaatagccggagtacggcgaacacgcatatcataggttttgatccgctgccggatgagctttaagccatcatcggcagcgattttcttttcatgcttctctttgactgcgagttctttgcagctttttccggtatcaccgactgaccgatcacaataaagagctttggaagagaacgggataaagtaacgatgacaatattcacactttttcaattcaattccttgctcgaccatctccagcagttctgtcagcagcgtcgcgcccaaatcgtccgagccctcgatgcgggcaaaccggacggactttggtggcgtcgaaatgcggtctgccgccaacaccggatcaaaattctgctcatctacatacagctttcgttctgcgcgcatcttcaggtccaaaccggcgatcgctgtggcagcttgaaaatcgcggctcatatagagcgccaaacgctgcttggcgctcaacttagatctgtccggcacgagcacggcatctgcaaaggcggaaagttccttttgcagcttctcaaaaccttccatgcgttcatcaagcacgtctgccagcttttcttcaaaaaagagggactgcacaaagcgttccccaaaagggtggatcgtgctcagctcgtttttgatctcggtaatggcttgattttccatcatgggcgttgttcgcaccagtaatttcgcccgtaaagaagcgaaatctgtggacaaaaaggcaataagggttgtcccgagacgatattccacgggcttgaaatccgtttctacatattcctttttggggccaaaactcaagcaatacaaggctctcaaggcttttcctccattcgtggacacagctccgcatcgtgtgtggtaaatcatttgtcacgcgaatagtttaccacatattgaaatctccgtcaacgcttgctatcatttttgtggaagttgaaattcagcacaaacgatcttccacaaaattgaatgaccgccggagcgtttctctttcggggaagcaggccatgaccgtctgatgacgcgagcgtgccaaggatcagaaatcgagtttccgtcaggcaggaaaccgcttccgggaaaacggcaaacaagttcaccggtctctccgcatagtttcaaggaaaggggggagcaggatggcaagcaaaccggagctgctgcataatcaggcggcagacgagatcgggcaggactttcttctcgcataccagcgagccgtcctgctcgccttgcagcgtcaaggcttccttaacgaaatgcagtgtaggaactgcgtacaaaaattagaagatcaaaaaagaaatacaagaaaatcaaaatctgtaaaggaatagtgcctttcagtatttgcacaattgcaaagacacattctgtatcgtatgataccacgaaaaggaggagtttttatgttacaagtagcagcgtattgccgtgtatccacggataaggaagaccaggcaaattcctttgaagcgcagcagcggtatttccgcgagtacatccagcgccagccggattgggagctgcaaggcatctatgctgacgaaggattttccggcacatcgaccaacaagcgcgtggagttcaataaaatgctccatgcggcggagctgggacagatcgacctgatcgtgaccaaggaggtcagccgtttcacccgcaacacagtagacgcgctgcaaatcacccgcgagctgcggcgacgcggcgtcggcgtgctgtttctcaatgacagcctggatacccgcaccaacgatggggagctgcggctgacgatcatgagttccttcgcacaggacgaaagccgaaggacctctgaacgctccaaatgggggcagacgcgcagcatggaaaagggcgtcgtttttggcggctcgctgctgggttacgacgtgatcggcggcaaaatgaccgtcaacccggagggcgcggaagttgttcggctcatcttccataagtacctgcaagagcgcaaagggtgcagcaccatcgcacgggagctgcgggaggccggtattctcagcagcaagggcaactgcctttggtcatcggccaccgtgactaagatcctgaagaacgaaaaatactgcggtgacctgatccagaaaaagacctatacgccggactatctgacgcacgaaaagaagtacaaccacggcaaggaaccgctggtagcgctgaaagaccaccacgaggccatcatcgaccgtgagacatggcaggcggtgcagcgggaactatcccgccgcaaccgcgcgacaggctgcggcggacacggcaaccgctatccgctctccggtaaaattcgctgcggtgagtgcggcaagagcttctcccaccgcaccaaaaagcggcaggatggcagctcctattatcgctggtgctgcttcaccgccaccaacgagggcctgcggcgcacagacggcgcgggaaatgtcatcggatgcagcgtcggacggcagatccgggacgacattgccatggatcttctacggcgttctgtgaacgccgtgacgctggataaaaaagcg

SEQ ID NO: 1962 - DNA, 23423 bp, synthetic construct
  misc_feature 1..23423: note = Synthetic
  source 1..23423: mol_type = other DNA
gcagcgggcagcggaccgtttggaacttccgctggagaatctgaagaagcggctggacgctgtgatgaaggagtttttctcagaatagggtacagtaaaattgctgcgggtgcccctatttccaccagaaattttgccatttaacttattaaagtagggtacagtaaatttgttggaggtgcccttttcgtcaggactcaactggaagaaaatagggtacagtgattttgctgcactgtaccctatttttccttatcatggtgagcgtcggcagagaatcattctctcaaaagctacttattgagccgacacatctggttgcgttctgccaatagcacggaaacagatttgcgtgttgccgcgacttcttcagcagtaccaactgcaactatttgttggagttttgatagaccgctatcccttgcaagcacggaccatgcagggcatcgaatcatcatgtccacttttgaaaaagctaatcaaaaataaatatttttcgtgtctacttttcttgactgctacaaacctatcatctgcaattttgaaaagtgacgacagcctcgacaaaattatattgaaaagttgctccatgtgatgtataatcctattgaaaagtcattacgaggaggggcaacgatgctgtttcggaaaatcgaatctcttattgaagatcatctgcaaagcgattcaaagaaaatccttctgatagacggtgcgcgtcaggttggaaaaacctatatcatccgacatgtgggacataaactgtttgaaaacttcatcgagatcaatatggtggaggactccatcggccctcggctattcgccgaaacgaaaaccgtcgaggacttctacctacaagtcagtatgctggaaggcagcaagatgaagcagaaagacaacacacttatttttatcgacgagatccaggcatatcctcatctgctgacgctgctgaaattcctatcccaagatgatcgctttacctatattgccagcggctccctgttgggcgtgacactgtcacagaccacatcgatccccatgggcagcatccgtaaagttcggatgttccctctggacttcgaggaatttctctatgccaacgggctgaacgagtttgccatctctgccgtgcggaagaagttcgagcgactggaggcactggatgggccgacccacaacaaaatgatggattactttcggaagtatctgctggtcggcggtctaccggatgcagtcaattcctatctggaaaaccacaatattcagctcgtccgtgagattcaacaggagattcacgattactatgccgccgatgcatccaagtatgacgaggagcgtaaactgaagatccgccgcatctatgacctgatcccctccaacatggagaataagaaaaagcgtgtcgtagcacagagcatagaagataagaagggaaagaccttcgcagattatcaagacgagttcgagtatctgatcagcgcgggtattgccctcaatgttcaggctatctctaacccagtattcccgctggttgagtccacagggaaaaatctgctgaagctatacctgaatgatgtgggtatcctgaccggcatcctttatggcaataacatccgcgctgtgctggacgatgaagccagcatcaatctcggctccgtctatgaaagcgtcgtagccagcgaacttatcgcacatggttacgaactgttctattatgacaatcgccataaaggtgaggtggatttcctcatcgacgattatgccaccttatccgccgtccctattgaagtaaagtccggtaaggactacaccatccacagtgcgctgaataacttcgtgaagaatgaagactaccatatccagaaagccttcgttgtgtccaatgaacgaacggtctccacgaagggaaaaatcatctatatccccatctactatatcatgttcttccagcacggtctgaaggacagcgaggcaatgcaattttaagtcaggcaataatgccttgatatattagagggacactgtggcctgcatgcgttggccgcgacgatcaatcgctgcggcctgctcttggatgaggattatctgcagcgggcagcggaccgtctggaacttccgctggagaatctgaagaagcggctggacgctgtgatgaatgagtttttctcagaatagggtacagtaaaattgctgcgggagcccctatttctaccacaaattttgccgtttaacttattaaagtatggtacagtaaaattgttggagatgcccctttcgtcaggactcagctggaagaaaatagcaactactccgaatatgtaggacagccgcagaacaccgctttttgccgtgggcaaggcaaaggtcaccacagtacagtataagccgcaaatgaaacaccaagtatgcgttggccgagacggtcaatcgctgcggcctgctcttggatgaggattatctgcagcgggcagcggaccgtctggaacttccgttggagaatctgaagaagcggctgaacgttgtgatgaaggagtttttctcagaatagggtacagtaaaattgcggcgggtgcctctatttccactgcaaatttcaccatttaacttgttaaagtagggtacagtaaatttgttggaggtgcccttttcgtcaggactcaactggaagaaaatagcagctactccgaatatgtaggacagccgcagaacaccgttttttgccgtgggtaaggcaaaggtcaccacagtacagtataagccgcaaatgaaacaccaagtatgcgttggccgagacaatcaatcgctgcggtccactcttggatgaggattatctgcagcgggcagcggaccgtctggagcttccgctggagaatctgaagaagcggctggacgctgtgatgaaggagtttttcttagaatagggtacagtaaaattgctgcgggtgcctttatttctactacgattttaccgtttaacctgttaaagtagggtacagtaaatttgttggaggtgcccttttcgtcaagactcaactggaggaaaatagggtacagtgattttgctgcactgtaccctatttttcctgatcatggtgagcgtcggcagagaatcattctcttaatatgaatgagataccgccctccatcagcttttctttttctcccaattcccttttgtgttcccgaagtatggtgtcgtcaagatttggaccttatccgaagtataggttagggtaggctaatgtagatttattcattattgaagaataagcaaaaggatcagaggtcggttggtttctgatcctttcatttactccattggtttgattgtattttcgatgtagttgatttcttcttggattaggccatacttcttgtagagttatttatctaatgtaccctacgggtggtcgaggacaatcagagcgtggagtgaaacgtatcgtgttcttctaaatcattctacacaataagtaaaaatgtaaaatctttttttacagacgatgttgatttttcggcgagatagcgtataatataaatgcgaagggaggaactataatgaagtttgaagaattgtttgaccagcgtagtatcgtagcaatgaagctcaaagattatattcgagaacgcggatttacaaaagtttcttttgcgaaaaaggctgaaatttccagaccaacactggataagattctgaatggaagcatcgataataaaagtacatttgataagcatcttcaaaaagttttggctgttttgaatatttctgtggatgatcttgttttctttgaagcaaaaccaaaatctgatatagtggatgttgtatattctgaaaatgcgcccaaagattataaaataagcgataaagctcaaaagcagtatgggttgctcatggacattctcgaactctgtgatatttactattgagaggtgtagctatgagtgaaaaaatagtggcgggtaatcttgatgaagtcattagtaagaatgcggaaatctgcgatgagatgcgggaaaaagctgtcctgatacgcaccaacttgaatagaatgcaaattagctcttctaatcggttggcaatgcaaatcctgaaaccgtatggacttattcaaatgccaattgacaatccgttttggagcggtgcgatttttgtgaaaaatggcaaaaaaataccggtaattaacactgcactgccaagagtcaatcagtattttactgcatggcatgagatttaccatttgatctatgataaagtttcgttcagtcacattattgaaacagaaacagttatggaagaacgaaaggctgagtactttgcatctttgatgctgttaggaaatcttttgccatattacacagaattatctgaaatggatttcctgtctaaaatttttcattgtatggatgcttttactgcgccatataaagccgttctgattgcgctttatgaaagtgcagttcagaatgaaaatgaaacacttatggcgttgattaaagagaattttgataatactttttctgatttggctggccgatttcgagaacttggattagatgataatcttgtgatgccatcgtatgtggtaaatgttggttcattgcaggcgaaaattcaggaaaaaattaagcaggaccccgagctaaattacaatcatgaaaatgaaagatttttagagaacattgttagagaagtgaatttagtgatgagggaagaaaatgcttaacatacaagattatcaaagatatagcggagaaaagaaaattgccctcatggataattcgacggtttcttttttagagcaggttgaacgtgcggggatatccactaaggaactgctcaaagactacgatgcaatacttatcccaactgggtttcagaagaaatctgtgattcgatttatcggaaggactatatagagaggctgtatgcagcaggacttccaatctattccatcgcagaagaaagctatgcagatctagtaaacggtgaagaagcaaatctgtttaaaattgtttctgctgcggcatcaaagcttgggcaactaagaggctatctccagcagtatgtgaagaaaaatgaccctttggagatggaagaatatgctgtgtggatgaacaggatgtatcaagagtggcccttgcggggaactaccacaaggagtggacgagaaaagaagaaaaatgcgggtgaaatatctttaacgattttggccgaagttttttcatggtattatccagacagcgaatcaattacggtttatacccaagatagagattcctacgactatcaaaagagcgcacgggagaggttaaatgatgtcttcgctagtaagacatccatagatgtgagctataagtccaacgatacattattgtgccaaatgtttagaaatggtatgttgtcccttggtcaaattgataccttaagatgtgatgaaagagtagtagtttatacaagaagccgtgatgataaatctacagcgttggttgcaaagagaacagataaccagcaatttaaggccttgttgcaagatatgaacgtgcaaattatcttttgattgttgccgatagaacacgccaccaacttttctaccttattataataggggtgtgtaaaacacactcgattacagcccgtgcaagcagctccctccaatggaggctgcacctgtgtgggcttttttcgtttccgagattttctacttccaagagccagtgacctgcgttcgtcctgatgcagcggatgacaaagcaagttcaggaacttcggcttcggtggtcacaggagtcgttctggcaggaggggcaggcaaggggcgcggtcagggtctgtaaagttatggggctagaccaagcaggtgcctgtgagtatttgcgtgcgctgttcccggagcttccgcaggcggatgcggagcggctgattcggtattactgacgggacgatattgacagtaccgctgccacggaacgaattgacgataaaatcaagcatcgcataacgatggcggtttaccggacgcaatataacggagcgtgctgtgagcagcttgaggagagctatctcaaaggtgctgtctatgcgttggccgagacgatcaaccgctgcggcccgctcttggatgaggattatctgcagcgggcagcggaccgtctggagcttccgctggagaatctgaagaagcggctggacgctgtgatgaaggagtttttctcagaatagggtacagtaaaattgctacgggtgcccctatttccactgtaaatttcaccatttaacttgttaaagtagggtacagtaaaattgttgtaccgtaccctatttttccttatcatggtgagcgtcggcagagaatcattctcttaaaagttacttattgagccggcacatctggttgcgttctgccaatagcacggaaacagatttgcgtgttgccgcgacttcttcagcagtaccaactgcaactgtttgttggagtgagcacaaaaagcgtgccgtggacaaggatgacggagccttttgcgccgccgggcctgaaaaatcaagcggagattgctattttgccgtatgtcctgtataattgcgttataccagcgaaaaatacaatacgaggagaaaatacaatgaataagactgaattgatcgccgtcatggctgagaccagcggcctttccaaaaaggactgtgacgccgctctggccgcgttcatcaccacggtcgagactgctttgaagtccggcgagaaggtgcagctgatcggcttcggctcctttgaggtcaaagagcgggccgcccgcaccggccgcaatccccgcaccaaggagatcgtggagatccccgcatccaaggctcccgtattcaaggcggggcaggcattcaaggacgcgatccggtaatgacagaagcacggcctgggaaaagatcccaggtcgtgctttttgccgtacatgggattcttgcgtgaatgccaatcggaaagaacaaatcagagcagatattagaatggcagggaagtgaaagaatgtccgcattgaccgtgatagggggactatcatctcccaagccgtaccgggctgcactttggctgttgtaaacacagtgccttcgtgatatactgacaatgataaaatgtgtgaaatacacctgatttgttgctgtatcgagagaatgtgaaaggagtatatggtatgtctgcacctgtcccgcatgatggtatcgttgttcgaaacgcgcggttagctgtgaagaacgagttggaaaaaaagcgccttttgaatcagcctattgcaagatttgacccgaaaagcggcaaggtttatatggaacacgctgatggcaccaagacccttgtgggagaggctataaaaaaaggtggatatggaaaacaagccgattaagaagccggagattgttgtctttgcagggccaaacggttccggcaagagtacaataacagatctgctgcgccctccgatgctcccttatgtcaatgcagatgagattcagcgagtcctggattgtgataatatggaggctgccaaaatcgcagaaaagcggcgtgaagattacttggataaacacaaggggttttgcttcgagaccgtcttgtccacagaccggaacctaaaactcctcaagcgagccaaagatgccggctttttcgttcgctgttattatgtcctgacagccgacccgcaaatcaatgttgcccgtgtggcgtcccgagtttccgccggcggtcatggtgttccaaccgaaaagataatttcccgctatgataaggcattggcccttgttcatgaactggtcccgctttgcgatgtatgccacatctatgataattccttggatgcaccataccggatcttcaaaaaacgcaaagaggaatactggtattgcccggagcgatatctatggaaaaaagacgatataacagctctaaccggtgttcctaacgcacagagagcatctctgaataatcacagaacttaaccgtgaggaacaccgcgtctacgttgcggccaactgcttcagccttaaaaaatgagtgaaaaagggatgagtcctgcgtatccaaacgcaggactcatcccttttgtttatgcaagggcccgccagtacaatcattttatcagttcatctaaaggcaggggctttacggcacattctggtaagaggggagcggggggcgctcacgaaggggcgccctccgtccatgtgagatttaaaatgtattccatgcagatgcagccctcctcgtcacaataggagtgcaggagatccgcatgattagaaagcattcccatcgcaaccgtgggccccttggcaagtgtgtggccgtttggaatggagaccgtgaccgtggcggcgggcataccgattgccggcgggacctcctccacagaaagggcgggatccatgagggggagctgcgcacctatagtggagagtgcacgccacgcaaggcgcttgtcggaggatagcttttcgatgtcgatgtctgagtggcgcttcattccgcgtcctccgtgacccacatcttggaaacagtgaaggtgaagcagatgccgcactccgtcttgtccgtctgcacggtgtcgcaggcggagaacaggaaggacagcgcctgccggatggtggagttgagcaccaccagcggcgtgggaaattccagcgccacggaggcggtatcccggctttcgtggggcggctgctccatgaggcggacgtgggggaccagacggtcgatttttccggcagcttcccgcagagcggtgaaccgggacatggcggtggggtcgatcattttcacggcgaatactccttcctcagtaaacaattctgctccagattatagacgatgctccggaaaatgtcgagtaaaaagggaaggtcgttaacggtgagggcaatgtgcgcttcggcatcctgaagtggagaccatgaacctaaccaagcgattttgctgatgctctgaatacattattgcaatcagatgcggaacacgctctcattacaagggccgctactgggttatatcgtcccgctattcgtgtcgggcgtaggtgcggatgatggcgtggcgatcttaaattatttgcggcaggcagtatgcgaaaagacgtgtaaattccggcgtgtgagctacatgtgtccggagatttagctacagctgtttcggaggccagcccctctgacttgcttgttaggcgttgtcccagcggaagataatttttatggactgttcataaatgtcctgttcggtccattcgaagcaatcgtccagttctttagagaaaatcatcaaaatctcccgtttagcttgctcggcattgcccttgttatggaaccaccaggcatatctggtgtccagcaattcacgggtcagggtcatgtcattcctcccggtttctcagaccgtggcgctcccgcatggagatctttccgtcaatcaggatttcgcaggcgttatgctcttgtgcggatctgaagcaactcgcaggatgtttctgtaggcgagcaattgatttcctcctcgataaaggtcagctgtgaagtttcaaagcgcgctcatcacgcaaaaacaattacttcagataaattcagaaaactctactatcccggtattccgcaagcaataaaaaacgcagagagtttttctggcagctttcccgaattgttcgatcatttgggaactaacttacctaaactgcttgacattcttgaattccatgtttaaccaaggagaaccgattttcgtggatcctgcgtttacggtcattggaacaggcagagatcatctgccatttacatagggctctttccggttttcgttgaatttttcgtaaagaaaaagctttgcccgcgatgcagggctgtttcgattacgcgtgcggccggatgtagatgactttttctgtaagcccggcgctggcggatctgtccctgctgaaatatataaaaatgttgacattttttaggaaaaagcgtacactttaaatgcccttataccactacgagggaaaatcgtgttactacgataaggtagaacacctcgaagccctaccccggccttatcggccggggtatcttcgtattttaggaaaggagccctctcagatgtcggaatttcattatgcgcttggattggacataggcattggttctgtcggctgggcagtcctccgaaatcagccgaacggagagcctgaccggatccaggacttgggcgtgcgtatttttgacaaggcggagcagccaaaaaccggcgccagccttgcggccccccggcgggacgcaagaagcgcccggcgccgcctgcgccgccatcggcaccgtttggaacgcatccgttacctgatggagcagcgcggcatcatgccggttgcagatatacaggccatgtatgccgccggtggcttcccaaaatcgccctaccagctgcgcgccgaggcactggaccgcccgctcaccaaggaggaagcggttcgggtgctgatccatcttgcccagcggcgcggctacaagtccaacagcaccgcggaggcggcgaaggacgaaaaggagacagggaaggtcaagaccgccatcgaagaaaatcgccgctgcatggccgagtacggctaccgcacggtaggcgagatgatgtatcgggatgagcggttctggcaaaaacatccggacggcacgcactatcaccagactcgcaataaggcggaggattaccggttcaccgtggagcgcgcggccatcgtggacgaggtgcggcagatcttcgccgcccagagaaggctgggcacggtctggatggacgaggatatggagaccgcctatctctccattctggagagtcagcgcagctttgacgaaggccccggcggggacagccccttttccggcggcatcggggaaagggtgggtgcctgcaccttcgagccggatgagaagagagcggcaaaggcgacctacacatttgagtatttcaagcttttgcaggacttgagccgcatgcgcttgaccggtatgggcatgccgccggagccgctggatgccgcgcagcgtgaagcgctgaaaagcgcggcgctccgttcggcatcgctgagttacgggcagatccgcaagaaactgaatctggatgatgatgtgttctttcacggtctctattacggcgagaaaacgaaagaggaagcggagaagcgcaagtggccgcagatgcagtcctatcacaagatgcggacggcgctggacaaggtgggcaagggcgcgatcggcaccttgaccgaggagcaactcaatgccgttgccaccatcctgacggagtgtaaaagcgacgcgaagcgcatagcggcgctgagggaggccggtattccaccgcagtttgacgaggcgctgctgccgctgtccttcagcaaatacggaagcctttccgttcaggcgatgcagaagctcattccgctgctggaagaaggactgcgctacgatgaagcgtgcacgcgggtctacggcgaccatcggggcctgcatccggaacagcggaagaatcggctttccctaacggatatggatgagatcacgaacccggtggtccgcagagcggtatcccagaccatcaaggtcatcaacgcggtggtccgcacctacggcccgccggatgtggtgcgcatcgagctggcccgtgaaatgagccggaccttcgatgagcaccgcaagatggaaaagcgtcaggatgataaccgcgcggccaacgagcgggcaaaggatcaaatcgcggaatataagggagaccacgccaccggcctggacatcgtaaagttcaagctgtaccaggagcaggacggcgtgtgcctgtattccggccagaacctcgacatagcccgcctgttcgagccgggctatgcggatgtggatcacatcatcccatacagccgctgctttgacgacagctatcagaacaaggttctggtgctggccagcgaaaaccggcagaaggggaaccgcctgccctacgagtatttcggacaggacgaagcgcgctggcacggctacgaggtgcgggtggaaaatttgatccacaattaccgcaagcggcagaagttgctgaaaaggcggctgaccgaggaggaaagctccgggtttattgaccggaacctcaaggacacacagtacatcacaagagccgtctataacctgattcgggatcacctcgcctttgcggagtccaactaccggaaaaagccggtgcaggcggtgaacggcgcggtcacagccatgctccggggccgctggggtgtgcagaagatccgcgaggacggcgacctgcatcactgtctggacgccgcggtgatcgccgcgaccacccccggtctggtacagcgcctgaccgcgtacaacaagcaccgggagacatgggaaagatcgcctgcgggctatgtcgatcccgccacaggcgagatgctcgaactgccgcaggaagcgcggcgcgacccattcccgaagccgtgggagcgcttccgtcaggagctggaagcccggctcgaccccatcgaccctcggcatcagatcgacctgctgaagcttgagacatacgaaagcgatgaggagatcaagcctgtttttgtttccagaatgccgaaccataaggtgacgggcgcggcccacgcggagaccatccgcagcagcaagggcggctatggcttcaccgtgacgaaaacaccgctgacgaatctgaaactcaataaatttggtgagatcgaggggtattataatccggcaagtgatacactgctatacgatgcgctgctggcgcggctgaaagatttcggcggcgatggcgcgaaggcctttgcccagccgttctataagcccaagaaggatggttcgccggggccgcgggtagacaaggtgaaaatctgcgagaaagccacggtgggactgccggttcgagacggcatcgcggccaacggcagcatggtgcgaatcgacgtattttatgtggagggcgacggctactatttcgttcccatttatgtggcggatacgaagaaggaaagcctgcctaacaaggcggctgtggcgatgaaaccgtataatttgtggaagaaaatgaaggacgaaaactttgtcttctctctttatcccggagatctggtacgcatccagagccgcaaggggatcaagctgaatcttgcaaagggcggtacaggcgaaaaggagatcgttcggcaggagggaatgtattattaccggagcgcaggcattgcggtagcacagatctctgtggaaacacatgaccgacgatatttacagccgagcttaggcattaagactctgcaatccatcgaaaaatatcaggtggacgtattaggaaactattacaaagtagatctccccgaaaaacggatgacattttccaaggagggctgagatggaatatcggaatatctttttggcgaaccccgcgcggctcagtgtacagcgagaacagctggtcatcgaacaggcggaaaaaatcacggttccgttggaggatatttcgtctgttctcatcgaatctcagcaggtcaccctgtctgtccacgcggcggcagcgatggccgatcatgggatcaccgtatttctgtgcgacgagaagcatttgccaagctgccagctgctcccgatcaaccagttctgccgtcagcgaaagctgttgctatcgcagtgcgagatgggcaagccgctgcaaaagcagctttggcagcagatcgtcgtccggaaaatacaaaatcaggcgcagtgtctgcgtctgatggggaaggaagaatggcaggagcttcagcaaatggccggaaaagtcctttccaatgacagtgataaccgggaggcggtggcggcggcgctctactttccggcactgtttggaaacggctttttcagaggctccgatgatccccggaacgcggcgctgaattacggctatgcggtcatgcgggccggaattgccagaaatcttgttgtgcatggcttggagccctgcatcggactgcaccatcgaagcgagttgaacaacttcaatctggcggatgacctgatcgaaccctttcgccccattgtcgatctctatgtggcgcagaatttctccaaagacgatgttgtgttgacgccgcggcagaaagcggggcttttcaatctcaccaattatcttgtgaagcaggcgggcagacgatacagggtcatgctgtcgatcgaccgggtgtgtatggctttggccaatagcgttacagcgggggagaatctgctggaattgccggagctgatccccttggagctgcatcagtatgaataggcttatgagaatactggtgatgttcgacctgccggtcaaaaccaaggcggagcggcgcagcgcgacgcagttccggaattttctggtgggcgatggataccacatggtacagtactctgtgtatgcgcgtgtctgcaacggccgagattccgtggagacccacaagaaaagaattctgctggcgcttccgtcaaaggggtctgtgcggatgctggtgattaccgaaaaacagtataatgccattgaactgctggtgggcaagccaacgccatacgacaagccgcagcaatttgagcaactgatgattttttaagaaaaatacggaacgacttctcacagaaatcgttccgtatttttgtgcttttgcctgccttgtgatgagaaagacgtgctaaaagcgttgaatttgcgttcttgattttcgcctattataccactacgagagaaaattgggaactacgacccgcaaatgcagggcgttttgcagggatttattataccactacgagagaaaattgggaactacgaccacaacagtgaacaggccaacgagccggaaattataccactacgagagaaaattgggaactacgacaaagctgccggtgtccatgtggtcgttttcattataccactacgagagaaaattgggaactacgactgcgtggccgtcagggcattgtgatccacggattataccactacgagagaaaattgggaactacgacaacgccgtccttgatcagctggcggtagtcattataccactacgagagaaaattgggaactacgactatgcaatgagcaaccattgccggaggcatattataccactacgagagaaaattgggaactacgaccaaaatggtggctcgattatgctggtaatgattataccactacgagagaaaattgggaactacgactcatcaaaggtgtttccatgaagctgaacgattataccactacgagagaaaattgggaactacgacatttctgcttacctcctttttcaagcgtttattataccactacgagagaaaattgggaactacgaccgcccagccgcacggtgccgctgtcctgccattataccactacgagagaaaattgggaactacgacctcgcctgtttttcttcaattgacaccccaattataccactacgagagaaaattgggaactacgaccgtagacgcagcgtatcagtacaagggcaaattatgccactgaaatgactgtgtggagctattcggttccgcccggcggcgcgcgcaaggagcgcggcagctccggcttgatgggaatggtctggtgacggctctcagcgtatgaccttccgcgacagcagtaccaagaagtaacttgtggaagtgacgccgaggaaagcctctgtcagagacaccatttttgtaatggtattcagcggaaataaatcgccgtagccaacagcgaaaaaggttatcccgcttgcgtagatatgctcaagccacgtgcttgcgccatggaaggacaggaagggtgcgcaataatatagcgtaccaaacagcacgatcaccgcaaggatcaccaacagcattctgaatggtttggtcccatagccgcttatgccatcgagcatatatcgccctgcctttttcagacgattccgctcacatttcgttttagatctctgaaaatagagatggcagatgtcctcattctcatactcgccggtttgcctgaaattctcttttaacatgagcagctgcgcgggatcgctggaggatgcggcggtaagcggtggaattgcggatacaaaatccgtgaagcagatccttcccgtattgattgtcccggaaagggtgagggtttgggcttgcggcacagagagcttccatacagccgcgtttatgcagtcatctatatggagctcctgtatatggccgccgatctcagcatactcgagaaatttacaccgcttaaacgctaaggaatcaatatgcgcctctctgatatccacggtgtcgatttccgcatttgttatcgtgacggtatttgccgcagctttcacaaagcaaatctctttaaatgtagtgggaagaggatctaatgaaatagtcgtgttgctggttttggcgcataagaaatccagggaaaggctttgcgacatcagcatcgtatctatttttacggtatccgcttttatatagcgaaaagaaatttccggagaaaagtacgaatttcctccacacgcgatcattccaacagaaatattggaatgatcaaagcgcgcaaaatcgaatacaagatttccctgttcaacgcttaaattgcaaagatccagattgagattgaaaaagcccgaataggaaaaatccatatcaccctttttcagttttgactgcatgatgtggaagtaagccggttccccgtggttattcagcagggcgcaccgcgcggaaaagccttcacgttccgtatagggaagtgattccacctcataaggcagttcatccccaagccatgcgaagtcatcgatgtatgtataatttaaattgatctcttttccggcagaatagtactcgaccagcttttcgtaatcagggagctgtagctgcgcgatttgagtaacatgaccagcctcatccttttggtaaatcgctgcactgatgccggagccgacatttgaaatcgctgacgggtagatgcctcccgtctgtctgtttgtgatttccttcttccagatccaaaactcctggcttgggttttcaattttttcaacaaaaatttgcatgatacactccttgcggcctttgtaaaaatgatttgccgaatgggcggaaagacggccaatatgacggtaacgggacgcgtatgcgtcccgttaccgttgttttctatggggttttgcgcggcgcggacggtgcggggcaggggagggaatcagccgtccagaccggctttcagggcctccaccgtccgccgcagttcctccagattggcaaggcaggtgtccagctttttccgggcggtggtgcggtctacatctgcggagagatccagcgccttcagctgtgcggtggagcggcggacggcccggccaaaggaatccaccgtccgcagaggattggcggccggggcgggcttgggcggaggcgggggcagctcggcggctttcgcccaggcgatggcccggtggacaaggccggggaagtccccgttggcgttgttgtgagcgacatattcctccacggcggcttggaggtggacattcttccggcgggccatttcataggcgtccgtcatggtcatctcgccccgctcggcccagccggtcatggtctcgtccagattcagaagatccagataccgctccaccgtggcccggctcagatcgctctgagcggccatcaactccgcctgctccttggttccctcggggagctgtccgctttctgagaggacttcccgcagcgtttccagctggcgggccatgtcaaagggggagaggctgcgccggtggacgttggcacccatcagcgcccgcagctcggagagcttgtccggataccggcggactttacaggggacagcggtcttgcccagtttccgggcggccatcacccggcggtgtccgctgatgatgcgccaggtgttctcgccgtcgggcgtgaccacgatgtcctccaaaaagccgtcctgctccacggagcgcatggtggagaggaactcatcgtcctccgccatggagaaacggttcaaggggttatccaccagagacgccacaggcagctggcgggtcagctcaccgttgacggcgctggcgttttccgtggtcttttgcagggtggagaagatggaggggctttttttacctgccatggatcagccctccattcttgccagcatttcgtcgcacagggcggcgtaatcgccggtggcggtgcagcggggggagaagaagcacaggggctggagggccagcggggccttcttcacgtcgatattcttgcggatgtacgtctggaaggccagacccggcagcatggcggggaagttggcgatcatttcccggtcaaggctggagccggtctccacggcggtcatgaagatgcccaaggcccggatgtccgggttggcgatctcgcggacggactggatggtctccagcatgacgtcgtagccctcgatggagtttttatccaccttgatggggatgaggacgtactgaacagccaccagcacgttgatattgaacaggctctccagagagggggagcagtcgaaaaacacgaaatcgtaagtatcggggatctggggcaggaggcggcgcagggtggtgtcccggccaaagggcatctcctgcatggtggccagcgccggagccagcagactgccgccccggatcaggtcgaggttttcggtagtggtgtggcagacggtgtccgccagcgtggcggtcttggacacgatgacgtccgtcagcgtggcggcggggatctccgtcagggacaggttgctggtggcgttgccctgagtatccatgtccacgatcaaaacctttttgccacggcgcaccagctcgcccgccagattgatggcggaggtggtcttgccggtgccgcccttctggttcatcacggcgatggttttcattcccgggcacctccgttcttttccagctcctcgatgctggccacctgctctaaaacgctgtctaaaatcagctggctcatgctcatgtgcagcttggcggcagccattttgatgcgggcgcggtcgtcctccgtggcgtagaccagcagcttgaccttattgcttttctcatccatcgacagatcctccctatatgcgacgttttgatggtagtttctgaaaactattatgacatcataatgtcatgaggtcaagaggaaaatggtcgaattgatgtcaaaaattgatgccccaaattgacgtcacggcgctgccggacgcgggaaaagctcccgccggtttcccggcgggagcctcagcgtatcggaaaagccgtttccgtggggtcagagccgcttacttgcccagcagacggttcagcatcgtgaccatctgggcacgggtgcagggggcctgcggcatcagtcggttatccgcgcctctgaggatagcggcattcgccgcccatgcgatggcttcctccgcataagcggacacctgctcaaaatcgtcaaagccccgcgcgtccgcgccgctttgtactgtgtccatacccagcgccctggcaaagcggtagagcatgaccgccatctgctgacgggtgatggaatcgccggcgccgaaacagccgtcgctgtagccggtgacgatgccaagggccgccgcccagcggacagcctctccatagtaggcgtcggctcccacatcgggaaagagcgccgcctgctccgccttgggctttccggccgcccgccacaggaaggtcaccagctggccgcgggcgcagtccgcgtccggagagaaatgcgcgtcgtccgttccgagggtgatcccttggcttacggcccagaggaccgcttcatagtaataatcgtccgccgacacgtctgcaaaggagaccggcacgtcggctgcgttcagaaaggctgcgttgaccgtcacttcggaatccggcatgataaaggaatatctgcccttgccaagcggggtgaggagaagggccttgcccagcgcatccgtcacgacaagcgtttccagtacatagcccttgtccggcgtgacggagagggtcacggcttcgccggggcttacacggcccttgctgaccgtcacttttccgtgagatgcctccacggtgcggagcggatggccggcaggcggctccgaaggatctctgtccgaatcttccgaggggatcggaggggcggtctgatcctcgtccgcgacttgatagtatgcggcctgttcaccggtaagggtcaaggtcccgtccgtcaggacgggggcgacatcgtcgccggggagaatgttgcccagaaccgcgcgccatgctccgctgtcccgccgccagctgacggtgacggtacggggaacgatcttccagacgccccgctccacacgggcgttgtaattgggaaattccgtctccggggtgatccctacgcttgctttcaggtcgatggttccggacgcaagcgtgtctgttgccggtgtcgcaggccatgtgatctcatttccctcgccgtccctgagcagccattggatctcatactgctgtatgatctcattcaggctggccagatgctccggcagaagatacccgccggctgtgacggtgacgcctctggtgagcgcgtcacgagagaagtcatcgccgtattccacctcaagattgctgatcttgataggcagatagcgtctgcggacgatgacggggatctcctttgtctccccgtcggagccgtccgtgggaaggaatttcagcgtctgtgtctcaggctcctcaccggttgttgtggcagaaaggatctcagcggccttttcaaactcaaagcgtccctccttgccgccggacgcattacccgcaaagcgtagcgccgcctcgcccagcacatagccgtaggtcagctccgccgccaccggccagacgatttcctcggacacggtgggggaggggagagcgggtgcgttttccttaggagagggggtagcggacgcgccttccgtgggcgtaggcgtaccttccgtgggagcgggtgtgttttccatgggcgcaggggaagcggtcacgttttccgtaggagcaggcgcatcttccacgggaacaggcggagcggacacgttttccgtgggagcgggcatggacgtaagcccatccgagagcggcatttcggcgaaagccgacaggaagggcgtttgctccgcagtctgcgtttctccgtcggcggtcaccgttccaaccttcattgccgcactgctggggaaggcgttgcggtcgatgatgcggcggcagagctgcttgttgacgaagtccatcaccacgatgccgagccgggggttttccttcgccgtcttgctgccgggtgtaaacaggtcgtcattgtaaatcaggtcattcatgtacttggcggcgccaaggggcgtgctgccatagtggtcgctgccggttttgctggtgtagttgaacacaaaatcttttttctcgatcttcgacgcacctggcagcgtgtatgtaccattgagctgatagacggtgttgaatacctgccttttcttattgtcgtcagggctggaataatcgtcctgaatatagaccgagaccttgctttcggattcaatcctctgggcgtagtgattcctgtccttgtagctgtcgtcccattttgtgagatccggccccgtgtagctgtaaaggctgctttctccggctccgctcatgtccacccgggtcatcaggacgatcttgccacgcgcctgccccagcgtcggactggtcatccggctctgcgcagccacgagggtgttcgggaaggctgtctccgtccagcagtaaaagcgattggggtaattggcagtatactcattgagaatatttaccagcgccagtctgcccttatcttcgtcgccgctgtcgatcttcagcgtcacgatcacggtctcggtttggtgcttatcaagataccgaatgacagtatccagcacggagcggagggtcttgtttttggatttgttgttgtggtcgggcgtgtggcagataaagtcgccatgcaccatgaccatatcgtctccgtgccatcttgtgcgcagatccagcgcgcggacgccggcgtagagctgctgttcaatgaaatatttctggcaggccactttgttgtagctggcgttccagctgccctccacgttggcggtggcggaatcgtgggtgccggggatgttgagttcagagagatagcggccgtccggcagcaggctcatccagttggcgtatttatccgttttgcccatgtcgtttgccgcgtcccggttcagcacctggatccgccagcggaaggagaattcgctctgctccagattacagccctcctccgaccaggatgcttttcccggcccgcagtcctttttgggatccttgaagtagtgcctcggcacgatgtagagatcggaatttctgtttttcaggaaaaaggtctcgggatcgccgtccccgtcctcctccagatagaaccactgagagagcgccccgtttttgaagtcccagacgtgcacgttgccgccgggctttaagttgcggccttcgatgtcccagtagcgcccgttgccggactcgcggaagctcttgttctggatgcggaagcagcccgcgccgtcaggccctcttacgtcatgcctctccacgtaaaacttatcgctgacgccgtatttccatgtctggatgtcattgccgttggcggtgccgctgtgctgcgctgtcagctcccactcggtggtggcgacggccacgcgctttatttccgcattgaaaccgggcttggagaaatccaggaaggcctgccacttttcagcgggggagatcacgaaataatctccctgttgcagataattggccgcttcgctggcgggagtttgggcggtctcatcggcgggggccgccgagaccggggcagtcaggctcggcagcagcgtgaccgcgcagagcagcagacagatgatccgttttttcatagagttcctcctatattttatacgttcattcactggcggttcattccccccagaccctcaggccctggcggaacgcctcgtcagtcaccggcttgagcaggaaatagtccgcccgcaggcggaaagcgtggagcgaaaagtccagatcgctgcaccagatgatccggcaggcggggcagagcgaacgcaggtgctccgccgtgttcagtcccgccaccccggaaagcgcgatgacggcgttggtgggagcatcccttcgcacggcgtcaaaaaagcgttccggatcatcataaggttcgattttggggaacatccccttttccccgcagaatcgggcgatctgctccgcatagtgaaaagcctccctttcctgttccgccaccacggcgatacggtacacagcctgcctcccttcttttt

SEQ ID NO: 1963 - DNA, 23300 bp, synthetic construct
  misc_feature 1..23300: note = Synthetic
  source 1..23300: mol_type = other DNA
cgccaagcactggtgtttgggtgtccggaggtgttccggcaactgcacgcagaacccgagcatgagatcaaacattttgtccaggctgggagcacgggagcaatggccatacgcaacgttggtcagacgccagttcggcggtgtcgcttggcgtttgctaagcagctctaagttctctttgagataatcatgaatgcgtcgatcttcctcattctcaagattgagttttaccgagaacagcggggtcacagtcacttttccttctgtttctgccgtggtgcttggattagtttcgggcgatagcagccggaacacagctttacctccatgcccatgcatgcccagactgatagtgcgtttctccttgtcagcgctcgcttgtttgcagcagtagcattcgctgtgtccaaggctgaaacctgcactccaagcatcgcaagttattttgtacggggtcaaaacatagcggtcagtggttccattcatagtggtgcggtacgtcagttttctcatcatcctacctcctaaaaaataaaaagactattgcgtcatcacctgttctcttgttgatatgaggacaggtgaattccgcaataatctggagatagataacaaatcacgaatatttagatttgagcacattaagctacaatcagtgagttattgctaactgattatttcgattttagcatagatggttatttttgtcaagtattaagttatgtaaatatataatttgcagctataatacaagaaatctatagaggttaaccgccaactgcgtcgtcttggtgctggttttctttgtcgttgccattcttacttatccttaatttttcggggcgccgctccccccaggtcgcggcggcgcgctctccgtggaggtcgggagaaaggcacaagagctaactaactagagcggatacaccgcaccgagcgcccgccgtacctgtagttgttgccggtacccaagctactaccattgtagtacaggtagtaccggctgcggctaccgctcgcgatagctgaccaccagtagccgcgggagccagtactgccgagcgtgccattgtcgtagagcccactaaggacaggtgagaaagcggaggtgtagctagtaatgccgatcatctcgtgagcggtcggtagccgccaacccttcggacagatgtcttgggtggcatcttgcgctgaggacgaactacagaccgttccggctgaagcggcacaatagttgtaatagccgccgtaggaagtattgctgctgatggcagagcgagcttcggtataggagttgccagaagtcagactgccggtcgggaagctccagctctgggtcacattggagtctgcggaggtgagcaccctagattcacctctctccgtagtggaagagagtcttaggttctgcgtcatccagcaatgcccgttgatcttagcaatagtataactgttgttatctcttctatctcgcaaagtagccgttgcaccatcggaactgcctgagcattgggcggcggtaaggtcttgcatataggtagcttgggtgagtaggttcacaaactgttgttcccactgcgcatagagcgtaatcgtctgccccgcctgtgccgtggtcgtcgtcagcgtcgcaccgttgctatagctcgtcccactcccattcgccgccgtgttccaacccgtaaagtcatagcccgaccgcacgaaagtattgccaggcagcgcttgcgaatcgcccgccgggatcttgattgacgacatactgccgctagtggcaccgttcccattgaacgccaccgtcaccattgccggttccgccaccaccgcaaaggtcagcgtattagaatacgcccccgacgcaatcgttgtgtccaccttcgccccaaaggaaagagtgtaggtatcgttggcggagttggtagtggaagtatccttggtctggataggaatagagttgtcggtaggaacggcagagtaagttgtgctgtcagttggcgcttctgtgcctaggttgtagccccaagtattaggcttgaggctacttaaggttaggccaacaccccctgcggtagcgatgattgaggaggtgttggcagagattttaggtctgaggctgttgtcgccatcagaggaatataggtaaaggctgtagctggcgctattggtagtggtgacagtcagatcagcagtagcggtagtagttgctccgtcaggagtcggagtgacactttcaaaatcaattgaagcagggaggttaatgccgacagacgtacccgtacttggagtaacttcagggatcgctgcgtatgtcacttgtggtagtgctggaaacagcatcaagccaaatactaataccaaggcacagcagctaactgttcctgccaatcccagccacgacatccggctgaacttactttgacttaattttgttctgtgtatccgtaacaccgctacctcctatttcttagtgctgcggtgctatgataaaaaacgacaccgcaatgggtgtctaacctttttacactcaagcaatgccttcatgttatgcggtgccgtttgataggcgtcgcataattgcgtgtaaaattataataggttagacattactatcgtagcatggtttttattttttgggtaggattgactttacaaacatgagcgagttttccacaggaacagaggcgaggtagcagttctgttgctagaataactccatcctcagatacgcccgatccagatcgtcctgcgccacgcccaagtatcgcctcgttacctcataattgctgtggttatagatgtgcatgatgactaccggagaaatctccttactcgtccaagcgtggtatccccatgtttttctcaggctgtggcaggagatcttgccctccacgcccactgccactaccgctgcatggatgatccgccatgcctgtacccggctgatggccttgccttccttgcggttactcacaaaaataaaatcgccacgcctgtgtgggaagtacaggcgcagcgcttggagaacctgtttgtttagggcgatggtcttggtcttcttggttttcttctcaatgatggtgatgtgggtgcggaaggtgctatgtaactcgtcatatacgtctgaccatctaagccggagcaggtcgctgatccttagtgtagtgctcgtccccatgatgatgagcgtatagttccgaagctggccacgcttcagaaaatagtcggccagcgcctttagctgtttcttgtctctaattggttctgtagctgccataattataattaagcccccttgtcaaagatacgttccagtatagcgtatcctttggcaagggggctatgtatcactttaattctacagataccattttaccattaaataggccaagttgcaacggaaaatcacccccttgcggtaagtttttcctaaagattcactccctgttgcgaccgagagcgggtagtgatacggggttcccttcagaaaaatgtaacacaagaattattgtgttacatccgactgtagagggcggtattttttgttggagcggagggctttttaccatgatttgccgacattgtaatcaagaaatcccagatgggagcgctttttgcccccactgcggaacaaatacatccgaagtggagttacacccaaaccctgttacatctagcgtgggtgcggacaaacagaaagtagacatctgtttgcagcagatattttccttggtcattggcgttgtctttgtgtttatctgtggttttatcggcaaatggctggcaggtaacctgatcggtatgggtggcacactggcttcgcagattgcggattccttcataaaggctacgtctgttattttggctattatcggcgccatcttcgctatcgtattacataagcaggacgcgcaaaagcgaattcagaccaacaaaatcgctttgattgttttctctgcgcttcaggcggtcttgctccttatactgttctttggagggcgcatcatcatctcgctatacttaggggcaattggcggcggagcctacaatgtggtgattacctctacacttcgcactactgcaatccctatgctgatggcttccgtagtagcaatcctactgggcaagtttataaaaagaaagtcgttacttctcgttctgcttatagactttatcgcttttattctatcagttgcggtgacggttttgtatgctcaggccggtgcccaagggatggtgccgcttgcggcaggtgtcgggatcggcattatgcagcccatagcggtattactgccaagcatcggttgggactacaataaaccggcgcaaaaacaagctgttgcgacaaatgatggtcaagctgatagacaggccgggggtctccagaggttttgcccccagtgcggcacaagatttccggcaggaaaaagctactgcgaccaatgcggtgctgagctaaaggctgtttctcagccggagccgtttgcaacaactcctgtaagcacgaatacccaagatgctccgtcgggcggatttgcggtgctcagttttttcttcccgatagttggcctgatcctgtatctcgtatggcacgacacactaccgctgagagcaaaatcagcgggaaaaggtgcgcttgcgggtgtaatcaccagtgtagggctgagcattttggcagtgctgctacagttagcggcttttagccggttgttttaatcatagagggggataccacatgagaaatagaattatcgcactggcgctgtgcgctgtgatgctgcttttgggcggttgcgcatcggatggagctgctggaaccagtggcaggacaacaaataataatgggcaggaatccaactcgccatccgcatccgggcaagtagcggcagacacaaggacatcttttgagaagctgtttgatgacggcccgctgctcgtgcaagaccctgatggatatggctgggggtatatcgacgccactggtaattatgcgattgaacctaagttcaaccttgcctatgaattccaagaaaacgggttggcgttggttaatgaccttgaaactaggatgtggggttacatcaatacctctggcgagtacgtcatcgagccgcaattctcggatgccacgcagtttgatgagaatggatatgcctctgttgttgtcgcccaaaccaaatgcggtggaattatcaacgaatccggcgagtatgtgatcgaaccggagcattacgggggaatcggcagcttctcagagggttttgtggtggctggatcgtctggttaccaatactatctcaacgaagctggagaggtgcagttttctctcaacttccaagaagcctatgattttgttgatggttgggcgatagtaaatcaccgaggcttcctcggctatatcagcactgaaggtgagcaccgcatattgagcgatgtaaaagatgtctttgggttcaataacgggcgggcgtttgtacaactggcaaacggtaaatataagctgattgatgagaacttggagtatgtcacggataccgagtttgacgatgtaccaatgtccaactcccttggtggcggcaagggtgccgccagatggtatgacggcatttgctttgtcggtatggagacacaactggcagatggaagtacgatgattggctattatgctatcaacacagatggagaaatcatattccccactgataataagcatattcgcagcattgatcagtttcgagaaggatacgccactgccctagatgcagataccaccaaatggggtatcattgacaggagcggaaattggactgtatcgcctcaatatgaaacaatagctatccccgtaaacggtgtctatctcgttggtaatatgtctacctcagactataaatatattgattcagacggaaatgtcgtgctggattgtgtgaaccctgatgtcgtattttccggagcctaccgagatattttgcaggtgagactccgcgatagcgattacggcacggtcaaccaacattatagctttgtcgattatgatggaaacttcattacagaccttatgtttgagaacgcaatgtccttctcgcttgattccagctatgccaaggttaagtataacggcctctggggtatcattgatggcgagggaaattggctgattgagccgcaattccagagcatcggcagataaggccgtcagattagagaggagatagccctatgagaaaaatagctttgtttttggctctatgcctgagtttatctttacttggcggctgtgcaaaaggtgacagcactacggctgcgcctccgtcaagcacgccggaagcagtcccctcggatgcggacggttcagagaatgagccgctttttgccggcgatcttgaagactatgatttctctgcgccagaggacaccgacgcttttgatttaccgttgctctacgcccagcctttctccgatggctacgcttgggtgcagtatgaggatgaggcgggtgccattgttacatctgtgattgatacgaacggcgctatctgcttctccctgcctactggcgtagagccgagttacatgagtccatttgcggatggatactcttactaccgtgtgggagatgcgtacgaaacctcctatgaagtcattgtggataccaccggcaacgagtgttaccgtacctctaactccgacggcgctaaaagttgggagcacatctttggacaagccaatgggttatttgctatttacctacaagaaactgggatggaagcagtaacgcacacaatttctatgacccaagcggatggcactgctgtctccagtttttccaattttggctcggagccgccatttggcgaatatcccctcaagtatagcgatacctttatttatcttggcgagggctggtatcagtttgatgggtgggcagaaaactacctgaactttgaccaacaacggatcgcgtattcttctcaggttggtgttttaagttgtttccgtgacggcaaaaccctttctgatagctcttccaaaggatttacgtttttagacgctaatctcaattatattgaagattaccccttagcaagtgtcagctatctggacaaggatgctgatggggggtatgaggtggttggagataatctctggcgttggaattcttcttacagcgctagcgataagtttacctactatgatatgtggggcaataaaatctgtgacgtgacggaatatcctgacctcaaaaagagatatcgcccattttgtggcgattatgctgtgctgtatatccaaggcgtggatggaaattattatgtgacagccatcaacacacaaggtaaaattatgtttgagccttatgaattagtagcagacggaagaacctcagatgaatacgcaggaggttatgtgcaaggggaatacataatcatccagacctctggcgaacagtattctttgatgaacatgaatggcgaacttgtacattcgatttctgatgacttccccggttgtgagatttctcaatttggaacatatagcgccggtttcttgggaatctactacaccgctgatggaaaagaatatcagaaatattatccggttgctgaagccgctgccgctggcgatgctgtatatgatatgggagagctgagaactgccacggaggacgaagaaaacgataacgatagcggaactggtacagaaaattacgattacacgtttattagtggcttctccatcgagggcaaatggaagagcgtcggcgaatccggatttgggcaagctcagccgggagcgattgttgcctttgacggcactaactgcaactttttcagccccaaggacacctatgcgttctaccaagacggagatacatataagttggatgtgaccagctacctgttcgcggacacactgatctttaccgtcaacaccattgatgaagaccgtatagtaatcacgagtgggcaaacggtgacggagctggagagagtggaataataaagaaagcagaggctgtggcgtgaggttacagtctctgcttttatgtttaggttattctaccgggcgaggcagcggaccgactggccggcgtagcggacgacgtagtaggacggactgacgtagcccgagacgaaggcgaggtagtagacgaagctagtactagagtgcgcagtagacgaccaataatcaccctcgtcgcctgcgctcatcagcgaccccgagaagacgtacccgctgcgtacgaagtataaaggagcagagactaaggcagtgctgccagcggtatcgtcgctaatgctataagcatcagtgagagcttggaaggagccggagttagagttgttggaggtggggagctgccaacctttgggacagatgctatccgtggcattggcactggtgatagtgccacctgtaccagcagtggccgcgttccaggtgtagtggttaccgacatgatagtgggcattgtaagtattaccagagattacatcagtagcattaccgtcagccattggcgtcatgccagcaacactttggaaaccgacgctggtacagtcgccgaagtcggatttaccactcgtgccgcaagaggtgccggcattaggggtggtcagaacataatcacccaggttccaggaccaaactgcggtgtagtcggttgtagttggagtttgggtgccgtcggtaagcgtatcgttgtcgggtgcccagcttctagaaacatcactatcgtccggcgtgaggaccttgctggtggagagatctaagtccaggttttgcgtcatccaacagttgccatctttgagcttggtgacccaatacttcttgccgtcacgagtgtcggtgagttgggcggtgtcgttctcggcagcgtcggcacagatggtgctggtcatttcctgcatagtttggataccgtcaaagactggtacgaaggcagggttagcgaccaccgacaccaccacatcattactataagtccccgacggaagtgaggtatcaaccttagttccaaaggtgaggttgtaggtatcagcttccgtaggggacgaggtggtgatgatggcggtatcgccagttgcggtggggacagccttgtaggcggtagcatcggacacagcttcttggctgaggttgtaaccccaagtgttgttggtaaagttagcagaggtgacgccattatcgccaccattaacggcagaaattacatcagaggtgccgggattctgactggtcagggtatttttaccattgccagtcgccatgtagagtgagtagccagtctcgttgttggtagaaatagaaagagcagcggtgttagagctgaaggtgccgtcttgagtcgggagaacgtcaacattgagggcgttctggagagaaatggagatgacggggttgacggtgagtttgactttgctggtggcctcctcggcctgagcagtctgcggtaaagtgggaaataccattgcccccagaatcaggagcgtgaggaggctagcgcctccaactagtaaatgtgtacccccccctattttgctgtaaccgcatagtgctgatattccctctttcttaacttaggcatgacctttttctatttctactttacattagcgctttagtttggtcaagtagattatcgtgtagtggcatagaaaaaggctgtatcatcacaaaaatcgtgtagataccaataaatatgatacaatcgtgtatatagtgtagatggcaatgcaccatggtgattttttatcatcgctgacgtcttgacacatagcaaaaccccttggaagttacttccaagggggtttcttttttccacatttcgacgaaatggaaaaatattctaaatatgtcttgacattattgtttgctatgctatactaagaatatcttgtaccacaacaagagacattaggttactgcgatcaggcagtatgcctcagagctccgccctaaccacgttttgtggttggggcgtctttgcattttgggagggatgaagatggaatataccattggtttggatattggtgttgcctctgtgggctgggcggttttgaccaacgattcccagggggagccttgtcacattcaggatttgggcgttcgcgtttttgaagctgcggaacatccccaaaccggtgccagccttgcagcaccccggcgggaggccagaggagcccggcgaagaatccgccgcagacggcacagaaaagagcgtatcaaagctctgctggtcaagggtggtgtcattacacaggaggagatggaccgcctgttccaaaactccggttttgcccaggatgtctatacccttcgggcggaaggtctggaccgctgtcttaccccggaggagtggacccgggtgctgctccacttgtcccagcgccggggctatcgctccaatagtacggcggaggcagccaaggataaggagaccggtgttctgaaacaggcactggcaggaaaccaggcactgatgcaggagaagggataccgtaccgttggcgagatgttctgccgggatgaaaaattcctttttgtggggccggacggaaaactctggcggaaaacccacaacacccccggggattacagctttaccatcacccgggaaatgatacagcaggaggcggccgccctgtttgctgctcagcggaattattccaatccctatgcagacgaggcgttggaggagcagtatacccagattctcctgtcccagcggcattttgaccagggaccggggggcaacagcccctatggcaagggggatttgcggggcttctgtacctttgagccccaggagcggcgggctttcaaagccacctataccttcgagtattttaagctccttcaggatataaaccatatccgaattctgtcccccagcgagcccacaaggaagctgacccagccggagcgggagcagttgatttctctggcgatggagtccccctctttggattttgccagagtacgcaaagccctgaacctgccgccggcgtgcagctttaatgtggttccctatgagagggataaggaggaggcggagaaaaagcggaagtttccccagatgcagagctaccatactctccgcaaagccctaaatacggtggagaaaaactacatcacccacctgacctatgcccagctggatgagattggcaccattctcagcttgtataaggcagatgacaagcggcaggaggggctggaggctctgggactgagccagcaggtgattggggccttgctgcccctgtccttcagcaaggcgggaaacctgtccctcacagctatgaagaagctgattcctttcctggagcaagggatcaactacgatgaagcctgccgggaggtttacggagaccaccggcgcatggcaggggaacagcgttaccggtacctgaccctgaacaaagagctgtgggacagtggagctctggacgccatcaccaatccggtggtgctccgggccctgtcccagactaccaaggtgctcaacgccatcatccgccggtacggaccgcctcagcgtatctgcatcgagctggcccgggagatgagcaataactttgaccagcggaacaaaattcaaaagcgaaacgaagagaatcgtgccaaaaatgagaagctgatggagcaaatccaaaagctgaagaatgcccgtcccacaggccaggatttggtgaaattccgcctgtatcaggagcaggacggtatgtgcctgtattccggcacccagctggatatggagcggctgtttgagccgggatatgtggatgtggaccacattattccctatagcatttcctttgatgacagcaaccgcaacaaggttctggtgctggccaaggagaaccggcagaaggggaaccggattcccatggaatacctggcctccgacccggagcgccgggagcggtatatcaccctggtggagcggtatgtccgggactatcggaagcggcagaagcttctgaaggaaaagctgacccccgaggactgccagggcttcaaggagcggaacctggtggatacccagtacattacccgcaccatttataacctgctgaaggattacctggagttttccccctctgcctccaaaacctctgtccgggcggtaaacggcgcagtcaccagtcatatgagaaggatgctgggacttaccaagcaccgggaggatggggatttgcaccacgccatggatgcggcggtggtggcggtgaccacccccggcatgattcagaaaatttcccgctatgcgaagcgccgggagctggggcagaaggttgtaggcaagtatgtggacccggagaccggggagcttctttcccaggcagactttgacaaaaaatatgccccggaatttccggagccctatgatggtttccggcaggagcttctggcccggctctctcccgacccggatacccggattcgggagctccacctgccccactacgatgacggggaggaaatccgccctgtgtttgtgtcccagatgccccgccggaaggtcaccggccccgcccatgcccagaccatccgcagcggcagggagccgggctactccctgtccaaaaaggctttgacggagctgaagctggacaagaatggggagattgccggatactataaccccaaagatgatgtgcttctctataacgccctgaaagcccggcttcaggcttacaacggcgatgcccagaaagcctttgcccagcccttccacaagcccaaaaaggacggcaccgacggtccggtggtaaacaaggtgaaaatcctggaaaaatccagcctcaatgtttccacttgtgggggtatagcaaagaacggagatacggttcgggttgatgtgtactacataccggaggatggatattatttggttcccatatatacttccgatgtagtaaaaggaacgcttccgaacagggctgtggtggcacataaagaatataaaaattggaagcctatggaggaacgacactttcttttctcgctttacccgggagatctggttcgggtggtatcccaaaagcctatcaatatgaagctgaaaaacaaaaagtcccagggggaaccggagcttcttcgtaaagagtggcttggctattatgtgggtatagatattgcctctgcttgcgttgatattacgaatcatgaacgcaaatatgagaaacacggtttgggtgtcaaaaccttgctggcatttgagaagtatcaggtagaccccttgggtgaatatcatccggtgcacttgccggagaagcggcaggacttttgaaagggggagggcaccatggaatttcgctctgtgttcattgccaacccggcccagctctccgtccgtagagggcagctggtaatccgccaggagggggagtacaccctgcccatggaggatttgtccgccctggtactggagtcccgggcggtatccctctccgccgctgcccttcaggagctggcagaccagggggttacggtgtacctgtgcgatgagacccatatgcctgccgccctggtgctccccatgaaccgccatagccgccagcgaaagctcctgcaggaccagatagacctgtccaagcccacccagaagcggctgtggcagggggtggtcaccgctaagattgccaaccaggcccggtgtctgaagcttctgggccgccgggagggggcggatctggcctttgtggcaacccaggtgcgctccggggacccggataatctggaggcggcggcagccgccgcctatttcccggccctcttcggcccgggctttacccggggagaggagtgtcttgccaatgccgccctgaactatggctatgccattctccggggggcggtggcccggaacctggtgattcacggcctggagccctgcctgggtattttccaccgcagccagttaaaccagtttaacctggcggacgacctgatggagccctaccgtcccctggttgatttgtatgtcgcctcccacctttcggactgggagggagaaaccctcacccccagggttaagcagcagctggtccagctgatgagctacctggtggagcagggtgggcatcgttaccgggcaatctccgccattggccgcatggcggagagcttcagccggattgtccagggcgagaaggagagcctggagctgccggagcttcttcccctccagccccatacctatgagtaggcttatgcggattctggtgtttttcgacctcccggtgaaaaccagggaccagcggcgggcggccacccgcttccggaattttctcctgggagacggctaccatatggttcaatactccgtctatgcccgggtgtgcagcggcatggatgcggtggcggtgcacaaaaatcgcctggcgctggcggttccccgaaggggggcggtgcgggtgctggtgattacggagaagcagtacacccacctggatatccttctgggggagcctaccccctatgacgccccccagcaggacaaagacctgatggttttttgaaaaaaactcctcttctcaggtaaaacccctatgaaaaaagagaaaccctgaagcctctgtttatcagaagcttcagggtttctccctttttctgcttttcttcggaagtatacccgttgaaaagttggctttttggcagtttcctaaagtctaattataccacaacaagaaacattagggaactacaacgatgtttcacctgcatacgccggtgaatatattataccacaacaagaaacattagggaactacaactttatttatggcctcttgtaattgaaaaataattataccacaacaagaaacattagggaactacaacccaactatccggagacgttccgggagtttaattataccacaacaagaaacattagggaactacaacctgcttttaccaataccgcccggcagtctgattataccacaacaagaaacattagggaactacaacgctaaaatatggattctcttttctctgctaattataccacaacaagaaacattagggaactacaacaatgtggatcatgctacgaatagcaattacattataccacaacaagaaacattagggaactacaacctggagggcattgatgacagcaattccgctattataccacaacaagaaacattagggaactacaacggttgtgaccatgagcacctccggtatgtaattataccacaacaagaaacattagggaactacaaccttcttgtttacaaccgccacaaccaggcaattataccacaacaagaaacattagggaactacaactgtttaaccggtttgtagctggctttatgtattataccacaacaagaaacattagggaactacaacaatgtcggagaagtccaccagcgtctccagattataccacaacaagaaacattagggaactacaacgccgtctgctggtacaaccacggcaacttaattataccacaacaagaaacattagggaactacaacgcggggatgttgatatacgattctccgttaattataccacaacaagaaacattagggaactacaacctggcagacaatactatgcgccgggtaatcattataccacaacaagaaacattagggaactacaactttggcgttgaaggcgattttcttcacggaattataccacaacaagaaacattagggaactacaactgtgcgcgacctgccgacacctttattataattataccacaacaagaaccatcaggaaatcctttttttcgcttggtcacaaattatctacatttttctgctaccataccctcataaaggagcgtgattccatgagatatgcagttgtgtttgccagcatgacgggaaatacccggcttttggcggaaagaatgaaagaagtgctgccccgggagcagctgatttactggggagaaccggcagaggcggcccgggaggcggatgttttgttcgttggctcctggacggataaggggacctgctgtccggccatcggagattttcttcggagcctggaaaataaaaaggtgttcctcttcggcaccgccggattcgggggagcccaggcttattttgaccagattgccggaagaatcagggagaacctgccggaaagcaatacccttctgggctatttcctgtgccaggggaaaatgccccaaagtgtccgggcccggtatgaggccatggagcaaaacgagagaaccaaagccatgcttcaaaacttcgatgccgccctgtcccatccggatgaggcggatttgcaggccctggaacaggcggtttcccggtgccttacccagctttgacaccttcccccgaggcaggagccctgggggattttgtccttccggcgcagaccaatccattgactttccctgggatttgtgataaaatgacaaaaattcgttgcagtgcataggaagctatgccgggaatacggtgcaaatccgtaacagtcacgctgctgtaaggcggacgaaagccagattgccactggggaaacccctgggaaggcaggcaagtaggaggaagccaagtcagaataccgactgcaacgccagatggacaaaatcctttcggcgaaaaaggatatctgaccaaaagaaccctgtgtgggggtagtatatctttgccttttttgcctttgtagattttttatctataaaggctttttattttgcttgcaggtggtgaaagccgtgaaaatactggtaaccggaggctctgccagcggaaagtccgctgtggcagaggagctttgtgtaaagctgggaaagcaaacggcctacatcgccaccatgcagccctttggaaaggatgccgcctaccggatagaccggcaccggaagctccgggaagggaagggctttctcacggtggagcagtacacggacatttccaaggcagcggacaagctgggcagtcaggcagacaccctgctgattgaatgtctgtccaacctctgtgccaatgaaattttctccccggagggagcggggcaggaggcggagcaccggattgcccaggggattgcggccttgggagatcagtatgaaaatgtgattgtggtgaccaacgagattttctccgacggaattgcctacccccgggagacccaggattacatccaaaccctgggcaggctcaatgcccggctggcccggtgggcggacggcgtggtggaggtgttctgcggaatccctctgtaccggaaagacccggagaaccgggtgaaaggatgtatggaaacatgaaaaaaatcctcagcagctttgccatttgtttttcaacctattcccggattcccatgccccacgtatcctgggaagcctccaatatgggctatattttcacctttttccctctggtggggctggcagtgggagcagtgcagctgctctggctttggtttgctcagaactttgccgtcaacacccttttgtacgccgtggcggccacggtgattcccattctcattaccggaggtatccacttagacggctatatggatacctgcgacgcccttttttcctacggcgaccgggaaaagaagctgcaaattatgaaagaccccaacgccggcgcctttgcggtaatctactgcggcgtgtacctgcttctgacggtgggactgttctcccagctgtacggcgctgccgattggaaaaccatggcatttctgggactggggtatcttctcagccggagcatcagtggctcctttgtggtgcggatgacctgtgccaaaaattccggccttgcctacctgtttcataacggcgccgaccggaaattctcccaggcagcccttacggtatgggctgtcctgctcctggtggccttgttccttttgtactggcagcgggcgcttttcaccctggtgctgctggctctgtggattttctggtttacccacatggccaggaagcagttcggaggcattaccggggatctggcaggctttgccctggaaatttccgagcttctcattttgcttgccacggtaattttgtaaaaagaggggaaagactttgaccatactgattgttggcggtgcctgccagggaaaacgagaatatgcccaaaaagcctttggcctgaatgaaagggaaatcctgccctggaatgaagagcgggaagcggcctcctgcattgcagatctgcacctgcgggtgcgtgcctgcctggagaagggactgacccagcaggaggttctggagaagctgctgcctttctgccggggaaaaatcgtcctttgtgatgatattttctgcggcgtggtgcccctggatgccctggagcggcagtggcgtgaggtcaccggacggcttttgtgcaggcttgctcaggaggcggattcggtgattcggatgcagtgcggtctgccccaggcaatcaagggggaactgccatgaagaaaattcttttgattcgccacgggaaaacccagggcaatctggagcggcgatacatcggaagaaccgacgagcctctgtgtgaggatggtcgggctgccctggaaggacgttcctatcctgcctgtgatatcctcctttccagccccatggtgcggtgcctggaaaccggagagattctctaccccggaaaacagccggagattgtcccggatttgcgggagtgcgactttggccgcttcgagggaaagacctatgcggagctttgcatcgacccggactatcagcggtttttggacagtaacggcaccggggagattccccaaggagaatctgccgcccggttccgggagcggtgcctacggggcttccgacaggtgctggagattctggacaagtcccaatggcagaccgcagcggtaatttgccacggcggcaccatcatgtcggtgctggatgcctatgacccggagcacctgggattctaccagtaccaggtggaaaacggcggcggctacctgggctattacgaggaagaaaatcaccgcttttcccggtgggaaaagctttccggaaagagagaagcaacatgacaatggcagtaattttggcggcggcctttctaatggacgtcatttttggcgacccttactggattccccatcccatctgcctcattggaaagctgatttcccggggggagaagctgctgcgaaagctctcctgtaaaacccaaagaagccagttctggtgcggagccctgctgacggtttgctgcgtgattgtgtgctttttggtgccctttggaattttatggctcctgggaaagattcattggggcttggcgttggcggtagaaatctggttctgcttccagatttttgcagcccactccctgaaaaaagagagcatgaaggtgatgtaccccctggaaaaaggggatttgccccaggccagaaagtacctttcttacatcgtaggccgggacacccaggccttgtccggggaaggggttgccaaaggcgctgtggaaactgtggcggaaaacaccaccgatggggtgattgcacccctgctttatatggccatcggcggggcatccctggcctttgcctataaagcggtgaacaccctggattccatgattggctacaaaaacgataaatacctgtactttggccgtttcgccgcaaaaaacgacgatgtgtggaactatatccccgcccgactcaccgctgggctcatgattctttccgcattcttgctgggctatgacggcaaaggggcaattcgaatttaccgccgggaccggagaaagcacgccagccccaacagcgcccagacggaaagcgtgtgcgccggggccctgggtctgcagctggcgggggatgcctcctattttgggaaggttcatcataaacccaccatcggcgacccggttcgccccatcgaaccccgggacattgcccgggccaaccggctgatgtacgccacctctgtcctgggcgtcatcctggctgttggaatccacctggccttgtggtattttcttttccggtaaaaaaggagaaaacagatgatttatgagcatggaggggatatttattcccagctggaaaaaggcgtgaaaatgctggatttttccgccaatattaaccctctggggctgcctccccaggtgtccgccgccctggcttctgcccaggcagcggccacggtgtacccggacccctattgccgggccctgtgccggagcatcggggaattttacggggcctccccggagaaagtggtctgcggcaacggcgcagcggacctgattgaccggattgcctatggcctgaaacccaagaccgccctggtcaccgcccctaccttttccgagtacgaaaaatccgtaacccgggcaggaggcgtggttttccgccatattctgaatgaaaaccggggctttgaaatcggggaggatattctggaggcaatccgggaaaaaaagccccagatggtgtttctctgcaaccccaataaccccacgggccttctgacggaaaagcccctgctcctggaaattgcccggctgtgccaggatttgggcaccactctggtggtggatgagtgctttttggacttcaccgggaaggaaagccggtattcccttatggacagcctggaggactttcccgacctgattatcctgaaggcttttaccaagtttttcgccatgccgggaatccgcctgggctatctgcttactgccaatccccactttcgggaggcagtctgggcagccgggcagccatggagcgtctccggcatcgcccagacctgcggcattgccgccttgaaggattcggcgtacatacaaaaaaccctggaggaaatccccagactgcggcaggagctggtgaaagccctgacacccctgcccattaccctatacccgggcacggcgaacttcctcctgttccgttcggaccatcctgctttggacaaaaaaatccaggaaaagggaatcctgattcgcaactgcggcaactatccgggactgggggagggattttaccgggtggcggtcaaatcccaggaggataaccaaaaactgtcagaggccctgactcaggtgcttctgtaaataaaaaaggggagtatggaatgatgttggactgggagaaaatcaaagaagaactcaccggcctggatgagcaggccatggaggcagcccgtgagcggcagctgcagctgctgaagcccgcaggcagcctgggacttctggaggatatgagcatccagatggcaggcatcaccggaaaggtgaaaaaccgcctccataagaaaattctgtttctgttcggtgcggacaacggggtctatgccgagggcattgccgcctctccccaggagctgacccataccctcatggacttttacgcccggggcatccagtgcggcatcaacgtgatttgccaggccaacggcgtggagctgagactggtggacatgggcatcaagggcgaattccacagccccaacattgacgaccacaagcttatgtggggcacggacaattttgccaagggtctggccatgccccgggatacggtgcttaaggccatggaagtgggcttctcctacgcccggtacgccaaggaaaaggggtatgatatcctgggcaacggagaggtaggcatgggcaataccaccacggcggcagcctgtatcatggcctgcctgggccttcaggacccggaacaggcagtgggccggggcgccggactgacggacgaggcctttgcccacaaaaaggaggtcattgccaaggccctggaaatgcacaagcccgacgcctctgacccggtggacattctcagcaaggtaggcggactggatttggcagccatgaccggtctttacatcggtgccgcctattaccgccttcccattgtggtggacggggtgatttccattgccggagcgctccttgccagccggttttctcccattaccagccaattcctctttggctcccatgtatccaaggagccgggctacgtgctggcagcccaggcgctgaatctcaagcccatgctcatgctgggtatgcggctgggagagggcagcggctgtccggtggccatgacggtgatggataccgccatgagcgttatgtgcaatatgaacacctttggagaagaaaaggtggaccaggaataccgaaaagacattaaagcagactgagtaaggaaggaaatcggaagatttatgaagaaagctctgttggtattgagcttcggcaccagcgtgccggcggctcgcaaaagcatttttgcggtggaagaagccctaaaggcagtctcagaccgggactttttccgggcctttaccagccccaccatccgcagaatcctggcccggaagggtgaaacggtctggagcctgccggaagctttggaggctttggaggaaatgggctatgccgatgtggccatccagcctacccatcttctctacggctatgaatacgacaatatccgggaaaccgtaacccagtggaacggtcgttttccggtgctgcgtctgggtcagcctctgctggcaacccaggaggatttgttctgtttggcggactgtgtgacaaaggcctacgccccggaagatggggtgctggttctcatgggccacggcactgcccactttgccaatatggtgtaccctgctttccagacggtgcttcgcagccggggacatgaaaatgtgctggtaggcacggtggagggctggccggattttgatgaggtgcaggccgggcttcaggcgctgggcaaaaagcaggtgctgctggcacccctaatgctggtagcgggagatcacgccttaaacgacatggcaggagaggacggctggaagggccagctggagcaatcgggtttccaggtgtcttgtatcatggagggcctgggcatgctggagcctatacagcagatgtacgctgccaagtgcaaagcccttttggagaacgaacatggcctttgagcattacattcagtcgggaggtaagcggctgcggtgcggctataccaccggcacctgtgcagccctggcagcagcggcagccacccagctgctcctgaccaaagagcctcccaaaaccatggggcttatgacccccaagggaattttcgtagaggtggaaatttctcaaagttccctggaagaggggaaagccacctgcggcgttgtgaaggacgccggagacgatgtggacgccacccaggggctgctgatttgtgcccaggtggaatcctctgaggcgccgggcatcaccattgacggcggcctgggggtgggcagagt

SEQ ID NO: 1964 - DNA, 23240 bp, synthetic construct
  source 1..23240: mol_type = other DNA
  misc_feature 1..23240: note = Synthetic
tattcttccatcagctgagcgacagtcataatctctctggcaagctccggctgtgcatcggcatcgaccaatgcaggtggcggaagcagtgtgccgcgttttttctcaagaagaatctgagagatacgcagattggcttcttcttcactgtcaaaggattcatgaatcaaatccggatagcttgggcaccgatatgtaatgcggaatttatttccgtgtttgataggtttcatgacaataagatgctccttggatgattgattcatccgtaccatacaagcctcctttgctttatcagagcatttttctggtgtcgaggcaagtatagcacggatcatcagctgcggcaagctaagaatttaaaaacttttccaacgcagagcgtggaatgcggatgctcttgccgatacggatgctgcgaatatttccagactttaccagatcataagcagcattccgcccgatatgcagcagctcagccagctcttgaacggtgtagacttcttgatgcatgtttatggtgtatatcctccttcctttttggaatgctgccaatatgagagaataaacagattaaaattaaaggcttaaaaataacgaaaaacaaagaaatattttatactttctttgttttatgcttgaaaaagttgagaaaatattttatactgagtgcaagaatgaaaagaacgaaagaattaaatattacatgtaaaggatgatgagatgaacttaaaaattagaattgaatgctctaaacacgattgggaaaagcaagaggagattcagttattaaaagaagtgctcaaacggtgcggaatttctatgactcagacggacagcatttccggtgagatggcgtataagctgagaggaaaagaagaaaagatctgggacaaaatgacgcgcggagcaggtgcgagagcgacaacaaaacagttgaagattgcaacgattttagagattgaagaaaaatataaaggaatgcccaaagaaaaagaagcggcgttggctgcttgcgaagtaaaactgagaaattatcagttgattaagcggaatatctgcgattgctatggagatttagaaaaggcgattcgacgcggacatatttattttgtgcgggtaaagaaaacgaaataattaacatttcacttttgcagactggaaatgtatgactagtataagtaaaaaaatgatgtttcaaaaaaagtttggaaaatagataaaaatgagaaacttttcaggaaagacgactggaaagtttctcatttttttctaattttattgtttcgattacacatattccgaacgaaaaatacaatgggaggatgataggatgccctcctgtttttatgtggatacagaatagctgcatagaagcgcgcggcaaggcaggctgattgaccagctgacagacatgaaaactatgtctgtcagcaaagagcaacatccgtaccaatatccggttacgcggacacaacggtgtacgagtaaacggtgatattggaaaaataaaattttccgctgtttagaacagaggaaaaaatcagacgattggtgcataacaatcgaaaaacaataagagtgcagtgcttcgcttcaacgtcaggtattcacatcagactacagaacaggatggaaaatatgggacataaaaataaaccgaaccgcggctccttggtaaaacaggtgcaggatgctttagatgctaaactgcaaattgggagaaaaaagaaaccggacaagcttgctggtattgcgcaagactatatttacagctgggagacataccgtgcttacctcaagcattgctgctattttgtaaaatggtgcaaagaaaattacggctgcaaaacaatagaagcatgtaaacaacatgcttccgaatggatgaaaacaagaaaacatttatctgtttacacacagaaattagaggcaagtgcgctggtcaaattatatggctgcaccttagaagaactgaacattcataccgcagccagacgacgagccgatattatacgcagccggaacgctgtcaaacgagacaggcattttagtgagagcaatcatgcggaattggttgctttttgccgtgccactggcttgcgccgtgcagagctgaaagccttgcgcggaacggcgttgtatcaggacaattccggctattatttacacattacgagcggcagcaagggtggacgggaacggtatgcgccgattattggagacaaggagttggtaattcgtctatgccgtcaagccggaacaggaaaagtatttgaaaaaatcccatccggtgcggatattcacagctatcggcgggattatgcgacagcagtttatcagcagcacgccagaccgctggaacagctgatcgcaaaagaaaaatactactgtcgcggcgaccgaaagggagaagtttttgaccgagcggcgatgcggattgcgtccaatgcgctggggcatgggaggattggagtgatcgcagggcattatttgaaggagaaaatataatggaaaaatttttctaataatgattaaaatagtatacgacattatagttatgttggttgagaggaaaggaataatatgatatactaaataaaattacagagtatttaaagaactcggtggaaagtgagacaagaacattggaagtatcgaagaatatacaggcaaaaccaatattgaaatgggccggcggcaaaacacaaatgttaagtgatctcattccaaaagtgccaacttcctatggtcgatatattgaacctttttttggtggaggtgcgatgttctttgcattacaaccagaaaatgctgtaattgcagacagcaatccagaactcattaatatgtaccgtcaagttgcagatcatgttgatgatgttattgaatgcttgaagatgtatgaaaatacaagtgagatgttttatttggttcggggacaagactggacaaagctccctaaagctcaagccgcagcacgaacaattttcttaaataagacttgctttaatggtctataccgcgttaataaaaagggacagtttaatgtaccttttggaaaatataagaatccgaaaatatgtgatgaaaacggtttgcgagctgcatctgagattttgaaaaaggctgagatcatttgtggagattatctcttagttttggagcattatgcacagcctggtgattttatattccttgatccgccatatttgccgatctctgattattctgattttaagcgatataccaaagaacagttttacgaagaagatcatgtggagttggccaagatggttatgacattgcatgagcgaggctgttatgtcattttgacaaactctaatcatcctctggtgcatgagctttatgcgcattttactattgacgtaattcaaaccaaaaggcatatttcgtgtaaggcaaacatgagaaaaggcgaagatgttattgttacaattccgcctaagcgtatgcaactcaagctagttccagaaccactgtcagaacaggtgtctgcatacccgccgaccagattcatgggctcaaagagcaaattactttctgagatttggaccgttgcatcgcagttcaatgtgaataccgtggtggatttattttctggatccggaattgttggctatatgtttaaggcacaaggcaaatcagttattagcaatgattacatggcaatgtctgcaacatttacaaaggctatgattgagaatagtacagtaattttgcctttagaagaagcaaaaagacttcttgttgcttacaaaaaatctgatcgatttgtttctacaaagtttcaaggattatactatactgatgaagaaaataacttaattgatactcttcgcactaatattgctgcaattcgagatccatataaacatgcgattgctatgactgcacttattcgcgcctgcattaaaaaacgaccaagaggaatctttacctatacaggacatagatatgatgatggaaggaaagatttgcagaaatctctggctgaacaatttttggatgcagtcgaagcggtaaactgtgcggtatttgataatggcaaggtgaatcgctccaaacatggtgatgctatgagtctacgaattgaacaagctgatttagtctatatcgacccgccgtattattcgcctctttcagataatgagtatgtgcggagataccattttgtagagggactggctcgcgattggaagggagtagaaatccaggaacacacaaaaaccaagaagtttaaatcatatccgacacctttttctacacgcaaaggtgccgcagatgcttttgacaagctctttaagaagtttgctaatagtattttgattgtatcctattcctctaatagtctgcctacgcaggacgagatggtagcaatcatggcaaaatataagcaacatgtggaagttgttccaatagattataagtattcttttggtaaccagaataaagccaaaacccacagaaattctgttcaagaatatttgtttgttggatattgattgggggttatagaatgaataagcagatagatatttggttggtaggcaataccggcttgcgtaatccaaaccgtattcaggatggattcaaagtatttgctggttctccatttgtaggaaatcttcatggaaaagataatgaaattggatttatgaactatctgaatgaaaagaatattattcagaataaggatggaaaagacgaatccggaagtcatgcaagaaaatggcgtctgatgtttgccaaaaatggctttatctatccgcaactcaagaaaaaggagggaaaccaagaagaacttggcattctggatgatattactccttttggcagatcattcttgaaagctgatacctatcctgcggtacaggaatgctatttgcgtgcaatgagtgtagagcaagagtctatgcctgatggtatccaccatttttcaccattaagatggattctcgctatcatgttagaactcgaacgtcgaactggaacatcggagcttagccgtattgagttttcgttatgggggcatacaaccaatcctacatacgatctcaacgaagtagttaataacatcctcgatctaagaaaacgtagagctacagccccttcaaaacgtaaatttgataaaaaagaagttgcagaacgggcgaagaactacaataagaaagccgacaacttctttcagtatagcgatatgaatatgcggtatctccgcatttccggtctgcttcagcgtaaaggcagaggtctaattattgttcctaccaaacatgtattagctgaacaacttgcaaagagtactgctagtgcggaaccgattatggaacagtataaaattctatgcaatggtgcaccgctgcctacggataatattgaaatagcaaaagctttactggatgatctgattaagaagatgaaggagcggcatattgcatttgatatttcagatttaccaatggatactcctactgagattaatattgcaagacaacgacttgaaaatatacttgcacagacagatgaaatccagtatgccaacgatcaatgtaatcattggcaagaaattgctgattatatgtcacttctcattaagggtggaggaaaacaaatttacgatgaagacaatgctattgaagtacccaaagatgaaacaccagtgtatcttgaatggacactctggagagctgcacttgcaatcgaccatatgatgaataaaccgtatgaagtccgtggattcaagctggattctgactttatgccagtttcgactgctggtggcggaaagggagatctgtactgtgaatttcatgattttacaatcctcaccgaggttacaatgtctacttcttctcgacaggaagcaatggaaggtgagccggttagacgtcatgtatctgatgcagtgttaaaatataaaaagccagtatatggtatgttcgttgcagttagaattgatactaatactgccgaaacatttcgccatggtatctggtatgcaaaaggagatataaaacagcgattggatattattccactgactttggaacaatttaaaaaatacttcgtcgctatgtttgagggaaagcaagccagaccggaacatctgcgcaatctaattttggaatgtgaaataaagagagatattttagatgcccctgcttggaaacaatacattgatactgttgtgactggacgggcgtgcgagataaaaaaattgatataaagcgtgtggactattataatgctttttggagatgcaatttgctatcaagtgggtagtaagatggatattaaacgaaaacaaagagaaactatgtctgtaataatcgtaaattgattgcataatagtgtaaattttgatttgaatacaggagaataaaaagcggaaaaactttttcaaaaagaagatatactgttaaaatcggtacattcgctttgctcaagcataataaaccgcgagacatgatgttgcatttttttaaacacttcgaaagcatcgtatattggaaaagagaaaaaatactatttttgaaagagatagatgatcagacaaatgtacttgtggtaaaaagtaaagtttgggctataatgaggaaaatagttttctatgatgtattaataaaatcagaaagtatcaagaaattttatgagagcaatgaagtgatcggttttgataaaagtgttaactgagattctacgtaaaaacgaatgcttggttggaacaaagagcacatatgaaaaattgataaaatgtttactagagaagcattgttatccgcttgagaagcaagaaaatgtgattagtatcgttactagctagtgcaaaatatggataaataatatggctatacttgattggaaagacggcgataatacagtgaaaacacgtagaataaaattttatagcgcaggagattggtcatgtaaagactctttaatagaagctgagaaaatattggattcattcgatctgcaatttgaatatgcggatataaatgatgttttagagttatacaacattcaattgttttttagagaaggagtatatttatgtgaatggaatatggagaaacgaacgcaatatagaagtttgacagaacaattctcaaaagtgattggaaaatttgcaagtcaattgtgtgatgataatatcattgagcatgtttgtaaagtaataaatgaatatacagattcattttgggatgtatttgaaaattataaggtgtataaacatatatctaagcaaacattcgctaagatattgaagataaaaaaggagcatatatcggtcatattgactcatcccaaaactgttgagttgtatggaatgaaaattgcagagttgtttaaacaaaatataggattaaccaaattactattgaattggtattgggctgatagattttcaggaatagaaagaagattaatgttttttccaaaacaattgacgataaaggatagattggagattgttagcaagtttattgaagaatcagtaggtacagaatatttagatttgatagctaattcgcataatattaaaaatgaattagaaattcctgataaaatacgtcttcaagcgcgaagaaagagcgaagattggaaacaggagtactttaagactcatgaaggtataagttacaatactactgttcagtttaatgaacaacagaaagagactatagagattaaaaatgagggaggaaggtgtgatatttcatacggaactcagtttatacgagaaaatttagactatcctacattgctaaataatattatttatttgtttgaatatacagatttatttggcagatgccaacttgttcataaacattaccaattgggtattttagaaagaacgttgggtgtgcatgtgaagaatgaatactacacagggggtgcatttgagcaacgtcaagcaattgctgatatgcaactaatgggatatataaatatattgaaacaatatgatattgaccttgaaaatattataacttggttctataaagattatctgcaacatgagtttaatattcaagggtttgaacttcacatgccatctaaacaatctacatatttggaaaaatgtaggacaatctgtgcagaaattgagagcatattgaaacaatacaaatatttcgtagaaaatggaattattgatcaagatttgattagtatgaactctacaccgatatctataaaggatattccaagtttgaatgctactaagtatatttactcatccgaatcttcagagatattaagaataatgaagtcggtattttcggatcagagtataatttatagtgaagatatgcgcgataatttttatctgactatgcgggataaatcgtgcgaaaaatatgaatttgaaccgcagagtgaactggattggcttatacaacacgatattctagaagtacgaggaaaatatcttgtttggaagtcaagtgatatggtgactttgttacaagacttattctataatgaagtcagtccgtatattttatggaaatataaatctattacagtaactcatgaagcatttaagagggggtggattagattcggcaattctcttttatcagagccagaacaagactattttaattatatattgaatagaaaaaatttcggaaatagtttggatttacgaaatctttatttgcacggaacacaaggacatgatgagaaaaaacatgaacatcattattacaagtttctggaactgttgattgtaattacgataaagataaatgatgatttgtgtgtttatgaagaaaacagtgaaaatatctgatactaaagtagacgtgttttgagaaatgtatttatcgattgcgtgaaaacaaacgagataacatggaaaattggaaggataaagttcagattgaacagaatggctatatggacaatgtagctcaacttgtttgatgcgaaaacaagaacagcattaatgaaagcaatctatactgtgaaagataatgcggttacagttggatgataaaccaccggttgaaaatgatactattttttgtaaaaacaacagtgataaagtaaaaatctgaaaaaacaagcacggcttttacaccgtgcttatttacatattgtgtttatctgttatgcctattgaaaataagaaagcaagttgaaaattgcagctggacaaacatgagcacgttttattcttttgggaacacgctgggaacacatttccgcttttcgtggaagcaattcgggaacaaacaggataaaacgggaggatttgggaacaacgaagttcagagaaatctacgattcgtacagaataacacgatataacaccagaaaaagttcgataaaacggtcagattgctgttggtaaggatgaggtcggcagttcaaatctgcctagcagctccattagaagcctgatttcgcaagaaatcaggcttttttggtacttttgaagccatttaataaattgagttttgttcgtgggaacatttgggaacaaacaggagtgattcctatttattgcctttcaaaatgtgagacatttgcagaagtgaatctgcgatctccggcgaactttttagcagctgaatcagctgtttcgtggaagaatccatggacagttgggcggctgcttttttgctttctggggatgttaggaagaactgcgctttcatttgctgtgccagatgcttgcgactgctatccatgataaggtaatacagcttgatttttttgcagcaatatggtattataagtatactatcttatatcactacgagagaatgcagatgtttttcttataccactacgagaaaatacaggttactgcaataaggtagtacaccacaagctctgccccagccgtcaaacgtgctggggtattcttgtatctaaataaaaaagtagagggggaaattctttgtcattacgttatactttaggacttgacattggcattgcgtctgtcggatgggcggtgcttgaaaataatattgatggcgaaccgattaaaattgagcgtttaggtgtccgaatttttgataaagcggaacaacctaaaacaggagcgtcattggctgagccaagacgagaagcgcgtggtcagcgccgtaccattcgccgcagacggcaccgcaaagaccgcatcaaacagctgattcaacagaatggcatcatgactcggattgaaatggctgaaatgtttgaacatctacaatttgaaacttctgtctatgaacttcgtgtacaggcattggaacgtgcgctgacaaagcaagaatttgttcgcgtgttgattcatctggcacagcgcagaggatacaagtctaacagcaagtcagaagaagccaaggataaagaaaatggcaaagtgaagagtgcgatttctgaaaacaaaaagtgtatggaagaaaatgggtatcgcacgatcggcgaaatgcttctgaacgatgatcggttttgggaatgcaaccctgacggtacaaaaatttttgtgccgcataatcatcctgatgattatcgaacaaccgttgaacggtctatggtagaagatgaaattcaattgattttctcacgacagcgtgcattaggtgtaccttatgcgacatcggaatttgaagaagcatatctggaaatttggggaagtcagcgcaattttgatgaaggcccaggtggaaaaagtccgtacggcggaaatatgattgaaaaaatgctcggacattgtacgtttgaaaaagatgaaccgcgtgcagcaaaaggcagttattccgcagagtattttcggcttttgcaggatgttaaccatctgagattagtaaagaacaatggagaaagctgtgctttgacaagggaacagaaacagatttatattgaccttgttatgaaatcggcagctgcttcatatgcacagcttcgcaaaaaattagaactgtcaaatgatatatcgtttaatatgctgcggtatggttctgatgaaattggaaaggttgagcgcaacaagctcggccatatgaagttctatcatgagatgcgcaaagcgttaaatacggttcaaaaagatgcgattgcaacagtatcatgggaacaaagggacgaaattgctagaattttactctgctataaatcggatgataagcgaaaagcgcaattggagaagctcgatattccgcgagagtttattccggcactgctgacattgtccacctccaaaacagcacatctttctgtaaaggctttacggaaactgattccatatctggaaaaaggcatgacatatgcagaagcgtgcaaagaggtttatggagagcagaaaagctctataaccaagaaaaacaaactcagtttgtttgatattgagccgattaacaatccggttgttcgccgtgcggtatcacagaccattcgtgttatcaatgcggttgtgcgggaatatggtgcgccggaggtcgtgcgggtagagcttgcgcgtgaaatgggaaaaccatatgatgtgcgaacgcaaatgacgaaaaagcaggaggaaaatgcaaagagaaatgaagaactcagacagcagatcaagaagataaaaggcgctgaaccgacaggacaagatattgtcaagttcaagctgtttcaggatcaaaatggtgtttgcttgtattccggtcaaaatcttgatatagcgcggttgtttgaagcgggatatgttgatgttgaccacattattccgtacagcatctcttttgatgatagttatacaaacaaagtgcttgttcgttctccagaaaatcggcaaaagggtaatcggattccggctgactactttaagagtgaccctgcgcgttggcagagatttgaaacactcgtcaatacacaggtacacaattggaaaaagaagcggaatcttttgacacaagcgctgtcggaagaacagaaaaacggctttaagcagcgcaatttggtcgatacacagtatatcgctcgtgtcatatataaccttatcaatgaccatctgcaatttgcagagacgggaaaatacgataaaaaaagacgaacacaggcggtaaacggtgcaataacagcccatgttcgaaaaagactagggattcaaaagattcgtgaagacggcgatttgcatcatgctgccgatgcggctgttgttgcctgtgtatcaccgggtatgatccagaagattacacagtatacgaagcatcgggaatgcatccgcaaaacaaaagaaggttatctggatacagagaccggtgaattgatgacgcgagaagcatatgatgcaaaatattctccgagatttcctgcgccgtgggagcgtttccgtcaggagttggaagcgcggctgagtgataaccctgctgaggagattgcacggctgcatcttgcaacctacgattcggaggaagaaatcaagccggtatttgtttcgcgtaagcagacacataaaatcagcggcgctgcacatgaagcaacgattcggagcgcaaagaagcctggcggcagtatttctaaaaaacctttgactagtttgagcctgaataaaaagactggcgaaattgagggatattatgcgccggagagtgaccgtctgttgtacgaggcactgaaaaagcggttgaaagaatttgatggcaatgcgaaagaagcgtttgctgaaccgttttacaagccgaagcgtgacggaacgcgcggtccgcttgtaaaaaaagtgaagatttatgaaaagaaaacgattacggtgccagtcggcggcggcaatgcggataacggcagcatgattcgtgtagatgtcttttacattgaagatgacggatactattacgtgccgatttataccgccgatgtgatcaaaggcgcactgcctaatagagcagtagttgcacataaatcgcatggcgagtggaaagttatggacgataaagactttttattctctatgtatccgaatgaattgctctatattgaaagtcgaaaggggataaaattaaagacaaagaaaggatattccagacaggaagaaattataagaaaagcaggcctttattattttaaggggttgaatattgctgccaatgctctatttatcattacacatgaccatagctatgaacagccaagtttgggcggaaaaacactttcctgtctcaaaaagtacactgttgatgcattgggaaattattcggaagtttcgctgccggaaaagcgcaagccgctgagaggataagaaagatggagtttcgcaacattgttatctccaatccggcacgtttgtcaatcaagcacaaccaattgtgcattatgcaggagcgtgaagcgctgattccgcttgaggatatttgttctgtgctgctggaatccagacagattcaaatatctgcggcggcattggaacggttggctgtcagcggcattacggtgtttttctgtgatgaaaagcacctgccgtctgcacagcttgttgcgatgaatcaattcagccgtcagcacaaaatgctgtatgcacagtttgagcttccgcgtccgatacaaaaacagctgtggaaatgtattgttcagcaaaaaatcaataatcaggcggcttgtttgcgattgtccggtaaagccgattttgaagaactggaaaaaatggtgcaggctgtgcgttccggtgatgtcacaaatgtagaagcacaagcggcggcatgttattttcccaagctgtttggacaaggatttacacgcaatgatgtatgcctgcaaaatgccgcgctcaattatgggtatgccattcttcgcggtgctattgcacgaaatctggtcatgcatggattagaaccgtgtatcggtttacagcaccataatcagctcaattcatacaatttggcggatgatttgatagaaccgtttcgtccgctcattgatttatatgttgccagccttccggacacagaaggtgatgaattgacgccggcaatcaaacgaagattgttcaacgcgacaaatctgctgatgcttcagaatggcaaaaagatgcgcgtgatgtatgccattggtcgttcggctgcgtctttggcaaagtcaattgcaaatcaagaaaatacattggagcttcccacattgatcggactggaggaaggcaggtatgagtagattcatgcgaattatggtgttttttgatcttcctgtaaaaacaaaagcacagcggcgagccgctgcgcaatttcgcaattttctgttaaaagacggataccacatggtacagtattccgtgtatgcccgcatttgcaatggaccggattcggtggaaacacatcgagcgagagttttacagcatgtaccattacacggcgcggtgcgcatgatggtggtcacggaacgtcaatttaatgcaattgatcttttgattggcgaagaaaaaacatgtgatttgccgcaaaacagcaaacaattgatggagttttgaaaaaaacggtacagacttctcatgcgaaatctgtaccgttttgcctgtttccaaagcatatctattgagttttcaacgaataggtagcaaaaacaagcgtcccgatattgtctgttataccactacgagaaaatacagggaactacaacgtttgatgatatcagtgatgatgaacataagttataccactacgagaaaatacagggaactacaacgaggtggtcttgtctttaatcttgccgattgttataccactacgagaaaatacagggaactacaacgcgtaggacagtttacaaacaactgtacagttataccactacgagaaaatacagggaactacaaccggtgaacctcgaaattgataacgtatttggttataccactacgagaaaatacagggaactacaaccgtcacgttttgtcattaaattcaccccgagttataccactacgagaaaatacagggaactacaacatatagtaaatgcacctttgcatacaccagttataccactacgagaaaatacagggaactacaactacgataagtcgcagcagcgcgccgaatagttataccactacgagaaaatacagggaactgctgtaaactgctatcgttatctacaatttaattgagaatataatgtatcactacaaacattatactctgcccactattatgttttctttagtatactacaaaatcttcccgaatacaagattatatgttcaatacctcctacctcaacagaaagctatgcttgggtttaatcacgcgaacggcgtggaatatcgaggagacaaccacaataccgagcgcaagagcaccggaaattgccacggtgttgacgccctcagcgagtgctttggcggtatcgctgagcacacaataatacatcgtttgataaatgccgtttcccggcacaagcggaatgagagaaatggtgagaaaaatactggtcggtgcgtgatgcatgcgcgcactgcactcagaatacaaggtaaatccgacggacgagatgaaataactcaaaatatcatgatgcggaaaaagcaggctgctccccaaatacaaaaaccaactaatcattccgccaatggcggcaaaaatgagctttcgcccgcgcagttgaaataaaataccgaaacaaagactggcgaacaaactgataatgctctcatataacaaggcagccatattatcctcctatcatagccaaaatacccagcgggagcgccacgccgacggcaatgccaacggcaacaagcagcgcttctgtgaatttgcaaatgcccgccataatgtctccggcgattaaatcgcggatggcattggtcataggcagaccgggaaccagaaacataatggaaccgataatcattgcgcgatacgtctcaatcacatgcagcttccagcagatgaccgcacaagccgcgacccacgtgccgccgatgatgttagtaaacagcagattggcaggcagtgcctgcaaaaatgtcataatgccccaaaggataatacaggtaaacagactgcatattgcttcggaaatcgagccgtgaaacagcagcgtaaagaaaaagccgatgccgccggtggcaagacacaaatgatagcggtgaaatggtttgtcgtggagaatacaaaccagacgttctcggatttgtgcataggtcattgacgttgcgcaaatttcccgacacaaggtattcagttgatccagccgtcccagattggttccgcgccgataaatgcgcagaacacgcgtgaccggatgagaatttccgcgtacaaatgaggcgatgatagcggttggtacggcataaatattggtttccgttgcgccataggcatagcagatgcgcgcaatggattcctcgacgcggtaaatttccgcgccgttttccaagagtgccgcaccgatgtcgacggaaatgtcaatcaattcattggaggtcatagccggctccttttttggtttgatataagactagtatacgaaaaaatgcgcaaaacagcaactatcaaaattttgcaaaaaaagggttggcagagaaagaaaagtatggtatagtaatttacatactaaacatagtaattaactaggaaaaggaggggcggcaatgcgtcaaatactttgctttggagattccaatacatggggattggatggagacagcggaaaacgactgccgtggggcgttcgttggaccagtctgctgcaagaaaaattagggcagcagtatcatgtgatcgaggaagggctgtgcggacgcacaacaattttcgatgatccgctgcgcgacggcagacgcggcacagaattgcttccgattttgttggaaacacatgcgacagtggatggtgttgttttgatgctgggcacgaacgactgcaaaacggcatttggtgcatcggcagaagtgattggaaaagggatcgagcggttgctccgacaaatccgctatgctgcaccgcaggcggaaatcctgctaatttctccgatttatctgggagacaatgtttggagaccggaatgcgatccggaattttcgcaagcatctattgttgtttcacagcgtctgcagtcggtttatgagaccattgcaaaaaaatggcatgtcggatttctgcgcgcagcagactatgctgtttgcagcgcaaaggatcaagagcatatgaatgcggcaggtcatgccgcttttgcagaagcagtttcacgcgaagtccggcagttgtttgcagagagacaagcggttggcgcagcgtaaaaaaagagaactgccgaagcagtcctcttaggatgttgattgtacaagcgaagaaataccctgcagacaccgcgatatttgcgcgcggtttaaaacctgatccgccagagaataatactgtccgaggtcgttgtcctgtaaaatggcatgcttgcgcatccaatacatagccagacacgtggtatcatccaattctgtatatcctgcttgaatttgtgccagctgggttttatctgtttctgtcagagagacatctattttccggtctgcgagatagcgcaggaacaagcggctgacagaaccataggtcacggtgtcctgtgcggagacatcgtcagaaatcaatgcgtgttcctgtgcccaggttatcacagcggcgtcagaaaggctttgcgtgccgcctgccatgcgatacagggcgcgcaggacttctccataggctgcagaggcttgtgcgccgaattctgtgcgggattttgcctgcatatagccgttttctgcgacaaatagggcacttgcctcctcaaaaggattggtgatatcggaaaagtcataggtttgcgtttgtttggctgctgatttcccaaatacatgggcgtagtagtcgttgttcagcacttgcgtggaaaacgaaaaaacattgctgacatactgacagtatgcttggacgtcggcatctttgacaggacgggtatcatacgattgtgcggtaccggtttccgcgttgtagcggaaagaatccgtcaaataactttggtcagccagcatggcaacgtgggtgctgtcagacaaaatatcttttccggcgagcaggcgggaatcgtaggaaacaccaaacagattgagcagagtcggcagaatgtcgatatcacagcaataggtatctacatcgaccggctgcatgtttggaatataacacaaaaacgaattgtgatatttttcaaatgtcgtgtcaatgtcctttccggcaagctcgttgtattggctttcagacaatccatatggataatggtcagcggttaaaacaatcacggtgttgtctgcctgtcctgcgcgttcgagttgctcgaacaaatcttccaaagcatattccagttccatgttgcaggcaagatacgcctgaacagtttttgaatatggcagattgcagacggcatcgcggttcttggcactcatggcgttgtcccagttgtactgataatgaccggaaaacgtcatgtaatacgcgcagaacggcgtgctactgtccagatactctgagacagaagcatctatcatatccttgtcagaggacggccatgacagcggaatatccagaccgctgccgactgcccgaaacgtatagcccatattggggtgcgtgtgattgcggtcatagaatgtgccgtaataattgtgataggcataggcggggtatccgcgggaggcaaagacgttgcccatacagtatggcagatggttgctgcgggaaacatcgaagctggaagcagtctttgtgcgcgacatgtccggcatcagccccatgcacagcgcatattccccgtttgtcgttgtgttgggaaaactgcaatagtagttgtgaaagcgaaaaccgccgtttgccagcttgtacagcgcaggtgtgcgctgttcgtcaatgacatatggactgaacgattcggcacagattacgattaaattataatccttggtgagaccggtgtattgatttttatcggtcggcgcaatggatgcgcaatactggtcaagggcagataccggatcatgcttggcgctgtcagccaatgcggaaaaatccagtgcggcatctatattgtcagcgccggatgacgattgctccaaatcgccatctagggcactggcggtcagtgtgacggaggaaccgcccagctgtgccagacactcctcaaacatggtagcggtgagaccggcatggcgcacgctgctttccgtggacgtactggtattggtcagcaggcgatataccgtgccgccgtccagcaggcgcagagcgccgctggtcagcacacagatacccgccaacgctcccaatgcgagaagcagcgttttgcgcgtcagacgcggcaaaacgacgcggcgtgaccgcagcagataccatgcaagcggaatcggcaggcacagcgcagcgacaggaacaatttgctggaagataccgtacacaacctgttctttgaagttggtcagtgcgttcgcgccgagcgtcagctgggacagcggcataaagctgccgaagataccgtgatagacgcattgcaccgcgcagcaaacgcacagaaaactcaaacaagtgagcgcaaggcgtccgccgattttggacggaaacagcgaactgaagcaggcgattgcgcttccgatgcaaatgccgaacaaaatcggaaagagcacatgcgcatctgcggtgtgaaatacgcttatgtgcaaaaccagctccaagtatgcgccgcagccggcaaacagcagccaagcggaaactgccggattattccgcaagatcgtaaatgtgaatttccgcgtttgtgacataggttgccttcaagttggacagcttctgataatggtcggttgtgccgtgaattttttgtgcttcgcggctgtcccacagctccaacaggcacagatcctgctcggaatccgtcggataatagtagtcgtatttgcggtttccatcctccgcgcgcgatgccgtgtcgatgccctgctcgacgatgtggcggtaaaattcttcgcgcttgccgtccttgacggtatagcgaacggtaacaagaatgggattgctcataagtgtcagctccttttttgaaagtatctttagtttaccgtgaatttgccgcattgacaagaggaagtttgcgaattgtacatagataaatacctatgaataatcaaaaatatagaaagaaaaaattattttatggttgaaaagcaaatataccggtgctacaataaaagcacgaacgaaaatggaagaaacctgcatgaaatcaataaaacagtcggggatgcatcatcccgccaaagtgaggaattgttatgaaaaagattgacccgcagagctggaaggcggatatgccgctgttccgcgaaaaagcgattgcatacgccaagggcgagattaaaaaagcagaatacaaaggtttttccggccgttatggcagctatgcgcagcatgatccgtccaaaaacatgctgcgtctgcgcatgccggctggccgtgtgaccgcgcagaagctcgcatacattgccgaagccatccgcaagtacaatgtgccgcgcgcacactttaccacgtgtcagaccattcagctgcacgacatggacgcagaaacgaccagcgatatcatggaaggcgctttggatgtcggcattgtcacaatgggcggcggcggtgatttcccgcgcaacaccatgtgcgcaccgctcagcggcgtgcagaagggcgaatatttcgacgttctgccgtatgcacaggcagtcggtgaatttgcaatgaactttatcaacgcagagccgatgccgcgcaagcttaaagttggcttttccaattctccggaaaacgtaacccatgcgacattccgcgatatgggctatgccgcgcgtccggacggaaagtttgatgtatacacggcgggcggtctcggcaacaatccgcgctttggcgtcaaagtggcagaggcagtagaaccggatcagctgctgttttatctcaaggcaatgtgggtaaccttccgcacctacggcgattatcaaaatcgcggtcatgcccgcacgcgctatttgcaggaaattctgggtggcgcagacaagtacaagcaagcctatctggaaaagctcaaggaagtatacgcgtccggagaggatctgacgctgcacgttgatccgattgtctttaccaagaccggagacggcagcacggtttccgacccgcgcgtcatcgagcagaagcaggaaggtctgtacgctgtcgcatggcatccgattggcggtatgccgacagtagaagatctgtgtgcagtcagcgatgccatgtctgcgatggagcaggtagagatgcgcattgcgccgtacgagacggtatatatcatcaacctgaccggcacagaggcaaagaagatgctggagctgacacgcagcaccgcaaagaccgtctttgagacctcggttagctgcatcggtgcatcgacctgtcaagttggcgtgcgcgactcgcaggcactgctgcgcgcctgcgtagaagctgttcgagaagcaaagattccggacggcgcgctgccgcagattcacatttccggatgtccgtcctcctgcggcacgcatcagattggagagatgggcttccgcggagccatcaaaaacaaacagcctgcctatatgttttatctgagcggctgcgaccggcagggagaagagaaaatgggtgcagagctgggaacgattctggaaaccgaaattccaagatttctcgtggagttgggacagacagtagctgccagcggaaaggactatttcgcttggaaagcggagaatccggacggcgtggagaaaatcgcggcaccgtatctcgcagagtaattgtatttgcataacacaaaacggacagagaccgagacggcttctgtccgtttttttgcaaaaaaataaaattataataatcgtccgttttcctgcccaaacagcgttttgacaagttttccgtctcgaatgagcagcacgtgcaccggcgtgtattcgtgaaagcagttgacaatcacatgcgccgcaccgcgcgattgtccgtcccacaaaacgagaaccgcgtcgctgtagcgaatgatggatagattgcgctgcaacggtgcagacttatgatagacctgatagtccggacgaaaaattttcatcggcagatggttgcggcgggcatattcttccgccagttcatcggcaccggaggcaccgccggatacgatctcgctgactccgcgcgggatgtaggcttctaaaattggatacgcgtccttcgtcacggaacgagaaccgacgatggcaattcgcatgattatctctccctcatacacattctgtctgtactataccataaataaaaaagcggttcaatatctgcagcggcgttttcgaaatctggatgtacatgcaatggctggacatgccgccagacatgggcacgcatagagtccggaggcggcggaaaatctaaagaggaagggagaggatgcgatgaacagaatcagaacgtgttggagcggtgtactggcagctgttttgctgctctcgtgcaccgcacaggcggcggatctcattgcgctgggcgttccggcgggtgtgcgcatgacagcggaaggcgttgtgatttccggcatgtcggagctggatacaccggcgggtgctgtgagtccgggacaagcggctgggttggaaaccggtgatattttgcaggaagcggacggcgtagttattgattcgagcgaaacactggcggacattgtgcgaaacagcggcgggtatccgattcagcttgcgggactgcgcggcgataccaagatttccgcggcagtacagccggtgcagaccacgtcggacggcgcctatcaaatcggattgctgattcgggacagcatggcgggtattggtacgctcacatatgtcgatccgaaaaatgggacatttggcgcgctgggacatccggtcacggacgttgatagcggggcgcggctgccgctggaaaccggctcgattattccggcacaggtcattcgtgttgaaatgggaacggcaggaaaaccgggagagctgatcggcacgtatgacttttcgacacaattgggacagctggatgataacacggcgtgcggcattttcggcacgctgacaaatcgcagcctgtatgcgggacaaccggttttgtctacggcggaagccgaggaggtgcacacgggagaggcggaaattttgacctgcgtttccggttcgcagcccaagcggtatgccg

SEQ ID NO: 1965 - DNA, 19076 bp, synthetic construct
  source 1..19076: mol_type = other DNA
  misc_feature 1..19076: note = Synthetic
cgagagcatacgcaccggctatctgaaggtgaagatcctggagctgatgctctttctgacccggatcgatctgaaaagcgacgagctggaatgtcgctgttttacacccaaccagaagatcctggcggaaaatgtgtcctcctatttgcaggcgcatatggacgagaggatcaccctggagcagctggcggatgtgtttcattgttccggcacccagattaaatgcagcattaagggcgtttacggcatgcctctttacaccatgatccgcaatcagaaaatgcagtctgccgcaaagctgctgcaagacacggatatgaccattctggagattgcaggccgctatggctatgacaatgccagtaagtttgcaggtgcttttaaggcggtggtgggggtgacccccaaggagtaccgcaatgcccccattgtcatcgaagatcgattcacataaggtgcgtactcggaatatcggtctaaatggagcagcattctgcctgtttggagcagaatgagggaggcgggacgagtatgatatacctatcccaactgaagacaggtttcagtgaaggttagcttcagctaattagatgctactaattagctagtgctaattggcggatacccggtaccgacgggtgctgttccaggataggttttaacagggggttagtgattgctaactacaaaaggaggaatcattcacatgagtgttgtaattgtaggcggtaacgagcgtatgattcgtcgctataaagagctatgtcgggagtatcactgtgatgcaaaggtcatcatagaaatgaacggcgccctcagaaatatgggcaatccagatctgctggttctctttaccagtacagtttcacataaaatggtgaattgcgccctcagtgccatcaagggacacaatgtgagcgtggctcgcagccacacaagctccatggcggccctgcggagcattctggatcagcacgcagtgtgcggaggctaagaaatgtccgatgcattactgatccggcagtgttctcccacactggctgggatgaaagccgggagcatgtttccctgtgcctatggcacagtcaaggagctgaccgattatattcgtgcgctcaatcggaagctggttcccaagggattgcgtgtcctgccccttcgccatagaaagggacatgcactcatctatgtatttcgccccaaggcactggagcaggttctgaaggacgagactgcggtctatgttctgcggaagtacggctacaaggacattcgggtagagccctgtgtgtgccagctgatgggacggtttcagagtgaaggagaattcccccatgaggtgggactgttcctgggataccccccggaggatgtctgcggcttcattgagaataaggcctgcggacagaagtgcgtgggctgctggaaggtttacggggacgaagctgccgcccggaagacctttgccaagtacaaaaagtgtacggcagtctattgcagccagtgggaaaaaggaagaagtatcgaacagctcaccgtagctggttgatatgcaaataaagaaaggttgattatatttatgcgtaaagttgcagttgtttattggagtggtacgggaaacaccgaggctatggccgctgcggtcgccgacggtgtcaagaataatggtgctgaggctgctatgctcaccgcctccgagttctcccccgacaatgtagaaacctacgatgccattgccttcggctgccccgcaatgggcgcagaggtgctggaagaggatgaattcgatcccatgttcaccgcttgcctgcctaagctcagcggcaagaagatcgctctcttcggctcctatggctggggtgacggcgagtggatgcgcaactgggaggagacctgtcgtaacggcggtgccgttctggcctgcgacagtgtcatgtgccaggaagctcccgaggatgatgcagtggaagcctgccatgcactgggcgcagcactgaccgactgagatacatggtaacggaaacgagagctcagatgctgggctctcgtttttgcgttaggtaagcctgtgtaaccgtatataatggaatggaaatgagatggatgacgccccggagaggggaaatcccccagtttccgaattttttgaaaagcattgacaacagcgggatcctgtggtaatatttagtaattagcaaccgctaacttccggttgctgtaccttttgataaagtgttagctttgactaactttccggcaggggggaacacatgaagcagcgcagatctacagaggattatttgaaaacgatctatattttatcccaatcccaacaggtgcacgcctgccagattgcggagaagctgcggctgtcccggccaaccgtcagtgtggcactgaaacagctggaaagcgaagggtatctgcggatcgatcacaccaatgtggtctggctcacagagcaggggacacggagagcaatcgatatctttgaacgccatcagaccctgcaggacttctttgtaagcctgggggtagatgcggagattgcatcccgggatgcctgtgaaatggagcacgggctgggagatgaaacctactgcgcactgaagcagctgatggaaaaggggagacaccatgtggagtgaattctgcgccgcagcagttgtgtccactgtggcagcctttagccaaattgtcaaatgcctttgtaaaaaatactgttaaaaaatccggcaactgtcaccggtaaagccccggcgaaaggcagctctatttcattttatagaacacaggagtcccagaaagatggatgtagaaagcaaacggcagagagaaaaagaagtggtatcgctgatgatttctctatactgcagaaaaaaacacggaacaaaagagctatgtccccagtgtgcggcgctggatgcctatgccaaaagccgcagcgatcactgcccctttatggaatccaagaccttttgctctaactgtaaggtacattgctataagccggagatgcgggaaaagatccggcaggttatggcattttccggcccacgcatgattttttatcacccggttctggcagtacgccacttaattgaatcaaaaaaggagagaaaaagaaatggagaaaaagtatgaagctgaaaaaaacactgtatatagtaatgggatgtatcggtctgggtctgggagctgtcggtgcagtggttccactcttacccgcctttccgtttctgatgttggccgccttctgtttcgcaagaagctcggaaaagctcaataactggtttataagcacaaaactgtataaaaacaatctggagagttatgtggccggaaaaggcatgacgaaaaagacaaaggtccggatcatggttacggtgacccttctcatgtccgtgggctttatcatgatgcatgcagtccctgtgggacggatcgttctggcatttgtatggcttttccatatgatctactttattttcggcgtgaaaaccattggcaaattaggggcggagccctgcgatgtctgatggaccctcctaaaacacgccccggaatgcaggcggtatccgcattccggggcgtgttgtttatggagtgcagatcattggaaaatccaatgatctgccggagaagttactgcagaccctgctcgtaggcctcaatcatcttcttgaacgtgtgacccgtacgacttctgaggttttgcaggtatttgtctgtaacctcgccggtaaagagcttgatctgcaagtgaagggtatcgtctccctctggtgctgcaatgatcttgtcgatatattgctccacaaattctgggttaattataccattggctgcgtctttctgagcttccttcagacagtggcgaatggtatcaatctgctttttaaactctgatgcgttgtcccgctgggcagcaagctcctccagctcctgttgggcctgctccagttcatgagtacattccttgttcatggcgataaaatcccggtctgaaagctctcctaatgcattaaaggacagaagcttttgcttctttttttgcgcggtttcaatggtttgctccagagctgttattttctttttaagatcatccccctggtggagtgtcttgtacatctctatatattcttcaataagtgcttccatctggggctcagcctcctggaacacgtccagcagcaggggcttcagctctgactcgtaaatggcgaaggatggacaggagtcagcaccgttttttatttttccggagcagacccacttgctgtttttgttgccctgtttgtcgacagaatctcggcggtagtaggcagcaccacagtggctgcaatatagtttcccggttaaaagatttttatgattgcagattccttgacgattcttgacatcctcactgcgtttttttaagactgcattagctgagtcccaaagctcctctgaaacgatggcgggaacgatctcgccggattcatccttaaacatgacccattcctccggcgggagaaacttttgctttttggtgaaaagatccacgactcggactttgttgcccacatagtagcctttgtattttggattggatatcataccggacatggtggtatgggcaattttcttgccgttgtgattacgataacccttttcccagaatatcgtttcaatctgcttcatggaatatgtgcctgtggcataaagtgcgaacagctcctgtaccataggtgcttcttcttcatcgatgaccagacggccctgatccttgttgtatccgaaaatccgactgtttccaagaacaacgctctgtttgatggcctgctggtgtccgaattttacacggctactgagctttctcagttcgtcctgagcaataccggacatgattgtcagtcgtagctcggaatcctcatcaaaggtgttgatgttatcattttgaaaaaacacaccaacaccggagtttagaagctcacgggtgtactggatggagtccagtgtatttcttgcaaaacgggtaatttccttggtaattattaggtcaaaaagaccggcttttccatcatcaatcattcggtggaaattctcacgcttcttcgtggtggcggcagacagaccttcatcaatatacccgtccacaaagatccaggcagtgttctgccggattagattctcatagtaagtgatttgattacccagagaattcagctgctcatcgctttctgaggacacacgggcatagaaggtcacccgcaggggcagatcataaatgctgcgccttttcagctcttgccggatttcgtgcagatccatcttgttttcacctttcgttttatcatcattataaatactataataaaagaaatgacaacagtcaatattaattttatggaaaatgagcagaggactatacattaattccatagaaattcgcaatccgtgagtaggggaatctttttccatggagtgtatgttgaattaggatattttgaagatttcaatcggagtagcggctggataatccatttctcacgcctcaaatgatccaaagtaattcaaatttgtttttataaacgtatatccttgcgctgcaaacagatgtgtgcttgacataacacaaatcgtttggtacaatatatgcatcttgtaccacaacaagagactttaggttactgcaatcaggcagtatgcctcagagctccgccccaaccactttattgtggttggggcgtctttgctattataatgttattttaggaggcactctatggactatacattaggtttggatattggcgttgcttctgtcggctgggccgttctcagaaataatgaacaggaggagccttataaaattgaagatttaggtgttcggatctttgaagctgcagagcatccaaaaaccggagcaagtcttgctctgcccagaaggcaggctagaggcatgcggcgctgcacccgcagaagacgtcacagaaaagagcgtatcaaaaatctgattgaagacatcgggcttatgaaaaaagaggacatgtctgctctttttaaggcatctggttttgcaaaagatgtttacgatcttcggtctaaagcattggatcgtgccctaaccgccgatgaatgggtacgcgtactgattcacctgtcccagcgccgcggttatcgctctaacagcaaggccgaagaggcaaaggatgcagaaaacggtgtactcaaggatgccattgcttccaatcaaaagctgatgtcagaaaaaggctaccgaactgtgggcgaaatgttctgcaaggatgccaaatttcagacaatcggtgcagacggaaaagcatggagaactacccggaacacatccggtgattacaaattcaccgtgacacgtcaaatggttgcagatgaagtctctcttctgttccattctcagcgccgcatggaaaatccttttgccggtgaagaatttgaacagaaatattctgaaattctgttctctcagagaaattacgacgaaggacccggcggaaacagtccttaccggcagatggacctgcgaggatattgtctttttgagaaggatgagcggagagcctttaaggcctgttttacctttgagtattttaagctgatgcaggatttgaaccatattcgcattcggtctgtagacggtgagcgtggacttctgcccgaggagcgggagcggatcattaccctttccatgaaatcagacaatttgaatttttcccgcctgcgaaaggaactgagccttcctgcggactctctttttaatctagttcggtatgacaaggaaactgctgaactctcggaaaaaggcacaaaattccctcagatgcagtcttaccacaagattcgaaaggctttggataagatttccaaaggatacattgacactctcagtcatgataccttggataaaatcggcacgatactcagcctttataaagcagataacaaacgaacatctgcactgcaggtcatcggtcttgatgactctgtcattgcacagctcctgcccctttctttttccaaggccggaagtctgtctcttacagccatgcgcaaactgatcccggaacttgaaaaaggtgttacttacgataaagcgtgttctgccatttacggagatttccggggacatacagctggcatgcgcaggaaaaccatttctttgaacccggaattccttgcagaaacggggctaaccgataatattaccaatcctgttgtcttgcgcgcgatttcccagacctgcaaggtagtcagtgccattgtgcggaagtacggctctccccaaatgattcggctggagcttgcccgcgaaatgagtaaaaatcatgatgagcgggtcaaggctgagaaatccatggatgagaaccgcaagaagaatgaaaaagccatggagcatatccgggaaatcaagggcgatcacgccaccggtctcgatctggtgaaatggaaactctatcaggagcaggacggtatctgtttgtattccggagtgcatctggatgcatcccgactttttgaacccggctatgtggatattgaccatatcatcccatacagcatcagtttcgacgacagctaccgaaacaaagtgctggtactatcttctgagaatcgccagaaaggcaaccgtctgcccctgcggtacatggaaaacaatcctcaaaaggccgcagattttgaaactctggtggagacccgcattcgagactatcgcaagcgacagaagcttctcaaaaagcatctcacggatgaagaaatgaacggattccgcagccgtaacctgaacgacacccaatatattacccgggtggtctacaatctgttccgggattatctggagtttgctcccagcacctgtcacagcaagaaacagattatggcagtgaacggagctgttacggactatatgcgtaagcgctttggcctgcataaaaaccgtgccaacggcgataaacaccatgctatggatgccgctgtgattgcggtgactacagaggctatgatccagcgaatctccaattacgccaagcgtcgggaatgggggcagaaggtgcagggaaagtatgtggatcctgaaaccggcgaagtaatgactcagaccgctttcgatgataagtatgcccctaccttcccggaaccttggccccagtatcgcaaggagctggaagcccgcatgggagataccccaatggaagatctggagcgccttcatctgcccacctatgagccggatgaggaagtgagaccgatttttgtatcccagatgccccgaagaaaagttaccggtgccgctcatcaggaaaccatctggagcaaaaaagaagaaggaactctcatcaagaaagttccccttacagctctgaaactggatgcagatgggaatatcaagaattattaccgtcccggagatgacaggctgctctatgaagccctgcaggcgcagctgaaaaaatatggcggcaatgctgctaaggctttttctgaacctttccacaagcctaagaaagatggcactcccggtcccattgtaaataaggttaaaattcaggagagaacctccaacaacgtggaagtgaacggaggtattgccaaaaatggcgatatggtgcgggtggatgtgttccatatagagggtgacggatattactttgtccctgtttataccgtggataccaccaaaaaggagcttcccaatcgagctgcaacaaaaaacaaattatttgcacagtggaaaatcatgaaagatgaggattttctgttcagtctttatcccggagatctgattagaattgaatcttccggaatgataaagttaaagaaaggcaataaagatgcggatggggaaccggaattacaaaaaaagagtgcaatgctgtattatgtaggctccgatatcagcaccgtaagtatcacctgtacttcccacgatcggaaatacggatgccgtggtcttggcatcaaacgcctgaaaagcattgataagtatgaatctgatgttctaggaaattatcataaggtagtgcttccggaaaagaggcaatccttctgctaagttaggaggttactatggaattccgctctgtgctcatctctaaccccgcccagctctctgcacgcaaaggtcagctggttgtccgacaggataaggaaatcaccatccccatggaggatatctccagtctgctgattgaatccagggcggtgaccataaccgccgcagctctacaggagttggcagatcacggtgtcaccgcctatatctgtgactccacccatatgccggctgcactgattttgcccatgaaccgaaactgccgccagctaaagcagttgaaggcacagatcggcctgtcccttccgattcagaagcatatttggaaagaagtggtttctgccaaaatagccaatcaagcccgttgcctaaaactgctgggcatacccggctatgaggatcttttcttcatggccaaatccgttcgtcccggagatccggataatctggaggcatctgcagccgctgcctatttcccacagctctttggatccggttttacgagaggagaggattccatccaaaatagctgcctcaactacggttatgctattttgcggggagcagttgccagaaatctggccatccgcggggtagagccatgtttaggtatttttcatcacagcgaactgaatcagttcaatctggcggatgacctgatggagccttaccgtcctctggtagatctgtttgtagcttctaaaatttcggatacagaacagatgatgcccgctgtaaagcagcagctatttaacctaagcaattatctgatactgcaaggcggtaaaaaatacaaggcgatatccgctgtggggcggacggcagacagttttgtccgcattctacacaggcaggggcgggatctggaagttccggaactgcttgccctgcaggaatatcactatgagtaaactgatgagaatattggtattttttgacctgccggtaaaaacaaagcctcagagaacagctgcctcccggtttcggaattttctgctggcagacgggtattatatggtgcagctttccgtttatgcacggatctgcaatggcatggattctgtgcaggctcataaaaacaggctttataaggcgcttcccgccagaggtgctgtgaggatgctcgtgattactgagcgacaatatgaaaacatcgaagttcttctgggagctcctcaggagcaggaagaagtccaggaaatggagcagttaatgctcttctaggcaaaaagatccagaacattctgataagagaatgttccgggtcttctttttttatgagacttcttatattttagagagcataaaaatacgatttgctcaccaattcccaaggcctattataccacaacaagaaaccttagggaactacaactactggatactctggattcttgcttgcaacattataccacaacaagaaaccttagggaactacaacatcagcttcccggtggcggcgaagccgcagattataccacaacaagaaaccttagggaactacaactgagttgttgagcttgcggcgtacatatcgattataccacaacaagaaaccttagggaactacaactgtggtttcaccgggcttgacaacaaatgtattataccacaacaagaaacctcaaggaactacaacaagtgaggaggagcgtctccacctggtgtcacaatgatcttatcgatagattgctccacaaattccaggttgatcataccattggctgcgccttttcagctcttgccggagttcgttcagatccatcttgctttcatcttttttggcatcattatagatactatagtgaattacagacggatagtcaatatttaatttctgcaaatagaaagggaaatctataatatatacgtgaaaagagcattttttacatattttgagaagtattgtgaaagaatactttatggacttccagctgatattgtgctaaaatatccataatcatgaaaaagggggctgtgaaatgctggatacaattaaggactgggaatataaggcgaaggccggtgttccgggagccaaggaatatttggaaacacggctgtccgatcgcatggagctgcctctgcttggtatccacggggaaaaattgtatttgaccggcgtgcaggaattgacggaaaaaaccagaatgctggattttctttatgaagataccccaattcaccggggtgccaaggatgttattctactggatgcctggtcttctgcaacgatcgaaggcgccaggaccactgtcgcacaggtgaaaaaaagtgctgtcaatcccgttaccaaggatgataagatggtacttaacaccattaagggcagtaattatggatttacacattccatatcagaaaaaaatatacgctgtttgtgggaaatggttgttgccgatgtgtgcgaaaattcagatcatcggggtgagctgtaccgggacggtatggtttatatcggggataccagcagaaccgtgcatacaccggctaagccggagcagctgccggaactgatgaacagtctctttgcttacggaagagaagagcacgccgacgtgctgattgcctcgtttgcaatccatttctattttgtatatatccatcccttctgcgatggaaatggaagaactgcccggatcgttaatgcctctatgctctatcatgggggatatgaaaagatgaagaatcttcctttgtgttccgcaatcaatgcacagctcagcggctattacaaaagtatttcagattcggagaatgtgatccataagggcggggaagtgtggctggatctgagccccttcgtgtcctatatgctggatgcatttgagcggtgtctcatcgatgccgccctttcaaagaatgaactgaccgagaaggaaacaaagctgctggagcggatgaataaagtgggccccaatgcggaaattaccacgactaaggcaaatcagattttgaaagtttccgagagtacggtaagaagagtcctaatgggacttgttcagaagggctatctgtctgtaaacacagagcatgcgccatatatataccgcctgcagcagcatatgcctgatgtttaaaatgggtctgtcccatgatttataaattccattttgtggtgagcaacagggcaaaactataatagagtattcttttatttctccgctattgatttagaagcatcaaaagtccccatccagcatgattgaaccgcaccccttttgttagacagtatgatatactatctaacagatggggtgatttttatgcctggagggaaactgaataagagatagacaccagagtttaagaaaatagttgcggaaacaatgcgtgaaaagaaactcagtgattgagaaacagctgcaaaatatgaattaagcgatcatgaaattatttggaaatgggaatgtatctatttggaagaaggtccggaggggctggctgtagaacgccgtggtcgcaagaatacagggcgaaaatcgcccaaagagatagaagaagatctgcttgctgaggtgcagcattctattaccatctgagatggaggagccgcaaggataaatatgaggcggtaaaagctgaaataacagccatttaccacgagaataagggcagatatggctaccggcggataactgctgaacttagtaaccgaaatctctgctgaaaccacaagaccgtccagagacttatgaaagaactgagtttagtttgccgtgtccgtatgaaaaagtaccattctgacagagaagaagcgggacgaattgcccccaatcttctgaaatgagacttttatgctgagcatccctaaaagaagtggattacggatgcaacgcagttccacctctttgggcagaagctgtgcctgtctcccgttctggatctcttgagccgggatctggttagcttcacgatctcagaccaagctgttatgagcatggtgacctccagcttgacaaagcctttgaggcgattccagatgacacaggattgctcctgcactctgaccagggttggcgattccagcacaaaccatactagagaacgcacaaggagaggggtgttcagtagagtatgagctggaaaagcaactgtctggacaatgcgattatcgagaatttctttgggttactgaaaacggaacttctgtatttgcgggagtttcagtccttggaacacttcaagcgagaacgaattgcatatctggactactataacagaagatgactcaaggcaaaattaaaggacttgccgtctgtattacacaggcagcaagcccttttggctgcttaaacaatatataattctaaatgttgtctaattttttggatcacttcatcgtgatgaaaacggtggtttttatgacaaactctgtcagataagatgttctacctcgacaggcgagcttgaccataagcaaactatcagccagtctggaaatcaattagttcaatttttgtgcagtccatctaaccagattcgcccagaattcgttatatccggaccactgcaacatatttcctccccagtggggaccaacatcacatgtgaatacagtacttctacccataccgatatcccaggtggcaatctgaacatcgttattccacgatgcgacttgggtagctccctctttgaggtgtaccctattatagcccagcaaggtgtaactttcatcccaaggaagtcctctcagaatcggatgatcgggaatatcaaaatgcatcgaataaccttgggttacttcaattctatcgtccacacctctgggttcacaggttacaggcatgatttcctcaatctttgtcccgccgtacagtcccttgccctgaagtccggagaaactcagccagccgcctaccatcataaaaccgccaccctggagaacgtaatcgtaaagcgcttgcactctatcgggtcccatgggaatttgaaaaggctgtacatttccgggctgcaggttaatgttgttgtagcctacatcgctcaaaatgataacatcataagccttcaacttctcaagagtatcaggcatatcccggatgcagttcatactaggaatatgcgtgcaaacaatatcatccgatgctgctagagcatctctaagatacttagcggagtctccgtaatatgtaaaggtccaactgtcaatccctttgatagactgggtaacatttacctgagtgtctccaacatacaatactttgatcttttccatgttatatgtcactcctttgttcattttttatcctttttaatactttcattactttgttctgtttataaaagtactgagacagaacgtcatattcttgataaaggcgctggtaaacattagcgttttctgggattgggcgatactctatttcctttttagatcctagtttttgaatgatgtctgggatatttgtatcaggacccattccagcaatcgcaccgtagatcgcgcttccaatagcacctgactgaggattatccgccacttttatggttctattgcatacatcggcataaatctgtactgcaaacgggtttttagtggcaatgcctccagtcatgacaatttcgtcaatgtgaactccgtgagattcaacggcttctatgatcttacgagtaccgtatgctgtggattcaattaaggcacgataaatttcctcaggttttgttgaaagagtcatacctaagatcataccagtcaaatcaaaatccatgtaaaccgatcgtacaccgttccaccaatccaatgcaagcaaaccgctttctccggccttgagtttggctgcttgttcagtcagaacttggtgaatagaaatatttctattttttgcaatttcttggtaatctgcaggaatgcaattatccgtaaaccacgcaaattgatcccctacacagctctgcccagcttcgtaggcaaagaaattgggaataacaccatcttttacaacgccgcatatacctggaattttcttttcttctttagcaagaaaaatatgacaactggaagtacccatgattaagagtagtttgttggtagaactgataccacaccccagcatagacgcatgtgcatcaatgagacccacagaaacagcagtaccttttttgagtcctgtcaaatcagccatggcctcagtaagctctcctgctttgcttcccaaaggataaatatcatcagatagctttttttctgtaaagcggtcaagtcgaggatctaatttctttataaaatcattagagggatatccatgtttataatgccaaagtgctttatatcctgcaaaacatgcacttctggcttccttaccagttaggctcataacaagccagtctccagcctccataatcttatctgccgcttcataaatttctggtgcctcggcaacaagctgcataaccttgggaatcatccattcacaggaaattttatttccatacagtggaagccactgttcctgctcttccgccgcacgttgatttaaaatgtccgcatagggctgtgccgcatgatgcttccaaagcttaacataggcatgaggattattcttatattcgtccaaaaggcaaaggggcattccgtccttttttactggtaaaatggtgcaagcagtgaaatcaacaccaattccaatgatacactccggagaaacttttgttttcttcaggacatccttgacggtaattacaaaagcatcgatataatcttgaggatgctgtagcgcccaaccttcgctgagtttttttccacctggaagctcctcacacataactccatggctgtattcataaacggaagatccaaccagtgtcccatcatcacagtctatcagcaccactctcgcagacagagttccgtaatcaagacctaatgcgtattttttcacgattttctttcccccttaaatttgaaataagagatacaaagatagaaagtagtactaaaaggcaaccgcagattgaatgcaattttaattcctcatttagaaacaggacactgaccattaggcaaaccaaaggctctgtcatgttaaacatagaagccatttctggtcccaagcagcgaattccttttgtcagcatggtacaggggattactgtacaaataacggatataaataaaactgcaccccattgattgattccgttaattagatgaatgccggagtcaaaaacactgagaaatccaatcgacaggcttgagaacaagttcatataaacaacagatacgaagggtgaaacctcggcaatacttgtccgtttatttccaatgacatataaagagtaggtgattgctgatccaagtgccagcagcaaacccagtatgttcatttcccccttgttaccaatcaacagcaatatacctgttactgcaataattgcggaaagtcctttgaaaaccccgatttttgttttaaagaataaaaatgagattgctgtgaccgcggcgggataagtaaagtgcagcattgatgcgactccggagggaatgaatgaataagaaagtatcaacagtgctgctgtggctccataccccagaacaccgatcaatgctaaaaaagcaattgctttttatttacttttaacgggatcctgcctagcagacagatgagcagagaaaaaataaacgcaaatgcaaatctgtaataaatcaagcttattcgaggaattccggctgaggcagccatataggatgcgataggcaataatccaagggaaattgatgctactaaggtattatatactccttttaccattacagttattttcctcccaaagatctctaactgtatctcccgctacctctgtggttttcaacgtaatttgttcgcaaactttcacaccattttcgcggttcatattgataagaatctgagcagctactttccccatctccaaagcaggctggatcaaaccagaaagcctagggcgcataattccataatcatcatccgcatcaaagcatacaatagataagtcttcaggtattctgatgttgtgattgaatgcaaattttaaaacgctgtaggcaatagtgttgtttgttgcgaggatagctgttggcatttctttctttaagaataaatcttttaaacaattttcaatattggcattcttatatgttgtgttcacaatgaaattgctttttactttgattcctgcttcttttagggcgttttcccagcccctgcgccgctcggtagccgtccagcatgcgctctcgttctcattaataattgcaatatctttatgcccatggtcgatcaaagtttgtactagatttttggcacacagataattatttatcgtaactgtactgcactgtgtctcccacatgggcttattatcgatatatacaatcggtatacctgcttgctcgtacatcagttccatttttggtgttttgcatctggtatcgacaatcaagccacatacattcagttttaaaaacatttgtgtgtacgaaatttctctttccaaaagcgaatcactgttacaaacaatcgtataataaccgtttttgtatgcgtaatcctctattcctcgtactaccttcgagaagaagctgtttgtaatatcgttaactatgaccccaatcgcttctgtagatctctttttcaaacttctggcaacttcatttggaatatagttcaacgtctttaccgcatctaacacacgttcccgtaccttaggatcaactctgtttttgttattcaaaactctggacacagtagatacagatacgcctgtgtattgtgcaatatcactgagctttactttttgacttcccataaaaagtcctccaaaaatttaaaaactgatatgagggataaacgatgaattcattcattttttggtaaattgttttaagctgggataatatctatatataatactatcccagcttaattgattttgcaccctatgtcaatacatccaagctatataaccttaatcgtaaagcatactagccaggtcgggatcatcaacatttgtcttatcaaagtacacataatcggtgttcacaaccttgggtacatcttcaccgtttgccgctctgaatgcatattcgacagtcttgtaaccaatgttgacaggatcctgtgcaatagcaccagtaagggttccatttcttgcagcatccttaattagcttgttgcaatcccagccaattatagcaatctttccggattttcccatttcgacgacaccgttaatgccacctaatgtacttccttcgtttgtgcagaagataccttttaggttgggatgtgcggtaatcatgttcttagcaatttcggtggactttaagggatcaccatcgccaaactgcttgtcgacaattgtaatattggggaactccttttcgatggtttcgcagaatacatcgttacggatgatgctaaagtaaccggtttggttaatgccgattaaaccaacttcgccttcgccgccgattgcatctgctagctttcttgctgcttcggcagcagctgcctcattgtcggtaaatacctttgttgctgggatatctccttctacgaaagtatcaaaagataccacaggaatattcatttctacagattggtctaggatgggctttacagcttctttatccagtggagcaatacatacggctacgggtgaacgctgaaaagcagcctcaatcatttcgatttgcttgtccatctgggtctcggtttcgggagcctcgaaggtgacttctatatcgaaatctttggcagcttgctccacaccctgacgtacagcttgccaaaacaggtgctgatagccagcacttataacagcgatataaggctttttttctccgtcagcattcggctgagcgggggttgtaccggaagtgctgtcggaagtgctgccggtagtggacttgccagtacacccactggctagcactaaaaacatggccaacaataatgctaatacttttttcatgatacaaaaacctccatttatcttgtttattttagatagaaga

SEQ ID NO: 1966 - DNA, 18837 bp, synthetic construct
  source 1..18837: mol_type = other DNA
  misc_feature 1..18837: note = Synthetic
ggccgcagatgccgggcatggtgctgcgcacggtgatgatgtcataggcgccctcgaagtcaccttccgccacccgggcgatgaactcggggatctgctggtggatggggcagccctggacgcagggcttcttgcggcagttcaggcagcgcatagcctcgcggatggcgtctgcctcggtataacccagtgccacttcgttgaagttggtgcagcggacctcacggggctgctccggcatggggtttctttctcttacgttgttaatcatttcgccagtccctccttcggctccagactgttgcgtctctggatcagactgtcataacggttcagggcgttcttctcggattcggcgaagagctgagccgcatgatcgggattcttcatgctcagggaggcatagcggacctcacctctcaggaaggcctggtaatcctcgttgggctttgcgctgtcgatctgcagggggttcttgccctcggcagccagacggggatcgaaccgcagcaggttccagtaaccagcccggactgccttcttcatctccggcatggagcggttcataccagccttcaggccgtggttgatgcagggggcataggcgatgatgagggagggaccgtcatagctctcagcttcccgcagggcccgcagggtctgggcggggttggcgccgatggccacctgggccacatagacgttgccgttggtcatggcgatctgtgccaggtccttcttgccggtgggcttaccgccggcggcgaactgtgccaccgcgccggtgggggttgccttggaggactgaccgccggtgttggagtagacctcggtgtcgaagaccagaacgttgaagttctcgcgggaggccaggatgtggtccaggccaccgtagccgatgtcgtaggcccagccgtcgccgccgaagatccacatggagggcttgcccagcaggtcggaattcttgatgaggtactgggcgtcctcgttctcgggatagatcttgcacagctccaccagagcctcacccaggtggttagagtcggaggtgttcatcttctccagccaagccttggcggtgccggcgaaggcagggttcttagccaggcgctccaccacagtcttgatggcgttgcggcgggtgcgcatactcacggacatgccgtagccgaactctgcgttgtcctcgaacagggagttggcccaagcgggaccgcggccgttttcatccaccacgtagggcatgctgggcacggaagcgccccagatggaggagcagccggtggcgttggcgatgatggcgtggtcgccgaagagctgggtgaccagcttggcataaggcgtctcgccgcagccggggcaggcgccggagtactccaggtaaggccgcaggaactgagactccttgacggtcttgccggaacctctctgcacgcccaccttcttggcgtactcgaagatctcctgatccttctgcatccggtcggcggcgcgctccatggacagagctttgccgtgggccgggcacatctccacgcaggaaccgcagccggtgcagtcctcagcggagacggcgatcatgaacttcttgccagggttggtcttgctgtccacggtggtcaggccctcagcgtcctcaggcttgagcacgaagggacgcaccacggcgtgggggcagacagtggagcaccagttacactgggtgcagttctcagcatgccagacggggatgtccacggcgatgccgcgcttctcaaaggcggcagtgccggagggcaccttaccggtgacatagggcaggaaggcggagacgggcagagcgtcgccctccaggttgttggtggggatgaggatgttgcgcacgtaagcgtcctgctcggcgttgacggtgttgagcttcagctcgggcttctcctcgtccttggccttggcccagctggcggggaccttcacctgcttggcggcggtctggccggccatgacggcggccacgttcatgtccaccacgttctggcccttggtgccatagtcgttgatgatgccctgcttcatgtactcgatggccttgtcggcagggatcaggtcagccagcttgaagtaagcggactggatgatggtgttgatacggcccttcagaccgatgctgcgggcgatgttcaccgcgtcgcaggtgtagaacttgatcttcttcttggcgatggcccgcttgatatcggcgggcaggcgggcctccagctccttgccttcccagtcgcagttgagcatgaagatgccgccgggcttcacgtcccgcaccatgtcgtacttgccaatgtaggcggggttgccgcagaccacgcagtcagcagcgcccacgtagtaggaggagcggatgggcttgtcgccaaagcgcaggtggctgatggtcaggccgccggacttcttggagtcgtactggaaataggcctggacgtacttgtcggtgtggtcgccgatgatcttggaggtgttcttggaggcacccaccagaccgtcggagccgatgccccagaacttcacggaagcctgggtgggatcgtggggcatctcgaactcgcacttgtcgatggacaggtgggttacgtcgtcctcgatgctcacggtgaagtggttgtggccgcccttggccaggtgctggaagacggagtacatgtcggcgggggtggtgtccttggaggacaagccatagcggccgccgatgacccggatgccggtacgaccggcgtcgttgagcacggccgtcacgtccagatacaggggctcgccgaaggcgccgggctccttggtccggtccaggacagcgatgcgctggacggtctcgggcagctcagagagcatatgcttgggggagaagggacggaacaggtgaacctccagcacgccgaccttggcgccctgagcggtcatcacgtccaccacttcctccagggtaccgcagacggaacccatggccacgatcacgtcggtggcgtcgggtgcgccgtagtagttgaagggcttgtagttggtaccgatggcggcgttgaccttgttcatgttctccaccacaacgtccaccaggttgttgtaggcggtgttggaggcctcgcggtgctggaagaaggtctccgggggctcgttggagccgcggtgataggggtggtggggcaggttggcctgctgatggaagcggtccagggcctcccagtccaccatttccttcagggtgtcatactcccaagtgcgcagcttctggatctcgtgggaggtgcggaagccgtcgaagaagttgatgaatcccatgctggcctggatggcggacagatgggacacgggagccaggtccataacctcctggggggtgccagcggccagcatggccatgccggtaccgcggcaggccatcacgtcctgatggtcgccgaagatggacagggcgtgggtggtcagggtacgggctgccacgtggaacacgccgggcaggccctcgccggcgatcttatacaggttggggatcatcagcagcaggccctgagaggcggtgaaggtggtggtcagggcgccggtggacagagaaccgtggacggcaccggcggcgccggcctcagactccatttccacgatgttcacacggttgccgaagatgtttctccggtcctggttggcccattcatccacgtgctccgccatgggggaggagggggtgatggggtaaattgcagcgacttcggtgaaggcataggccacgtggccagcggccgcgttggcgtccatgctcttaaagggtctggtgtctttcatttcgccgcgcctcctttctgtgccgccatggcacgaacctgaacataagtgaactccggcatctcccgtccggtgatcacgccgttggggcagacataggagcagatgttgcagtcctcgcaggccacgggctcaatgacagcgcggccgtcctccagatggatcaggccgtccggacagttgtccacacagtcgccacagccgacgcagcccacccaacacagctgcttacgcagctcggggtcgtccttggaggcgcagggaaccatcttggcgcccttgtagggcaggatgacaggcagctcctgggggcagacgtggacgcaggcggtacagccgacgcacttgtcggggttgaccttggcggtaccctggacgatctccagcgcgccaaagcggcaggccttcacgcagtcgccaaacccggcgcagccgtagttgcagtggccgtccaggctcagctgcacggcctcgcggcaggtagtggcaccagccttggcgtacacctcgtggttgtgccagccgccgcggcagcggacaaaggccacggtggacttgagcttggtcaggtcgtgataggtatcctcaatgatcttcttgcggcaggagacagtgcaggccacgcagcccacacacttctcatagtcgatggtggcgcagttgtccaccacggagatggcgtcctgaggacatgcctccacgcagtcgccgcagccgatgcagctgtggccacacagacgcagggcaacctcctcttcgtcctggttggagcagggcacgaagttggaggcgtcgtcgggcaccatgtggatgagcttctgcacgcaggcgttggcgcaggcgccgcagccgttgcacttgtccttgtccacctggacgttaccgtccacgatggacatggccccaaaggtacaggcggccacgcaggagccggcgcccacgcacccataggtgcactcgccgggagcaaagccgctcttgacggcctcctcgcaggagccataaactctcagtctggacttcccggcggcacaaccggaacatttgatgaatgccatttcatgcttggcagggaccacctggccgccggtgagggcagcaatggcagcaacggcttcgtccatgcaggccggacatagattggccggaccgccttccgcgatggcttgggcgcatttgtcacaagtggcaaatccgcatccgccgcggccggtgcagtctccgcccggaaggagcttccgaacttcttttgcaagattgtttggctgcatacgtaattcacatccttaaataatgcttcgcgggggttcctaaaaatccagtgatattatcctccgatcaagacagaatgtcaacatgcttcccggcattttttctgattttttgtttttttctatagtttttcaccagagtgcccccttttctttattagcaagaactaacttagaggccgctaccccctgattttgctatcattttgcctatttcccctcttcttgacatccccggcatagtgtgatagagtgatttcgtatgaaaatatccagggagggagcctgcgtgcccaaggtctttttgtccggctacgccaaactgccggagaacaccaccgcccaaaaactatacaaccacctggtgctggtggtcaccgtccagacccccgaagggaccatcctagacgccgactgcaccatggccaccgagctgggccgccgcttcatccgggagctgctcacgggttacgatctccaccggggacccgaacccctgaccaccctgctggcccagacctattacggccatctccgccgggccctgcagacctgcatcaagggcatctgcacccagttcgaccagctaggccacgcccacccgccggcgccgtgacgctgctcggtcggcttgtatgaccttccgtgcgcctttgtcccgtatactatggtattaccacatatagtattatatataatgtaagggggaacctccatgctgctctccggtgaagagatcaaaaagaacctgggcggaaacatcatcatcgagccctaccgcccctctcagctcaaccccaacagctacaacctacgcctgtccaacgagctgttggtctacgacaccgacaccctggacatgaaggccaacaaccccacaaagcacttgatcatccccgaggagggcctgttgctggaaaccaacaagctctacctgggccgcaccctggagtacaccaagaccgaccaattcgtgcccatgctggaggggcgctcttccgtggggcggctggggctgttcatccacgtgaccgccggctttggcgacgtgggctttgccggctactggactttggagatgttctgcatccaccccatcgtcatctaccccaatgtggagatctgccagatctattaccacaccatccagggggagtacgaaaaatacgactccggcaagtaccaaaacaacactggcgtgcagcccagtatgctctacaaggacttccttagggaccagagcgaataaccacaaccaccacttccccaccccctctcccagcagcggagagggggttttctgtcccggtaggctgtggtcaagaaaaagaccccggaccctcccagagggaggtccggggtcttttggaaaacatcggttgaggttgcgctgtaaggatttgcgggggaggatgggcaatcaggccttcttggccgctttggcggctgacttggcagctgccttggcgtccaggtcatccagctcagcgcgggtgttcttgaggtagatctcgatgccctcttccacgttggcccgacgctccttcttgctcatacccacgatctccatgaagatgcagagcacaatgcccacgaacaggccgtaggacgggttggcacaagtagcgattgcgccggcggtgatgcccgccacaccgcgctccacgttggtgcggcacatgttgatgcccacgtagaaggagccgaaggcctggatgatcagggtctgggccatggccaggggcaggatgggccggatgagggccatgaggggcacgatcagctggcaaatccacttggtggtgttgaaggtgcaggagccgccgaagatggagtacatgttctccttgccggtcttatagcgctcggccacagacacggtcatggcggaccacaggggaccggacatggtgcaggtggggctgaagaaggcctcgatgaggttccggaagccgcagcacatgttggtacggtcggggttgatgtcgatgtactcgtcctgacgatagcgcttggtgtcctccatgaaggcggtgccgcccacgatgtcgccgaaggcgatgacgtagcacatgatggccatgggcaggtccttgagcaggatctctgcaggaggaatgccgatgcccacgatggagaagttatcgcacacccacatcaggccggggatggggttgaaccagaaagaggtgacggtggagaagtcgggcagctcgcactcgccgatgatcatggcgatgatgccggccacaatgatggcgggcacgaagccagccttggtcagcagcttgatggcccggctcttgctgccgaacttcaccttgccaaagccgttggagaagagcaggaacaggcccagtgcgcagccgatggaccaggagatggggtacataaagaatcccttgccgccatctgccacggacataaagccatacgacccgcaacaggcggcaaatcctgagccaattaggatacctgctttcaaactctgggggcagatgtcgatgagcttggtggcgatgcccgtaacacccaggatgacgtacatcaggcccaggatgagctccatacccaccagggcgtacatccggtccgtcccctcaaagttgagcaggaaggcggtaattagaggtacggcaggggtaatccagccaccgatcagggggtcgcccagggtgttgttgaccatgtagagcagctcatggacgaacacgatggacaaggccatttcaaaggtaaatccaaacaggtcctgcagataagcagtggccgcggagccggtcataaagacgacgcaggcctggatcatttctggaatttcccactcatagtggatgaaggggatgcgcaggtcaaatttccagatcttgatgcagggctgcttctcaccgtctttccgccgggcggtaggaagcatgagattcataaacttacagtccctcctaacaaaagtctcttttcttgcgctgcaatggttctgccggcaaggtcgttatcacgactttgccggctccttctggcgctttacctcgatgcagtgctaattatagcacgttcttcacaaaacgcaatggatattccttcgtcgttttacacgaatatgcattatttgcacaagaaacttttttgtttttcggttgtttttgcccgttttcccgttctttttgaaaaatctttccagttattatgtagaaattgttaagttgctgaatatcccttcaatgtttattctcttctaatgtctgaaaatcaggggtttttctgtctcccgccgcgcagcggcgtccagagatgccatttttctgcaagcttgcatcttttgacttgcatccgaggcaatccgtcagcgctgtaaaaaagcgggagagaccgaagtctctcccgctgatagggatgaattggtttgtctcaatcgtattccggggtggttgtagtagtcgtagaggttcccgaggaggtgctctcttccagcgtaaacatgcttgcgtcggcccggacaccctgtccgttggaatcgttgacctggaagatgttcacatccgccggggtcaggtcggtggtgaaggggttaaccagctggttgatcatctgcaggctctctccgggcagcagctcatagcagtagctgtaccccttataggaggtgttgccatccccgggcagggagttgccggtgaccccggtgtccaggttgacccccacggccttggtgacaaaccaggtcaggtcggtggcggacaggtcggtttcaatgttgcgctgcatgatgtccacaaactggtccagcttgccgatattggacaccagcttcttggccacggtgaccatcagattgcgcacggtctcgctgcgctggatgtctcccaaggggtagccggtgccgtcgccgtttttccggaagcggcagacctccatggcctcctggccgtccagatgctgcatgccgggctggaagtggatgctcaggtcctgggtagggtcgtcgtaatacatctccacgggcacgttgaaatccaccccgcccacagcgtccactagctccacgaacccgtccaggtcaatgctgatggtaaagtcgatggggaagcccaccaggtccgagaccacctcccgcaggttctcgatgcctccgtggagggaggagttgatcttgggtaccgactggtccaccaaggtatcccgggggatggagagcataccgatcttttggttgggcacgtcataggtgaccagcatgatggcgtcggcattgccgctgacttggtctgggcaggagagcaagaaggtataagtctgctctttccgggtgtggttgccggcctccatgccgggcacattctccacatcctggctggtggaggaggcggttgactgcttcatttccggctcgggcaccgccactttcagaagagcgtagccgatgacgatcacagcggctaaggccacaacggtaatatatacgcccttgaggacgcggtatcgtttcttcagtctgcgtttctttttctgggccacagtatcggtctcctttgtgtctgtttccctgcgaacaaaggcgcatgagtggatatagtatacataattcattggttttcggcaagcccctgccgccaatttcccaattattttatagatttttcagttctttttcaggtttctccctctttttctcctgggtgtctttacaattctttggaaaatttcaagtttcttcagacatttcgccttctttctatcgtcccttctctttcgtcatatttttccttgacaaaatatgtggtaaaatatatactgtatatgttcttttttataccactacgagaaagaacatgtgttaccacaataaggtacaacaccacaaagctctgccccagccttttttggctggggcatctttaatatcgggaaatatcacataggaggggccctttatgaaaaaaattccgtatacactggggttggacattggcatcacctccgttggctggagcgtcctggaaaatgatctatatggcgagccgatgaaaatcgaaaacctaggggtgcgtattttcagtggtgccgaacatccaaaggatggctcttccttagccgctcctcgccggcaagcacgcagcagccgaagagtgatccgccgccgtcggcaccgaaaggaaaggatcaaacatctcatcctctcatttggtctggtctcgcctgaggaaatggaccgattgttatcctcttctcaggaaaaaagtgtctatgagttgcgagtagacgccttggcccgcgcgcttaccccccaggaagccgtgcgcctattaattcattttgcccaacgcagaggttatcgttccaacagcaagtcagaagagataaaagagggtgcagagactgggaaagtaaagcaggccatccaagaaaaccgccaacgcatggcagaaaaaggttaccgtaccgttggggaaatgctctggaaggaccccctgtttaagcgcgtcaatcccgatggatctctggtgcttacggtccacaacagcccagatgactacaaaataaccgtggagcgcacgatgttagccgaggagatccgtctcatttttcacacccaacgcgctcttggcagcacctgggcagcggtagaattggaagaacgttatcttgacatttggggcagccagagaaatttcgacgaagggccaggtggaaacagcccctatggcggcagtctgattgaatcccatttgggccgctgcaccttcgagcctgaccaacctcgggcaccaaagagctgtttcaccgccgagcgttttcgtttgttggaatttgctaacaaattgaagatagtcggccatggttttcccgctgaatttttgcaggaagaccagcggagaatcctgttggaattcgccatgacctcccccaacgggacctatgcacagctgcgcaaaaagctcggtctttcggaggacactttcttcaacaatttatattatggggaaaatgaagctgcaaaggtagaaaaaaagaaactcggtttaatgcctttttaccacactttgcgcaaggcgctcagccgcatagaaaaaaacgcggttgataccctctcccccacacagttagacgagattcctcggattttaaccctttacaaggcagaccaaagcaggatcgaaaagctgcaagagctaggcctaccggagcgctattttccggttttattggaactttccccttcgaaagcaatgcatttgtcactttctgcaatgaaaaaactacttccctatatggagcagggttttctctatgacaaggcatgcgctcaagtctacggcagccacacaggaagcatcggctctgcaacacgctccaccaaactgtctctggaaatgatcgaagagatcagcaaccctgtggttcgccgcgctgtttctcaggcaatcaaagtcatcaatgccatcgtccgccagtacggcccgcccgaagtcgtccgcatcgagctggcccgggagctgagcaaacccaagaagatacgggatcagctggagaaaaagcaacaaaacaatgccgcatggaacgatgaaatccgccaacaaatccaagagtataaaaaagaacctcccacagggcaggacatcgttaagttcaagcttttccaccaacaaaatgggctttgtctttactccggcaaaaacttggatctttccagactgtttgagccgggatacgtagacgttgaccacattatcccctacagcatctcttttgatgacagttacaacaacaaagttctagtactcaccagcgaaaaccggcagaaagggaaccgcctcccctttgagtactttggccacgaccaggaccggtggcatcgcttcgagaccttggtcgacacacagatccgtagtttccaaaaaagaaacaacctattgtgccacacgttaagcgaagaacagcgcagcgggttcaagaaacgaaatctcgtcgacacccaatatctctccacggtcctctttcatctgatcgaagaccacttgctctttgcagaaaccggcaactataagagaaaaacccaggccgtcaacggttccatcaccgctcatattagaaagcgccttggcatcgaaaaagttcgcgccaatggtcatttgcaccacgccaaggatgcggctattgtggcctgtgtgtctccaggaatgatccaaaagatcaccaacttctccaagcgtcgggagtgcgcttggaccaaagaagggtacgtggattatgaaaccggtgaactgctcaccaaggaggcttacgaagaaaagtacgcccccaagtttcccccgccctggccaaagttttcgcaagagttagaggcccgcttgagtgaagatccccgcagagagattgatttcctacatctgtccacttatgacagtgacgaggccctctcccccgtctttgtctcccaggccccaaaccgaaaaataacgggagcagcccatgaagagaccatccgcagcgccaaagaacccggcggcacggtcagcaaagtgcccctgtccagcctaaagttggataacagcggagagatcgccgattactatcgtcccgaggacgatccccttctctatgaagccttgaaagcacgcctgctcgcctttggcggcagcgggaaacacgcctttacagagcctttttacaaaccgaaacacaacggtcaacccggccctcttgtgaaaaaagtaaagctttacaaaaaagccactctcaccgttcccgtaggccacggcatagctgccaacggcaaaatggtccgtttggatgtcttttatgtccagggagagggatactacttcgtgcccctctacaccgctgacacggtaaaacccggccttccttgcttggctgttactaccagcaaaaaagatccctcttggaaaaaaatgcaagaggaggactttttgttctccctttactctggagatttggtccgcattgtcagcagcaaggggattaagctgaaccttgccaagagtgccgaaggccccgcctccctaacagtccaagatgcactgttatattatggcggcttcaacatctctaccggcgcactgaatctcgccacacacgatggaagatattggcaatccggattaggtgggaagcgcctctccctcattgaaaaatatcaggtggacgttctcggccgctattcacgagtatctttgccggaaaaacgcatgaggttttcactccatggaatttcgtaacatcgtcatcgccaatccgcccggctgagcatacgacaccgccagctgtgcatcgcccaggaggaggaggtcctcatccctatagaagatatctgcaccctgatgctggaaagccagcaggtgcagatatccgccgcagcactggaaacactggcggtccatggtgtcacggtctttttctgtgaccgtcagcatctgccatccgcccagctgctgcccatccatcaatttcatcggaagaaaaaactcctctttgcacagttttctctgggaaagcctctgcaaaaacaactttggcagaccattgtccggcaaaaaatccaaaaccaagccgcctgtcttcgcctggcaggcagacagggcgaggagcttttgtctgaaatggccaaccatgtccgctcgggagacagcaaaaataccgaagctgctgccgccgcccgttattttcccctgctgtttggaccagggtttacccggggcgacgattgcctggaaaatgccgctttaaactatggatacgcaattctccggggctgcatcgcgcgcaatttggttatgcacggccttgagccctgcattggcctgcaccaccatagtgaactcaaccagtttaacctggccgacgacctgctggaaccctaccgccccttggtcgatctatttgtagccagccgtagctggaccccgcatcaaacagaggaactgacaccagcaatcaaacgaagcttgttcaatctgaccaattacctggtggcacagagccaaaagaagctccgggtcatgacatccgtcaaccaagccacagccagcctggccgcttccattgcggccggctcccatgcgctgcagctgccggcactgctgcccctggaggaagggacgtatgaataaatttatgaggatcttggtattttttgaccttcccgtaaaaaccaaagcccagcggcgggctgcaacacgattccgctcgttcttgctcaaagacggctatcacatggtccagtactcggtctatgccagggtatgcaatggcgctgactctgtagccacccacaaggcccgcctgtacaccgccctgccagcaactggcgccgtgcgcatgatggttgtcacagagcgccagtttaacgccgtggaagttctggtgggacccaaaaccttttacgatcagccgcaaacagagacacaattcatggaattttagtttttaggggcgatccggttgctgctcaggttgtttttatgaaaaaacagtacgatttcccaataagaaatcgtactgttttttctgcgtttccccatgatttcgagccaaagaacagcaaattttttgcctgctgcatgtttcctgctctgtctattataccactacgagaaagaacagggaaccacaacgaagtgattcaacaatcgcttcccgcaaaaattataccactacgagaaagaacagggaaccacaacggacggaccggcggagcttgccgtcctcatattataccactacgagaaagaacagggaaccacaacaaaacaaaacccccaccagagactggtgggattataccactacgagaaagaacagggaaccacaacgagttctcgttgacctcgtctatcaggcccattataccactacgagaaagaacagggaaccacaacatatcatcgggcacttgactgtccttaaagattataccactacgagaaagaacagggaaccacaaccctcaagggggacatagttcagggaggcctattataccactacgagaaagaacagggaaccaccaaaacactcccagcaaaaaagacatgctgggcagccaaagaattgggccaaaccccttgcaagatggctggggctgtgctataatgggcacacttgaaagatgtcagttaggagagtggggcttgccccgctctttcttttatgagtcgagcctggtcctctcccccaccggcggagcgggccggttctccgaccgttttagttcgcgcgccgccgggcgcagggaggtttttatcgtatgtctaaaatcacggatctgacagcccagctggcccgtccggtggtggaggccaacggctgcacgttatgggacgtggaatacgtcaaggaggccggcagctggtacctgcgggtctacatcgacaaggaggacggggtctccatcgacgactgcgaggccgtcagccgcgtcctgtccgacctgctggacgaggccgaccccatccaggacccctatacctttgaagtctcctccgccggagccgaccgggccctgaagcggcccgagcacttccaggctttcctgggcgccccggtggacgtgaagttctatcaagcccagaacgggcagaaaacctgcaccggcatcctggccggtcacgacggccagtctctcaccctcaccctgggccaggacaccgtcacctatcccatggaccaggtggccctggtccggctgcacatcgccttttaacattatagtaggagaagatcggtcatggctaagaaatcatccaaaaccccaaagagcaacgagctggacggcaaggaattctttgccgccatcgccctgattgaaaaagagaagggcatttccaaaaactatatgctggagaagatcacccaggccctcatctccgcctacaagcgggaccacgagggcatcagcgacaacgtcttcgtggaggccaacgagatcaccgagaccgtgcgcatgttcatcaaaaaggagatcgtagaggaggtcaccaacccctacaccgaagtggccctggacgaggcccgcaagagcctgccctccgcccaaaccggcgatgtggtgcgcattgagatcaagccccgcaacttcggccgcatcgccgcccagaccgcccgccaggtgatcatccagggcatgcgggaggccgagcacaacatgatctacgacctctttagctccaaggaacacgaaatgctggtgggcactgtcacccgcatcgacccccgcaatggggccgtgtccctgcgcatcaccagcaacggcgagtccaccgacgcctacctctcccccgccgagcaggtccgtggggaggtcatccgggagggcgaccggctgaaggtctacgtggtggaggtccgccgttccacccgcggcccccaggtcatcctctcccgcacccaccccggcctggtcaagcgcctgttcgagctggaggtccccgagatctacgacggcaccgtggagatccgctccatcgcccgggaggccggcagccgctccaagctggccgtctggtctgccgacgagaacgtggaccccatcggcgcctgcgtgggccccaagggcgcccgggtaaacaacgtggtggccgagctgggcagcgagaagatcgacatcatcaaatacagcgacgatcccgctgcctacgtagccgcctccctctcccccgccgacgtgctctctgtcctccccctggagggctccaagagctgccgggtggtggttcccgacgaccagctctccctggccatcggcaaggagggccagaacgcccggctggccgctaagctcaccgggtataagatcgatatcaagtccgcctccgccgcccacgagtgggaggaagaggacgccgaggccgcccggctggccgaggaggaagccgcccgccaggctgcccagcaagccgaggaagacgcctgggacgacgaggcccaggaggaggctcccctgaccgacgaggctctggaccaggcagtcccggcggaccaggacgacgaaggccagccggtctccccggaccaggaaggcttggaagaccccgctgctgaggaagacaccaaccgggccgactgaccggtcccccactgaccaaggaggtggcaccgtgcccaaaaaaatccccctgcgccaatgccttggctgccgggaaatgaaacccaagcgggagctgatccgcgtggtccgctccccccaaggagagatctccctggacttccacgggaaaaaaccgggacgcggggcctacctttgccccgacccagcctgcctgaagcgggcgcgcaagtccaaggcgctggagcgggctttttccctgcccatccccgatccggtctatgatcagctgaccgagcagatggagggaggtgatccggatggataacatcccctcccttctgggcctcgcgctcagagcgggacggcttgccgtgggagaggagcccgtcggggccgcctgccggtgccacaaagggtacctgctgctgctggccagcgacgcggcggacaacaccatccgccgggcccttcagttcagccaagccggaaacaccatctgcctgaccgttcccctgaccaaagaggatctgggcagcggcctgggacggcgctcctgcgccatgctggccatcaccgacgtgggctttgccgcctcggtggcccagcagctggccctggccgaccccgaggcctacggctccgcctggcagaccctatccgccaaggccgcccgggccaaaaaacgccgggcagagaaacatgccccccacaaagacaagggggcccgccggaagaagaaccccaccggcggcacgggctgactcagcccttccgatcctatcgtccccaaccccgccggctgctccggccggggagagaaaagagcaaacaagcggtcctgtcccccgggcaggccgtgatggaggtggctttatttgagttttgagaaatatcgcgtacatgaagtggccaaggactttggcaagcagaccaaggacatcacacagatcctgacaacctatgccacaacgcccaagaatcacatgcaggtcctagacgacaaggaactgtccatcatttttgaatatctgacccagcacaaccaggtctccgacctgcaggccgtctttgccaacgcccccaaggccggcgagggcgccaagggcgacagccgcaagcccgccggccagaagggccacggcagtgagggtaaggaccgcggccagcagggcaaggccgcccagcagagcaaaaccggtgggcagcagcccagagccggtggccagcagggcagagccggtgggcagcagcctagatccggtggccagcagggccaaggcaaagccggcggtcagcagggcaaggccggcggccagcaggccaaacccgcccaggcagaacccgcccgtcccaccacccgcgtacccgaaaagaagctggtggacacccggaaggcgggcaacgtgaacctggcccgttacgacgagcatctggagaccctggctcctgagcgggccaacaagatgcagagcggcaagcagaagatccagagcaagggagcccaccgtaaaggagccaatttcggcaacaagcgccgccaggaggagcaggagaagatgcgccggctccagctggagatcgccaaaaagactccgctgaccgtcaagatccccgacgccatcggcgtgggcgagctggcctcccgcatgaagaagaccggcgccgaggtggtcaagaccctgatgaagaacggcgtcatgg

SEQ ID NO: 1967 - DNA, 18558 bp, synthetic construct
  misc_feature 1..18558: note = Synthetic
  source 1..18558: mol_type = other DNA
accttttaaaggccactacgactctaacgatttgcaaatcttacgcattattgctggctattccagctcttctttagctaaggccatcgtataccaaaaagccatgcgccaatacgaagaattgcgggctttgcaggaaataggcaattccttaaattctagtatcgacgttcccaaaacgttacacaaagtgctagatcatgcttgctcactcctaggagccaaaaatgcttctcttatgcttttggagccagatcgtcagcatttgcgtatccgtgaagccaaaggtttaagcgaacaagtaatagccaacactagagttaaattgggagagagagtttctggcaaagtagccttacaaggtcaccctgttagtttgccacgtggtctgagttcttccggagaagagctggaagcagccctttgcgttcctttaaaagtttccgacaaagtgatcggcgttttaaatgtgcgcggccacaacgattccaacgaatttaccgatgacgatattgatttagctactcgcttagcttccatgtcggcagcggctatcgaaaatgccgaattacacaacaaattacaaaatttatttgttgaatcaattacggccttggccaacgccatagatgcccgcgatccctatactcgcggccattctgaacgtgtagcagctttctctgtactcattgctgagcgtctgaattttaccgctgaagaaatttggaatttacgtaatgcagctttattgcacgatataggtaaaatccgtattcgcgacaatattctcaataaaccagacaagctcagcaacgaagaatacgaagagatgcaacgccatgcggtctatggcgccggcattatgatgcctgtaaagagcttccgtccgctcattccttatattttgcaccaccacgaatggtataacggagcaggatatcctgatcgcaaacgtggcaacgaaattccactttgtgcccgcattatttgcgttgccgacagttttgacgccatgacttcagatcgcccttatcgcaaaggaatgcctatagaaaaggctataaaaattatccgcgaaaacagaggttcccaatttgatcccgacatcgccgatatttttatagaactctactatgaaaataagttgcaaccaattatgaaaagcctcaatagcacaggctcacacgacgctttggaaggtgacggacagcatgacgtcatcacttcagacgttggaggcaaagctgttgtctggcgcagcgccataaaagaggctatagaagctgtaaagcacaaaaggaataactaaaagaagactagccttcaaaaattaagcttttaatttgtaagcaaaaacagtcaaagctaattcgcgagctaattcggccgccaaacgagaggtttgagctacgtctcttgtttcctgatcttgcacatatactccgcacacttgtaccaaaggaacgggggcaccttccaaagagcgcaaagccttcaaaagctctctgggctcatagccaaaaccagctggacgttgcacagccggcgcccacacaggatcgacaatatccatattcagaataactctgctttgcactccgttaagttcggctaaagcagtttttatggcaatatccagatctacttcatgattggccaataagcgctgattatatctgacccaatcgcactcttctgaagagaaattgcgacttcccaaataccaaacggtacgttcttctggcaaaactccctgattgtaggcatcacctatagacatgcccatatagggaacattgacagtagctcctatatatatagtgggaagttgaaaatcggcagaagtatcgccaagcaataaatttacgccatcaaggcgctcgttactgtcataagctgagaaattggtgaagctgcgtctcaatttgggcgaatagggagagatacctagggaatattctctgattgccgcagcagtatcgtcaatgccgtagataagtaaatcgcgctgcaggtcaacttcctgttcataaagtgcctcagtacctaaaaaaccgaccatctcagctttccaaccctttgtttaaatgtgaacatacttttcgccgagcgagttcgccacgccagccgacgaatccgccaccccctttccacaccagttatcctttctccccttcctttttccttgccaatatcccaaagaagataagattcatgcataaaatagcattcttaatctgcatataatatatggcaagaaggatcaatttatggtcatgtggtataatacaggcgaatttttttatgtgttctgatcaacgcagctttttcaaaaatttagttgccgtttttgtgtgtcttacagcagtaagcgccattattttttgtgtcaaagcggctccggtatgtgctgaagaagggcgctacccggagaacttagcttggcgcttggttaccgagcgagagttgtctttaatcactcagtgcccagaagctttccatgagcgagagcatagcgctcctcccctttttgaagctccttccgtccctatggacggcctggaagtttttaccagttccgcttcaaaaagcttcacctcaagtacagtaccttctacctgggaagtgcctccttttgcagttatcggccctccgcttcccgagcaaaaaaagagctcttcttctcaggttcaaagtacttctgaagcttctagcaatttcaaaaatgcttttcgcccttcggatcctgtaattgtacctgccgtttttggcgaaatttcggccgattccggtcgagcagagttgcccgatcctaatttgcgccctttaaaagcacaatatttggacaaactcaatcgaccagacactcaaatgcctacgccctttagtctgcgtcgctaccacactaaaagcttaggatttttccaaatagctctctatggtaacgacaagggactgttgacagaacaaacttataacacacttagagcagcagctcccaatttgcgctctctcaaaggctttggctccaaagcttttatatctttcctccctgctccagagccagaaaagcctttcaatttagagacagccaaaggtgaatttactttttctgcacttgaacctgaaggagacgttcgtttcgatcagctcgatccggggctgattaagtctagaaccgctcccagtttcaataaaattcccgtcacttctcttcctgaagggtttgatgaggatttgcgccgtcagttgacggcttctcaatataaaaatatcaggatcgaagaagatcctgcgtctggccagtcactttacgctggagtcagctctggtaaagaagaccagtcggatagtaaatctgacaaatctaacgaccaaactaacaacagtaacagtgctggggatctttttgccggcaatttagcaacgtctgccaatgacgctgattctgcggacttaaatccctttgctgtgaagactaacttctccaaagaccttaagggtatgtacgttatggaaatctattatccgcagcagagcctagtttgcgaattagctgccgataccaggtttgccgatttacgcgccatgctcgatatagctcttttagtgcaagcacgtatgcaaaggtggtaattatcgtccaatctccataagcccgaagcgacaaaataaaacgttttacgtcttcagtggtcaataaaggcattttttagtgagaacggccccagttaagttctgttgttccttctaatgtaggaactcctgtttcttgttgtctttttttgtaaaaaggggtttattttttgtgcaattgtgttaatatagcgcttgcatgagaccacgtatgtctgccagcaacacagggaggtcagtagttggacgattcggtcgtggagttccgagacgtaactcggcaatatggctctgtgacagccgtcaaccggatgaacttatctattcatcgcggtgaatttttttctttgttgggcccgtcagggtgcggcaagacgacgaccctgcgcatgatcgcaggttttgatgaacccgataacggggaagtctttataaatggacaggaagtaactcatcttcctccatttcagcggcaagttaatactgtttttcaaaactatgccctgttcccgcacttaaacatttacgagaacatagctttcggtttgcgccgcaaaaaagtaccggaatcggaaattgccaaaaaagtcaaatgggctttagaattggtacagcttgaaggtaccgaaaaacgccaggtgaatcagctttcgggagggcagcagcagcgtatagccttagcgcgtgccttagtaaacgaacccgaagtgctccttctggatgaacctttagccgctttagatcaaaaactcagacgcgagatgcaatttgaattgaaacgtctgcagcgcgagttgggtattacttttgttctagttactcacgatcaagaagaagcccttactatgtcagattcagtagcggtcatttgcaagggtaagctagaacaagtcggctctccggcggagatatataatcatccttccaccagatttgtagccgattttataggtacagccaatttcttgccggtgcatattcgtcagattcacaatggcaaaacaactgtaaaccttaccgggcgcgatattttagtacctactcgcaagggtttagctgaaggcagttgggctgatttatctattagaccagagcgtatccaagtattgaaggaagcctcagaagacggtatcagcatacctggcacagttattgacagtgtatttatgggagctcacacacgtataaatgtgcgtgtgggagacaagtatacagttatggctgagcgccaaaaccaggatcacttgtacaattctgagttttcccgaggcgattctgtgtggcttaattggggcatagccagcgccactctccttccccaatcgaacaacaattagcaaacctattatgaaaaagcattctttgcgagtgctggctcctgacgcctctcttttgagcaggcgtcagtttttaggatacacagccggtgccattctagctatgtgtatgcctggctgcgtatcttcttcagagcgcagactcaacatatacaattattcttactatatagctccagatacagtaaaaaacttcatcaatcagaccggcatttctgtagtctacgatgagttttcttctcaagatgtactttttgccaagctgaagttaggtgccggctacgatttagtagtggcttcagattatatgttgcgtcgtttgatccgtcagcaaattatagatactgtcgacggcttcaaatattacgacgatatgatcgatttagtaaaaaaagagccttggtcttctttgtgccgctattgtgtgccctacctttggggtaccactggcatcggttacaaccgcaagtatgtgaaaaaaattccaacttcctggaatgatctttggaatgaagattatgtaggccgagttactatgctggacgaaaagcgcgacgctataggtgcagctttaattaagcttggctataacggcaactcttgcgatcccaaggagctggctgcggcccaaaaagagcttgcccatcagaaacacattttgcgtcaatataccaacgattatatcgacggtttggctagaggcgaaatttggttagctcaggcatggagtggcgatatttctcgtgccaaagatgccaatcccaatattgattatattttgcccaaggaaggcagtttcttttttgtagattcttggtgcattcctaaagatgcagctcataagcgtgaggctgttgagtttcttaattttgtcatgcaaccggaaattattgctaaagtgactaactttaccagttatcccaacactatcgcaacttccatgccttacgtcagcaaagaattgataaataagcctttaggatatccgcctgcagaaatgatgaagcgcacttttgctcaggacgatattggcgccgaagaaaaaaattgggataaaatgtgggagaatataaaatttaaaaactaatggctaacaataatttatctcctctcgataaaaccgagcaaaaaatcgacgcttcaaaccacaaagataattttatagaaagcggacaagacaataattcaaatacggtgtcgccagccccgattaagcctgtcaaacaaatgagcaaaaaggccatcggtatccttttggtgacgccttttgtgctttatattgtcactttcttcctattgcctttgggctcggttatttctatgtctacccatacaatcaatgatgattatatgctaacttcagcttgtagcttagaaaatttccgtaccgtatttaatgccgacaacttgcctattttgttgcgttcagctaaatatgcggcttgcacaactttattttgtttgttgcttggctaccccttggcttggtatatcgctcgttatggtggcaagtataagcctttattgcttattttagttatgttgcctttctggacttcatacttaatccgtatttttgcctggatgacaatattgcaaagtgaaggcgtcttaaatacttttttgatcagcgtaggcttaatatccgaaccgctaaacttattaaatacacacttttcagttatattaggtttaacttacggatttttgcctttcgccattttgcctctttatgtatctttggaaaaattggatatgtctcttctggaagcagctgccgatttaggagctcctccgagcgaaactttctttaaagtaatttttcctctctctttgccaggtgttactgcggccagtttgctcacttttgtgccggccatgggcgattttgtcactcccgacgttttgggcggagtcgatactatgatgattggcaaccttattcagcaacaatatttggcctttttcaattggccattgggctcagctttatctttggtattaatgggcattatgctcctctctattttggccttccttaaaatgtccaactctatggagtctttggtatgagtgtacctcgcctttccgaaaaaaaacctccttggtacttgcgcttgcatactttgtgcgtgtacctattcttatatgctcctattattgttttggtgcttttcagcttcaatactgataggcgcaacacaacttggcaaggctttactttggattggtattttagccttttccaaaacgaaactattttacgcgctttaggcaacagcttaaaagtaggcttatgtgccacattttttgctactttaataggctcattggccgctttgggcttatcgcgctatgaatttaaggggcgaggcttagtcggctccttagtatttattcccctagttgttcccgaaatagttatggctatttctattttgacgcttttcctcagcttaggcgttaaattgtcattatttacagtaattctggcccatattgctttttgtattgcttacgtaacaattactgtacgcactcgcttagccggcctcgacccttctctagaagaagcggccgccgacttgggagctactcgctgggaaactttccgcctggtcaccctgccccaaatttggcccggtataatttctggcgctctcctctgctttacgctttcctttgacgattttgtcattaccttcttcaacgccggcgtaggcgcaggcaacttacctatggctgtgcactccatgctaaaattcggtgttactccggaaataaacgctatttctactattatgctcgttttcagcatatccttaatggtagtttatacctttattgatcgcccgaaatcataatagcgccaagtgcaatattggcacgagcgcagaaccgtcaaagccgcctatcgctaaagtgatggcggctttatttttaattgaaagtaacttttatttttcgccaaaaaaatcacttgtaccatatttgctattgacatatattggtaaaagttatagtatgtggttactttcttgtaccacaacgagaaacatttaggttgctatgatcaggtagtataccttaaagcaacggcccggccgcacgtttttcgtgtgaccgggccgtcttcttttaaccatattttgttcagatatttgcgatctgggcctgatatgcagtagctaaacgaccgacttttgcttttttttgacagcttataaattaggtgcgaaagttggctgaaatatagcggccttctaattaagggcacctttttagaaggagagatatatgcattacattttgggcctagatattggtattacatcaattggctgggcagttattgagagcgaccaagacggggttccatttaaaattgctgatttaggcgtacgcattttcaaagccgccgaacagcccaaaactggcgccagcttagccttacccagacgcagtgctcgttctctaagacgtcgcttgtggcgtaaagctcatcgcaaagagcgcattaagctccttttagacaaagttggccttattagcaaaaaaaatttagaaaaactgttctcagcttcaagtttcgaaaaagacgtttatactttacgtgctgaaggcttagatcgcaagctcaataacgaagaatgggcccgtgttctctatcatttagcccagcgtcgcggttacagatcgagcagtaaagcggaagaagcagataaagacaataaagaagctggaaaattacttaatgccgttaaaagcaattccgacaagatgaagcaaaataatttccgcacagttggcgaaatgttttgcaaagataacagcgatttattccaagtaaaagatggtagcggccacattgtaggacgcaagactcacaacacctcaggcgtttacgatcttactatagctagaaatttaattgaagcagaagtacacaaactttttgctgctcaaaggcaattgggtaatgcttttgctactgaaagtatagaaaatgagtattgcgagatacttctttcccaacgccattttagcgacggccccggtggcgagcgcacttttaaatttgatttgcgcggtaattgtactttcgagaaagacgaattgcgagcttttaaagcttgttacacctttgagtatttcaaattattgcaggatataaatcatctgcgcatcattcctgagtatagaaaaggttctgctaagcaaattcgtcctcttacgccagaagagcgacaaaagattatcgatttgtgcctaaaatctcccggtctagactttagcaaattgcgcaaagagttaaaacttgaggatgatgagctctttaaccgagtaagttacgatgtcaaaaagaaaaagggcaaaaagaaagacactgaagagcaatcagaagaacaattaactcccgaacaacagcgtcttaaatgcgaaaaagctgcaaagttccagcagatgcaatcctatcatgagatatgcaaagcgttggataaagttgccaaaggtactattagcaaactttctcatgatcaattggatgcaattggcgaagctctcagtctttataaagctgacgacaagcgccgcgagcgtttagagcagatcggccttagcaacgaagagatagaagctttgctgccacttgattctactaaagctggtaacttatctttaatagctatgcgcaagctcattccctacttagagcaaggtttaacttacgacaaagcttgtgaacaagtgtacggcgatcatcgcgctcagtataatggtgagcgtatgccattgctttcttttggcaagcttaaagaagaaggcgccttggattcagtaaataatccagtcgtcttgcgtgccattgcccaaacttttaaggtagtaaatgccattattcgccgctacggttcgccccaagctattcatattgaattagctagagatatgaagcgcaactttacagatcgccaagatattaaaaagaagcagatccgtttgaatccggtgctcttatttggcatgtgccttatagcaagtgttttgacgatagttataacaataaagttttagtcttttcttcagagaaccagagcaaaggcaaccgtctgcccttagaatatatgttagctgaaggcgacgaagacaagcttgataattacgttactttagttgaagcctttattaaaaatactcgtaagagacagagacttttaaagccttgtttaactgctgaagacagcagcgattggaaagagcgcaatttaaccgacactcagtatattactaaagctgtagccgatattttacgtaactatttagcttttgaagaagactcaccttttgctaaaaagccggttcgctctataaatggcgccgttactgatcaagtacgcaagcgcttaggcttgcaaaaacatcgtgaagaaggcgacttacaccacgctatggatgcagccgttatagctgtaactactgacggctatattaatagaattagtcgttacactcaacgtcgcgagtttggcaagcgcattggctgctataaagacaaacaaaccggcgaaaaggttgaaattgaaaagcaaaaaggacaagctcctttgtatgttgacccagaaactggcgaaaaactgaccgaacaagcgtttgatcaaaaatatgctcctactttccctgccccttggccagaatttactaaagaattaaaagccagaatggcccccaacgccgacgaagctattcgccagctttatttacctagctatggctctgaagaaataaagcctatcttcgtttcgcaaatgccgaatcgtaaggttagcggccaagctcacgccgaaactattcgcagcgccagggtagatgtagatgaaagcggtaaggagcgtataattgccgtagccaaaacgcctttaactagcttgaagctcgataaagacggagaaattgagaattactatatgcctagtagtgatcgcttactttatgaagagcttaaaaaccgtttaaaggcttacaacagcgctgaacaagcattcaaggaaccagtgtataaacccaagaaagacggcagccaaggccctcgagtttataaagtcaaaacttataagccaaccacttccaacgtaaaagtagctggcggtattgctgacaatggcagcatggttcgtatcgacgtctttcacatcaaagaaggtaaagataagggctattactttatccccatttatgtagccgatacgattaagagagagctgccacaaaaagcggtagttgcggctaagcctatcgatcaatggaaagaaatggatgataaagattttattttctcattgtatcctggagacttggtgagggttgaacataaaaaaaatatagtatttcaatctacagataaaaatagtagtgacacaatatcttgcaaaaacttgctgacttattactcaggcgccaatattgcaaaaggctcaattacgattaccaaccacgatcgcagttatatagtgcacggactaggtatcaaaactctgcaatcacttgaaaaatacgaagttgatgttttaggcaactaccacaaagtgcgtttgccggaaaagcgtcaaactttcaacttgaaatatagccagaagaagcgatagctagtggagggccggtggagtttaagtctgtttatatagccaatccggcccgcctgacggtgcgccgagagcaactggtaataactcaagatagtgaagttaccattcctatggaagatattaccagtttgttagttgaatcgcgtcaagtttccgttacttcaactgccttgcaaaagctagctgaatatgaagtgaccgtttacttttgcgacgaacaacacttgccctcggccctcctcttgcctttaaattctcattgccgacaactaaaagtattacaagctcaaatagctctcactaaacctcgccagaaacaactttggcagcaagtagtagccgctaaaatcaataaccaagccaaatgtttggagctattgcaaaacaatggctacctttacttgcgaactttagctaagcaagtgcgtccaggcgatcccaataacttggaagctatggccgctgctttttactttcctaacctttttggagtgaatttcactcgcgaacttccctgtctaattaacagtgctctaaattacggctattctatagtgcgcggcgctgtagctcgcaatttagttactcgcggtttagagccttgtttaggcatttttcaccacagtcagcttaatcaatttaatctggctgacgaccttatggaaccgctgcgacctctagtcgatctttttgtagcttccaagcttaaaagtgaagacgaagagctgacccccactatcaaaaaacaacttttcaaccttaccaactatatgttaaagcaaggccccaagcgctatcgcttaatttctgctattggaaaaatggccgatagttttaaacgcgctttaactgacaaaagtgaaattttagaacttcccgagcttatacctttggagtcttataaatatgagtaagcttatgagaatgatcgttttttttgatttaccggtgcaaactaaaactcaacgccaagcggccaccaaatttcgcaatttcttgcttaaagatggctactatatggtacaattttccgtctacgctcgcatttgcaatggttttgattccgtaaatttgcacgaagagcgcttaaaaaaaaatatccccgagcgtggcctaattcgtttacttacagttacagagaaacaatacggcaattccaaagtattgttaggcccgcgcaacgtcaaaactggcgattctttattttgtgaagagcaaatcttcacttttttttcaagctcccagagcgcaatttccgcttttttatcggcaattacgctccgtctattataccacaacgagactcaaaagggagctacaacagcttttattcttgtgtcaattttgtcttgattataccacaacgagactcaaaagggagctacaacaagcccaatcgcgtcaatagccgcagtaaaattataccacaacgagactcaaaagggagctacaacaaaacttaattgcatcagcgaaaagcctttattataccacaacgagactcaaaagggagctacaacgttcatgaatggtattatgcttacgcttagattataccacaacgagactcaaaagggagctacaacaccatgtcaaaagtgccgcataacgtccaaattataccacaacgagactcaaaagggagctacaacttagcgctgaagtcagtaaatttagaaataattataccacaacgagactcaaaagggagctacaacattgtacagtttgccgtcgcttatttccaaattataccacaacgagactcaaaagggagctacaacaaactccctgcctgcttgtgtacaaaagaaattataccacaacgagactcaaaagggagctacaacgctgaagataaggcagagctggagcacgaaattataccacaacgagactcaaaagggagctacaacggttcctacaacggttcacagaatcaactaaggcatatcagcattataccacaacgagactcaaaagggagctacaacttcgcttatttgctcttcaagtttcttcttattataccacaacgagactcaaaagggagctacaacaaaatcctggcccgcttttgtcttgaaaaaattataccacaacgagactcaaaagggagctacaacgcctacctatgcggagctattagctgaacaattataccacaacgagactcaaaagggagctacaacccatagctccgccgctgtcgtcaaagataaattataccacaacgagactcaaaagggagctacaacattgatatgaatatcaagggctaaatcgggattataccacaacgagactcaaaagggagctacaacataaactcctttttcacaggcatataatttattataccacaacgagactcaaaagggagctacaaccaacaagaaactttagagagctataacacataaaattccaaggtactagaacggcgcttacgatcctactgtagccagaaatattatatcacaacgcaaaaagtttgtgcacttctgcctcgatattgtaccacaacgataagtgttagggaactacaaacaccaaggtagttgtccattctggtattatgttgtacacccacaccgtaaaagctacaacgaaaaaagctcctctagctgttgttaagctaaaggagcttttcagaaggaagaatttcttctcaccgtagtagcgagcaagaaatatttttttaacagagccaagaatcagactcgaactgacgacctgctcattacgagtgagctgctctaccaactgagctaccttggcaaccgccggtattataccataaaaattagttctggcaatagcatgtcggccaaagatttgcgtggcgcccttgactaaaagggccggacggaaaacaaagcgaaagctcagagcgatttttgacaaacttcgcaaaggagactcttattacaatggagctgacacacaattggcttaaatttaaagatttgttcttccacgatgtagaaagcggcctctctttagatattagccgcatgggcttagatgacgagtttttcgcttctatggaagaacctatgcaaaaagccttccaagctatgcgcgaattggaagccggcgctatcgccaatcctgacgaaaaccgcatggtcggccactattggctgcgtaattccgatttggctccccaaaaagagcttaaagaagaaatagacactacttttgaaagcattttggactttgcttctaaagtacataatggcgaaattcgtcccgaacgcgccgaacgttttactactattctttctatcggtatcggtggttcagctttgggccctgagttcgtggcctcagccctctctactcccgacgatcctatgcgcatctacttcttcgacaataccgatcccgaaggcatcgaccatgtattggatcaaatcggcgaagaattgcgccgcactctctgtgtagttatttctaaatcgggcggcactaaagaaacccgcaacggtatgttggaagcccaaaatgcttacgaccgcctcggcctccacttcggtcgccacgccgtagccattactggtaaagacagccaattagataaatacgctcaagccaaccaatggctggcccgcttccctatgtgggactgggttggcggtcgtacttccgagctttccgccgtcggtttactgccggccgctttggaaggcttcgatattgacgacatgcttaaaggtgctgccacttgtgatgaactcactcgcagtaccgttactaagcgcaatcctgctgctctcttagctttggcttggtttaaagctaccaatggcaaaggcgaaaaggatatggttatcctcccctacgccgaccgtttaatgctctttagccgctatttgcagcaattgattatggaatctttaggtaaagaaaaagatcttagcggcaaagtagtcaaccaaggcattaccgtctacggcaacaaagggagcacggatcagcacgcctacgtacagcaattgcgcgacggcgtcaacaatttctttatcactttcatagctgtacttaaagatagacacaatatatctatggaagtagaagacggcgtcactactggcgacttcctctccggcttctggcaaggtactcgccaagctttaaccgagagcggccgcgcttctatgcttatttccattccggaagtaaatgcttttaccgtcggtttgctcattgctctttatgaaagagctgtcggtttctacgcttctttagtaaatatcaacgcttaccaccagcccggtgtggaagctggcaaaaaagcggcgggcaaaattttagagttacaagccaaagtagctagcactcttaaagaaactggccgtgctatggacgctttggaaatagccgaagctttagatatgaaagacaacgcagaagccattttccatattgccagacacttggctgccaactctcgtttgggcattactgctgataatttgagtgccgaagctaagtttgtttacgacaaacatttagacttctagcacactaatccacattactatttgatagagctgctttctgttaaaaaaatttttttagcagacaagcagcttttttacttttttttagtgttaaaaagtgaaaatatatgaaaatttaatgatatttttgtgccaattagcaggacaaagggtatagcatttaagaagggggcgccgatcagcgacttgtttgctgtacgaatcgattatcgatttatatagcaaacaaatgccgatcttcgcattttctctctgaaaatagcccgaaaacaaaacgttaaaggaaaagtatagttgcggtgtctataaataagcgttatatacctgctcttataatagcatctatgctttgtttgggatcgttggcttgggccaaccccgaaaatgaagcacaaaatgtaactgcaaataattttcttactttagctcaagctacagaagcagacgggtttattacccataccaactctgatttgagcgacgggcataccagatgcggttggagtatccgtatccccaaaacttgggtttccattccggatattactcctggatggcctattgcggaaggctggcgaactccagatggcaagactagtataatcataacttggctcaaagatgtcaatgaagatgaatacgcaaccttgcgcaatcggcgctatctggaatcttcagagaagattgcgggacaaacgtgcaaattcttccgcaaaataaacggcccgacttttgaacagatactttatataaaacatcaagggagttattatcgcatagctgccttcggcactacgcaaaataaagctgccttgcaaaaggctatggagagctttaagtttttagtccccggcataaaaggtgccgagactcaaacttatacaaatgccaatttggctattagtttttccttgccccacggatcgaatttgatagctgagctttcagctcacggcgtcaatattttcaattctgccaaaaagaaagtggcttctttaactccgcgatcttttaccgctcagcctggccaatctttcagaggcatagctaggcaaatcgggcgcgaagttattcccgaagcttccaaactgactcgctttgagccctatcaaataagcggacaaaccggctacttagttgtttgggaaacctctagcggccaatatatcggaccgatcatatatgtgccgtacaaacacggttcttacaacgttctggaactagaatccgaagattctcaatctttggaacagttcttcaaaattgcgaacacactcaaagtcgatacttcttcagtctactgatctagtatcaaaagcacgaaagcagcaagagtggatgcttgaggtaaaaaagcactctctaagcgagctaaaatttgtatgaatgggatggactgatagatatggctaatgtaaagttaaagttgttgtatgtgttaaacttactgctcgacagcgacgaacaccacaccattaacgctacccaaatcgtcaaacaattggcgaaagagcacggtataaacaccgaacgtaagtcagtttgccgcgatatcgctactttgcaaacttacggacatgatattattgctgaccgcgataaacgtaaaggctggtactacggaaaacgccgctttgatacttggcaaattcgcttgttcttagatgctatcgccagtgcttcttttattcccaagaatgaatgcaaacgcatcagcaacgaattgattaaagagcttggccccgacgacaagcgcatgttccgcgagttgctccctaccgtttacaattctcgcaaagtagtcaacagcaaactcaaagatgttctttgtgaaattttgcaagctattgcttgggaaagagccgttgaattccaggtttattcttacaataaagtctttaagagcgtccttaaacgcggcagtttagtttacaaagtagatccctactccttagtatggatcaattctaactactatttagtaggtatcaaagagggagagaacttcctccgttatttccgcttggatcgtatcgccaatcctcatactacgggcactcctcgccgcaacgcttctgaagttttaggcgaagatttcgacaaagccttgcagcgctttacccaagatactttccacggcagcaacgatcgttcatttgaaaatgtaactatcagattcaaagacgagagctttgccaatatgtttgtagatcgtttcggtttgcctagcaaagtggtggaaaaagacgattgggtcttcgctactattgacaaagtagactatacaaatgctgtcagagcttggttgattagttactccagtgcttttgccgtaactgctcctaaagagcttaaagatctcgttattaaagatcttcgcagcggtttggaaaattacgaaaagtccgaagg

SEQ ID NO: 1968 - DNA, 17716 bp, synthetic construct
  misc_feature 1..17716: note = Synthetic
  source 1..17716: mol_type = other DNA
cttcgggtttttcaggacaatattcatgagatttcctttccgcgcagatgacaggctgcgcatagatgggagcagaatttatacaaggctggcggacaggcgagagaggtacgtccttcctgcccgccagccctgctgtaaacaggtgctaagctgccgccgggatgagagaaccaactctcatctcagccttcgattttgagctgattctcctttgcaacttcttcggggttgtaagtgatcagggagacgatgatcatcacaatgacggaaacggccgccgagagaacatcgcctgcaaggccgaaaaccgtgaagccaaacagaccggcaacagcggtaatgccgccgcagatcgcaccggcccaagcgcccttgcggttggctttcttccagagcaggccaagcacaacaggagcgaaaacgccggaaatgaaaatgttgtaacaggacataagcatattcagaatgcttgggaagagcagcgcaagcgcaacggcaataacgccaattaccagcgtggacagcctcgtgatgcgaagcttcttcgcttcgctgtccttggaggcgtttttgaccagacggggatagaagtcgttgatgacgtgagaagaagaggccgtcagcagggagtcggccgtggacatgatggcggcgagaattgcggagatcacgatgccgcccagaacgggtggcatatattcaagaaccattttcggaatcaggatcctgggattttcaagaccggtgtagagcgatctgccgcaaatggcgagaacagctggtgcgatgccgaagataagcatgaggataccggcgagaacagtccctttaacggcagtcttgtgatctttggcagcaaacaggcgctggaagaaatcctgaccaatcaggcagtaaaggaaagttggcaggaacaggaagaaaacgtacgacggagaagaggagaggctgaggtagttttccgggagttgctgcgtggcaagattggcaacaacaacattccagccgccaattctgttcagaacgtagatcatggcaacaacgcagccaccgccggcaaggatcagctgaataaagtcggtgatcgtaacggcccaaagcccaccgaaataagtgtaggcgatgaatatcgcggatgccaaaagcgcagcaagcgcctcgtcgccaatgcccagcgcactgaacagactgccggcagcattgacctgcgtagaaagaatgccgaccagcgcaatgaaggaaaggagagaaccgtaaagccggagaccaggactgctgtagcgaagttccatgatctcggtcagcgtgtagagagtcatgcccttcatcttacggaaaacaagaagaatgccgaataagccaagaccggcgccgatggttgtccaaagtgccgagaagccagcgctgtacgcttctgcgctgacgccaatgacgcaggctccgccaaactgggtcgccgcaagggtgaaagccagcagaacaacgccaagacgacgcccggctagcaggaagtcctccacgccctcattctttctgccggcgtagatgccgatcccaagcatgatcagcatatagattgccagaatgataataacggtagtcatatctttttcctttctgatggtacgtctctgtggtacggtgttatttatgtcatgtctttaatcgccacccctccttccacgacagaacacactttttacaaagcaattcctgtgccaatcgggtaggggaaaggaagaagcggttctggccggggaagagaagcgtttttggcatggaacgcaggcgtcagcttcatgataacgtggtatggatatgcaatcaaactttgcagcgcaaaaaagcgttgcatatatttgtgggtatgttataataatagcacaagaaactgaggacaatgtgaaagaatatggctatttttgatgcatctcttctgttgaatgaaaagagggaaatcattagcgtgctggaggattctacgggtatgtttgatggcagtattctcggccagcctgcctctgaggtgttcgatttctcagaggaagaagaaatcttcacctatcgcgccgcaatttacgagtatcaaacggtggcaatgccgggcgaaggctccgttttgcttgcagctgcgtttgagcatacggcggcctactatcaaaaggtactcgactgcgtggacgaaagcgtcgtctgtctggatcgaaaaggaaactttgtctatgttaacagaacgggtgagcgggtgaatggatatctaagcgaagacgttgccggaaaacacctttgcgcggtgtgcgatatagccgaggatgaaagtacagcgctcaaggtgctgcgaacaaagcacgcctaccgcaatctatatcatcggtatgcaacaatatacggaaaggaactgtccatccttcacagtgaatttccaatttccgtccgcgagaacgagccgctcggcgtagcatcctttgaaaacaattttgagatgctgcaaagaaaaaagacctggctgaaccaggtcatttccacaatggaaaagcagtctcccgcagatatttcacgaaagacggtgcagagctatacatttgatgatattatcggtgaaacccccaagatccgggatacgatagaactggcaaagcggatcgctccgctcaattcctccgtgctggtcaccggagagaccggaacgggaaaggaaatgtttgcacagagcatccatgccgccagttaccggagtaaagggaaattcgttgcgatcaactgtgcggcaataccggatacgctgatagaaagtctactttttggaacggaacgcggctcgtttaccggcagcgttgataaggcgggactgtttgaggaggcggataatggaacgctttttctggatgaaatcaattcgatgagcctcaatatgcagtccaagctgctccgtgtactggagacgtccacactccgcagagtgggcggtcataaggatatccgcgtcaacgtcaggacaatcgcggcgtgcaacgcggatgtctttgaattgatcaaaaaaggagtgttccgcagggatctctattaccgcatcgctgcaatcagcattgatatcccgccgcttcatcagagaagcgaagatatcccgctttacatcgatttctttttcaagcatcatcaagagggaagaatattctcccttgatcatatttctccaacggtgctgtcaatccttatggagtacgaatggccggggaatgtccgagagctgttccacgttttggaatatgccgtcaacgtagccacgaccaacacgctggataattcctgcctgccccgctatattctggagcagagaagcggtgcagaggacagcacgctgacgccctgcacggggaaatgggatgaccgcacgctgcaggaaagcatcggcgaatatgagagccacattatcgaaatggcgctgaagcattatgggggtaatgtcagccagacagcgaaggcgctcgggctgcagcggcaggggctgcaataccggatgcgcaaatacggtatatggaactgaacgcggtcacccggtccgcgcagagaggacggctgctgcttcaatttctgccgggccgggtgacggaaccctcatagttgacggggtgcgaaactggctattgcggccgttgcggtccgcgcaaatcaagatcgtaccggcttctgccgtttttgatccatcgcaaaggacttcattcccaacggaagaagcgaacagcaaggatcgtgcagagtgcggcaactccaagcatgactccaatcggcagcaggacgctccctgtgctgatgcccaagaatgtattcttcatcattgtaagtccctgtgtcagcgggaaaatactgacgatcttctgcatcgcctttggcatgacctcgatcggcagcgttgtgccggaaaagaccagcatggggaaatagaggatcgaagcaatgacgctggcctgcttggcgtcctttgccacgccgcccaccagcataccgatggacagggtcgagagcatggtaagtacccagcttccaaggaaagcgagaagtgaaccatggagccgcacgccccacaaaagcgccgcaacagacagcgtcagaagggataccgcacagtagacgatatacatggacagctcaacaccacgaagctgctttgccgcctgtgtgagccggtatttgcggatatactcggccggcgtcaggccaagcacgttacggaacaatcggaaggcataccaaggcgaaaacagcgatgcgcgcaagatcggacaggctgatcttctctgttttgtgcttttcaatgtaatcctgcattcgctggacggccaatacctgttccgtcattcttctcaactccttacagagacattatactgtgttgggagaattatctctcgactttccttgctgctttcttattccggcagtattgtgccggcagcggcgcgctttgctgcacagagcgcattctatcgttcatttgcgctccttgcggatctgttttggcgcaaagtctttcatctccggaattgctccgcctgccacggcccagagatacaggcttgccacgctcccgtagggatggaagcgcctgcgatatttctcgaatcgctcgcggtctatttcccggtgatgatagaccatgcgcaggccgcgccggatggcaaggtcgtcgtagctgaaaatgtccggacgctgcaggcagaacagcaggatcatctctgccgtccagacgccgatgccttttaatgcactcaattcccgaatcgcatctttgtcgctcatgcgcgccaccgcgtccaaatcaaacgcgccggcacacactttttcggaaaaatcggtaatatactccgccttgcgaaaggtcatacccagcgattgtagcttgggaacacctgccgccaggacagtttcggcgttgactgctcccagcgcatcctgacaccgacaccagatggtcgcctgcgccctggtcgagacctgctgcccgatgatgtggtgaacgacggatgagaacaagtccatatccaccgcacggtcgatatgcccgatgcggtcgatgacctcgcaaagccgcttgtccttctgccgcagataagaaagctcggtttctccgtatgcaaaatacatgataagcgcctccagacccctgttgttacctgaattataccattcattcccgagagatgctttgcaaaattggaaattcaattccgtatcgctgcgatgaactgcttggagaattgcggctgcggcgatggcaaaagtcaggacgaaatgagaagctttgcacaatgaatccacaaagcacacggaaagaatggggcgaaatgcacaaaaatagttgacaatgaagaaaagagaatgtataataaacctaccttgtaccactacgagggaaaatcgtgttactacgataaggtagaacacctcgaagccctaccccggccttatcggccggggtatcttcgtattttaagaaaggagtcctctcagatgtcagactttcattatgcgcttggattagatattggcattggttctgtcggctgggcagtcctccgaaaccggccggatggggagcctgaccgcattcaggatttgggcgtacgcatttttgacaaggcggagcagcccaaaacgggggccagccttgcggcgccccggcgcgaggcgagaagcgcgcgccgtcgtctgcgccggcatcgccaccgcctggaacgcatccgctacctgatggagcagcacggcatcatgccgatttcggacatacaggcgatgtatgcggccggtggatttgaaaaatctccttaccaactccgggccgaggcgcttgaccgtccgctttccagagaagagctggtccgcgtgctgatccaccttgcccaaaggcggggatacagatccaacagcacggcggaagcggcgaagaacgaaaaagaaacgggaaaggtgaagtccgccatagaggaaaaccgggcctgcatggagcagcacggataccgtactgtgggagagatgatgttccgggatgaacgattctggcagaataatccggacggcacgcgctgccaccagacgcgcaacaaggcggaggactaccgctttaccgtggagcgcactgctattgtggacgaagcaaagcagatattcaccgcccagagacgatttggagcggactggatggacgatggccttgaggcggcctaccttgctgttttagaaagccagcgcagctttgacgaaggaccgggcggagacagtccgttccatggcgggattggggaaagggtcggcttctgcaccttcgagccggatgaacagagggcggcgaaggcgacttataccttcgagtattttaagcttttacaggatttgaatcatatgcgcctggcggggaacggaacggcgccgcagccgttaaatgcccagcagcgcgaaatactgaaggctgcggcgctgcaatcagcgtccttgagctatggacagatccggaaaaagctggcgcttgacgaaaatgtgtttttccatcatctctattacggcgacaagccgaaggaggaggcggaaaaacgcaagtggccgcagatgcagtcctatcataaaatgcgaacggcgctggacaaagtgggaaaagggacgatcaacacgttaacggaaacccagctcaacgcgatagccaccattctcacgcagtataagagcgacgcgcggcgcatagaggcgctgcgggaagcgggcattccggcgcagtttgacgatgcgctgctgccgctgtcctttagcaaatatgggaatttgtcggtcacggcgatgcaaaagctcattcctttgctggagcagggaatgcgctatgacgaggcgtgtactcaaatttacggcgatcatcgcgggctgcatccggagcagcggaagaacaggctttctctgcgggatatgcgggagatcacaaatccggtggttcgccgtgcagtgtcgcagaccattaaggtcgtcaacgcagtagtgcggacctacggcccgccggatgtggtgcgtatcgaactggcgcgggagatgagccagaattttgagaagcggcgaaaaactgagaaacggcaggatgaaaaccgcacagcaaacgagaaggcaaaggagcagattgcggaatataagggagaccgcgcgaccgggctggacattgtgaaattcaagctataccgcgagcaggacggcgtgtgcctgtattccggacgaaaccttgacctttcccgcctgtttgaaccgggctatgtggacgtggaccacatcatcccctatagccgctgctttgacgacagctatcaaaataaggttctggtgctggcaagcgagaaccgccagaagggaaaccgcctgccctacgagtatttcggacaggacgaagcgcgctggcacggctacgaggtgcgggtcgagaatctgatccgcaattaccgcaagcggcagaagctgctgaagaagcggctgaccgaggaggaaagcgccggatttattgaccgcaaccttaaggacacccagtacatcaccagaagcatttacaatctgcttcgtgataaccttgcctttgcagagtcggactatcgcaaaaagccggtgcagacggtcaacggcgcggtcacatcgatgctccgcggccgctggggcgtgcagaagatccgtgaggacggcgacctgcaccactgcatggatgctgcggtgatcgctgcggcctcgcccggactggtgcagcgcctgacagaatacagcaagcggcgggaagcgtttgaagaagtatcgaggggatatgttgacccagccacgggagagctggtagagctgcccgagcagctgcgccgcgacccgttcccaaagccgtgggagcggttccgacaggaattggaggcgcggcttgacccgatcgatccgcagcatcagatcgacctgctcaagctggccacctatgagagcgacgaggagatcaggcccgttttcgtttccagaatgcccaaccacaaggtaacgggcgcggcccacgcggagaccatccgcagcagcaagggcggcgatggcttcactgtgacgaaaacgcctctggcgaatctgaagctcaacaaattcggtgagatcgaggggtattataatccggcaagtgatacgctgctgtacaatgcgctgctggcgcggctgaaagatttcggcggcgatggcgcgaaggcctttgcccagccgttttataagcccaagaaagatggcacaccgggtccgcgagtggacaaggtaaaaatctgcgaaaaagccacgatcggactgcctgttcgaaacggcatcgcggcaaacggcagcatgatccgcattgatgtgttctatgtagaggacgacggttactattttgttcccatctatgtggcggatacgaagaaggcggagctgcccaataaagcggtggtcgcctataaagcctattcggactggaaggagatgatcgatgaaaacttcctcttttctctctacccgggcgaccttgtgcgcattcaaagccgcaagggaatcaagctgaacatcgccaagggcggcacgggggaaaaagagatcgtccggcaggatgggctgtattattatcagggagctaatatagcgactggggcgatcgcgttggcaacccacgatcgacgttacttgcaatctggtctcggtctcaagaccctgcaatccatcgaaaaatatcaggtggatgtgctgggcaattattacaaggttgatctccccgaaaagcggatgaaattttccaaggagggctgagatggaatatcggaatatctttttggcgaaccccgcgcggctcagtgtgcagcgagaacagctggtcatcgaacaggcggaaaagatcacggttccgctggaggatatttcgtctgttctcatcgaatcaccgcaggtgacactgacggcctgcgcagctgcggcaatggcagcctacggcattacggtgctcctttgcgatgaaaagcatttgccgaacagccagatcctgccgataaaccaatactgccgccagcgcaagctgctgatggcgcagtatgaaatgggcaagcccttgcagaagcagctttggcagcggatcgtagtgcaaaagatatggaaccaatccgagtgcctgcggctggccggcagaccggggtgggaggagctgcggcagatgtcgggagaggtcctgtccaatgacggcgacaaccgggaggcagtcgctgcggcgctgtactttccgcgcctgttcggcgaggggttctcgcgggggtcagatgatccgcgcaacgccgcgctgaactatggctatgcgatccttcgcgggggaatcgcgcgaaatcttgtagtccacggcctggagccgtgtattggcattcaccatcgaagcgaattgaacaatttcaatttggctgacgatttgatcgagccgttccggcccattgtcgatctccatgtggcgcagaattttacggaagacagcgatgtgctgacgccgcggcagaaggccggcctgtttaacttgacaaattgccttgtaaagcaggccggcaggcgataccgggtcatgctggcgatcgaccggacgtgcatggcaatggtcaacagcatcgcagagcagtgcctgatgatagaactgccggagctgattccgctggagctgcatcggtatgagtaggcttatgagaatattggtgatgtttgatctgccggtcaagaccaaggcggaacgacgcagcgcagcgcaatttcggaattttctggtaagcgatggatatcacatggtgcagtattctgtttatgcgcgcgtttgcaatggcagggattccgtagaaacgcacagaaagaggatcctgacggcgctgccgtcgaaaggatcggtaagaatgctggtgattacagaaaagcaatacggcgcgatcgaattgcttgtgggaaagccgacgccttacgataagccgcagcagtttgagcagctgatgattttttgagaaaaatacggaacgatttctttgtgaaatcgttccgtatttttgccgttttattcagatttcccacggaatgaacgaataaaacgacgagatttgcgttcccgattttcgcctattataccactacgagagaaaattgggaactacgacgtgtccatcgtaagcgtgatttcgtcgtacattataccactacgagagaaaattgggaactacgaccgaagaagctggaaatgctggacgaacacaattataccactacgagagaaaattgggaactacgacgaatcggacgtgtttagttttctgcgggttattataccactacgagagaaaattgggaactacgacataccggcaatcgaacggacggcgcagccgattataccactacgagagaaaattgggaactacgacgaaacggcggcgaaggcggcgaagctgggtattataccactacgagagaaaattgggaactacgaccgaaagagagctatcggcaagaaatcaatcattataccactacgagagaaaattgggaactacgacaggtacggctgtcgatgatgaagtattcggattataccactacgagagaaaattgggaactacgacgatcctttactccctcaatcggttcaaataattataccactacgagagaaaattgggaactacgactctttgtgtggaggccatcaccagccctataattataccactacgagagaaaattgggaactacgacctggcagcggtggccgcgattggacaccgtattataccactacgagagaaaattgggaactacgacgccgtgaatcaggctgattctcttatgcatattataccactacgagagaaaattgggaactacgacgacggccgcaaagtcgaaaaaaatcaatatattataccactacgagagaaaattgggaactacgacctataaaactgacgtagttttgactcctttattataccactacgagagaaaattgggaactacgactgagagccggagcggcttcgccatcatcatattataccactacgagagaaaattgggaactacgaccttatttccgatctgctggatattctctatattataccactacgagagaaaattgggaactacgacgcgcctttgtaagcattgcggttatctcgctgctttctccgtttggccgtctgctgtgttcagttcgagattcatcaggtcaaaattaatatattctccattgattttgaaaaaatggggaaacgtacacagcttgcgaaagccgtatttctcatacagatggatggcgcgggcattgctgctgcgcacttcaagattcaactgctcgaagccgttctccctggaaaaggcaaggatcgcatccatcagggcaggtgccgcgccgcagcccaccatgcttttttcaggctgataccgaacaccccgcgatggctcatgcgattgctcctgcggttcagacttgccgtgccgatgatctcgccacccaccttggcaaaatactgcgcattgtcagccgatccgtactgcgagtgcagatagtcttgctcagcttcaaggctgagcggtacaccttctgcgccaaagctgaggttgtcagtttctccgccgatgattttcagataatccagcagcgcggcggcttcctctggccgtgcgcgttcaatgacaaacaaacggttattcaatttcaaggcttcctttcttcgggatattcccgcgcattatttacgaagtccggcggcctgcataatggcctcaaccggttctaccggatcgctgccccaagtgatctccacttctccgcaaccggcgctgtccagcagctcccgcgcttcgtcggtcagaagtttccgataggcttcgtccaccagttccagctttttcaggcagtcggccagatcgttgttttttgcagccagccatgtggaggcggcatcgctgatctcatccgtgccaagccccgtgttcacgccccagtccagcagcttggccgcctcctgtacggctagcagcgaagaacctgcggttccgatggtcacattccggccgatctcatccagaatgggaagcgtcagcaccggcggcacatctgccggggcatcggctgcgtcagaggtggagcaggtcacgccgtcctcagagatcgtgacatacagcttttcctgcgtcacatcgtagaggaaggtgccttctcccagcagcatatcgtcagcatcatgcgcactaacggtaaagaggacggcgctgttttcttccttggaaagctgcacaatatcatctccggtgaaaatccattcaccggccttcaacagcgaaccatccgcattttcacatacctttgtaaagctgctgccatgcagggcgacagagttggcgtcatcgcgttccagcttgatatacacgccatatccatcggattcggcgggcgtgtctacttccgagggggtgttattgggggcttccgacagtttggtgcatcccgtcataaaaacggcggtcagtaatactgctgcggtcagcagcgttgagattgtttccttgtagtttttcatagttcctcctatcagttcattgtttagaaaaagactgccggtagacaggcagtacctgcttccagaatatcagcccattgacaaggagcaatgcaccgaaaaggcaccttgccgcccactctgggcaaagaagggcgatgccgttcatatccccgccgccgaaaaagctgcacaggacgcttaggtacagcgggtcgagcagcagaaaagcgatcgttatgtagtaaagcatggcgcgaagcagcttgctatgagcgcggcagatgttctttgcaagcgctgtcagcaggtatccgacgcagaaagttgccagcgcacccacaaggcagaagataccgagctgcgtgtccgtcatgcgttcggcgcagacgtcgatttgaacgccaagtcccataagcctaatttgcttgaacacaccggtgaacagggcatacagcagatgtgcgccctcgtgaacgaggtagtaggcggcaagcgcagccagaataccaatgtattgtcgtattcgttttgacatgatctgtccttctgaaaaggtctttattttttgcccaaataccgggacacatggcggcagtactcctgatacggtgtgccaaaggtattcacaaggtatcgttcctcctgcaatatctgcaagtggagcatgacgatggcaaagacagaaaagccgagcgtcagcaggtttccatacagcagcaggacgccgacatacatgaggtcaaagccgaggaacgccgggttgcggctgaaacggtaaatgccggttgtgaccagctccgttttgtccttggcaaaataaacgccgtagaacgccgccagcacaagaagtgtcagtatcgcataggaatagccgccttttcctttcccaaggagcttgattacggtgtattcggcaccgtttaccgtccttgtgtcaggcatcattctgttgacggcccctttcacatactgacgatttttcggacggtattcgccgttctgatcgtcagcttcgagccaatatccgcacgggccgtttttggccaccagctggttttctgatagtcctttcggctgaacgaccagaacacaaccgactggtattcctgtatctgttccaagccctttttcggcgcgccgatctcgtgatagacgtccgggaaggtcgcaggcggcaggatgaaaatgaggttattgtaaatatcctgattttccgttccccaccagtccggggcatggcgcagaatgtccgcaagctcctcctgcggaatgataaaaacaggaatatccaagccaaattcacgctgcatcatgcgctcagcccggtcagtcaatgctgttacattcccgtcagcgctggaaaagatcacgttaccgctgttcagacaggttttgacctccataacgccgagggcttcaaagcatttctttaggtttgccatcggcactttatttttgccgctgatgttgacgccccgcagcagagcgatataccgtttcatttacttcgcctcgcggagcgccttcagattttccagcacaaacgggctgtttgcggcaatttgtcctagcgttggacatccgtccatctgtgcgcagtctgcgcaggtatccagccccttttccctcacgcagttatgtacggggcagagcttgtcgcagaagggcgtttttgcgccctctatgcggcagccggtgcagttaatcatttccggcgtgatcgttacgccgttgagctttgtccacagggcggcagttttttcacgcagggcgttatcgttcgtgagcattgcgattctggcatcgcatttttcgcagtccagtccgcagcagccaatcagctgatttgcgtgcttgcagtttgattccatattctgcatcctcctatttcatagttgccggattattctttcctgaccgcaaggcagtaattgacatgctcaaaggctttcagatcggccccgaccctgtcgatgatgtccctttgaatatcatccggtgtcagcagttcatagatcagaaacccatgcttctccagcatcgcttcaagctccgaataggaaaaggccgttttcatcggttcgcagcctgcttttgccattataatggtgttttgcacacgcctttcgggggcatcgaagaagttttcgtccggataatcgaacacaagggcgctgccgtccgcgcaaagctcagagagcgaggcgagcatcgcttcgattgcttctgccgaaaggtagtaggtcacgccgagccacgagaaaaaggatttggcagacgggtcaaaaccggcggcgatcagccgttccgccaggctgtccttcgtgaaatccacggggacaaaggcgagattatccggaaccgcccaaccggcgcgggtgatccgttccagcttgtctgcctgcgtcagcgggtgatcgacctccggctgcaaagctgctgggtcgatctccggctcaaaggactgcgctccgccgaggagataaccctgaacggcggtatactcttcctccgtcatcaggtttttggcaagatgatcggcggaaaccggatgctcttcgtcctctgcatgaaacgtccgtccgaacgaactcatcagggcggtaatgctggcttggttattcatttcgttggtctccatatttttcttccagttctttcgtatgtgcatgaaacagcctcagcgcctgcgtctggacacagggcagtgaccggtgatccgtatctgcaaactcgcgcttgattcgcgcggcagcaaccgcgtgagcgtcattcgttttgcttccatccgcttccgataagagcttttgcagcagactcaaatcgctggaatagtgaagttccaccagctttgcccggtattccagctctgcgggggtgatctccgggaatcgtttcatatccacggtatgctgcgcttcgtgcttcaggagcgaaacaaggaaacgttcgcttgcaaagtcatacgcctgctcgatgcagttgatcgtgccatcgggcgaagcccagccgcccgtaccataccgcccgaaggtcagataatccatccagctccgaaacacgaagcctttcagaatgttgaccgtatattctgccgttccgtccggcagctcaacgcggtagacggtcggaaccgtatcccgccagatataagggccgtaatatccctgcgttttcccgaaaagcgcatgatagccctccgcttcaaacagcgattgaaggcgctccgtcaggagcgcttcatctgcatccggcatattcaggcgcgctcgcagccctgtccgcagcttgtctgcggcctccgcctccggtaagccgcaataaaagctatcccgaaaatagacctgatataggcgcaggatgtcgttgaggtcatccggtatttcgtaggtgcggtattcctgatcttcaaaaatcgccgcatacgcaggaagaatgtccttgaattcctcatgcccgcgcatataggcaatcgcgcctttgatgtccccgttcacaaaaaactgactaattggcataccgttctcccttatccacgtcaattcctttttgcctgctgcgctttcgggagggtccttgtcaggatcagcgtataggcaaccgtaatgacaatcagagcggcgagatggagcaggtgcgtttccgtggtaaggttcgtatcattcgcaaaggtactgagcgtgttgatagcagcatggacgaggatgcagggaagcaggctgccgccgcgataaaagatcgtgaccagcaggaagccgactgcgatggcaaaaacgatctggcacaggttacccacaacatccatgccgctgccgttgaacaggtttctcatatagttttttcatatcattttctcctgtgtagccgcgtcaattacacacttgcggcttgggaaagctttatgacttcgcagcccttgctttcataatacgcaagcagctccggcagtttctttttatcgtagctggtgatgcagtctgacagcacatgaacggcatagccgcttttccgcatattatagcaggtggatttgatgcaggccgcagcgtctgcaccgacgacgtaaaactcggaaattccacgctcctgaataaaggtggcaaacgcctcgctggtcagtgcattgctttttgccttcgtaaagatgtggtcggacacgaccaatgcgatgtttttcattctgtaatcctccctgtttttttcttgaaagcaacaaacgcagcgcaaatcaatactgtggtctgcactgcgtctaagcgtctggcattttgatttctttaattctaccgtccttaaaacggatcacacaggtgtatttgcacttggggcagaatagggggaatccctctgataccgtgcgcggccgtatctgcgttcttgctttgcgccagcctgttcttcatgccatttcctcctgcgccgccaatattgcgccccgatacgcccgctccaactgagaatgaataagcgcctcgtcgtattgcagcgaattgttggcgatgatgctcgcgtacccgtgggcaaacaggaaaaccgttaggaagacctttttcgtttgttccatactgatccccaaggcgttctgcatcgccgaaaggacaggggtaagctcctcggcgtcgatcagctcaagcagggtctttccgctgaaatagtccgactgaaacagaaaacggaacaaatgcggctcttcgatggcaaagcggatataattcattccgatcccaagcgcagcaccattcggcagtttttttacgctcatcagatattccgaatgataaccgtctgcctttgcatataccgttcttttcagttcttcaatcgttgcaaagtgatacatgacgggttgtgtggagcaatgcagccgctccgaaacagtccttgcgttgatgctctctgctcctgcttcgcgggtgatcgcaaaggctgcgtcaataatcatttcttttgtgattctggctttggcaggcataggcgcacctcaatatataatctgaattatatataacaaagattatgcaacaggaagaatgaattgtcaacccttaaatagcaaaatatgaagaaaaacaaagctcctcgaaatcgtaagatttcgaggagctttggtacgccgtgaggaattcgaatcc

SEQ ID NO: 1969 - DNA, 17656 bp, synthetic construct
  source 1..17656: mol_type = other DNA
  misc_feature 1..17656: note = Synthetic
gcagctccgtccagatccgtttcaagccccgggccgccgtctccttcagaagctgcggcagcaggtccatcagtccggcagcgctgtcccgggcatactgggagagaggggagaaggtgagcagctcctccagaaccgttttcccagagcgctgacaggcttcacaggcatattccgcggcctttttggtgatgccgcagccgattttatagtagatgcggagaaacgcctccgtgtttttccggtcattggcaaaggcgatgatgcccagaagatccgcaactatccgatgggtgaaaaaggtgtcatccatctgtctgcaccggtagggaaagccctgccgctccatcaggtcgatcagcggcagggcgctgtcgttgttgcggtacaggaccgccgtctgcccatcgcaatgggccgccatgtccagcagccatgcgtactgggccgtgcggtctgccgccgagatcaggtgtacgttcgccccggacactctggtggggcggacggtcttggggcggcggtccgtatttttccggataaacccgttggccagatggaggatctccggcgtggagcggtagttttcctccatcagcagcacccgggccttgggataggtctgctcaaaccgcatcagcgcgtcgggataggcggcccggaagccgtaaatgctctgatcctcgtctccgaccataaaaaggttgccggttttccgggccagcagctgaatgatggcgtgctgaattttggaggtatcctgcgcctcgtccacgcagatataggggaaggcgtcctgaaaataggccagaatatccggataattttccagaatggtcttggcgtagatcatctggtcgtcataatccatccaccggcgctgccgcagcgccagattgtactgtgcatacagctccgggaactggtcaaacccggtgtccaattcaacgatattctctttgccaagcatcatgttcttcacataggcgatccccttgcgaagctccttgatcacgctctgtgtggcgaactcgccgctgagctcccggtacagatcggaaacgatttttgccaattctccttcattttcagccactgtaaaggcgcttccgctgccatgtgtccgggtataaaaatcgatgattttggaggaaacgccgttgatcgtgcgaatctccgggacctgcggacaatcctggccaaaaagccggacgaaccgcttctgcatttccctggtggccgccttggtgtaggtcatggtcaggatcgcgtccggagagatcccgcagcagcagagcatatagcccagccgggtcaccaacaccgtggtttttccgctgccgggtacggccaaaagcagcactgcgccgtcgacggcgtgtaccgccgccaactgctgcgggttgagctgtgatgtgtatttccggtcaaattcgcttctggtcatgctgacgtttcctctggactttctgtggcgtttgtatcctgaatggcagatagtttcagaatgattgtagcacaaaccgctctgaaactcaatcaaatcccattttccatatgcatggactgtctgcgcagggacatacagattcgcagaaagcgttctaagttttcagctccagtcttcgtatagtatatatgctttacagcgtttcgcacttgaatgtaaaagtgaaattccctatgtgatatactctggaaagagaactgccgtagatgcccgccgtggtggtcattgtcatggcggtctgcaagtgtccctccattcccacgctgatggtctccactctggtggctgtggtgttggcgatgctcgttcaggggcagtcgctctccggtattttgaatattctggacagcggattctccattgacaccgcgctgcccgagttcaaccggctggtgaacagaggcgggctgcaaagtatgctgtggacggcggctctgggcatcctcggtatgctgtacggctccatcatggaaaagaccggcttgctggaggctctgctatccaaaatggaccctctggtgaagtctaccggcgggcttgtcaccgctgttgtcctgacgtgcacgctgctgctgatggcaacggcatctcagaccttggcgattgtggtgggcggcagaatgtatatcggcgagttcaagaagaaaaacctcctgccccagaccctctcccgtaccttggaggactccggcacgatcatcagccctctggttccgtggtctctgtgcggcgcctatatggcgggcaccttgggggtctccaccatgtcgtatctgccctttaccatgttctgctggctgtgccctgtactggccattgtatatggcttcaccggcaaattcttctggaagaccggcgaaaagtccagccagaaagtctaccagctcagcacattgatggaagcgtcctgataaattcattgagataagaccgcaccaagagcagagcagctgccacaagtaagcgaaaaggcttatttttgtggcagctgcctttttcacgcgagacaaggtcgtgcggcgcccgacagaaacacccggccaaaactcacgtgagacatatacagcccgcttaaacactggcagacacggttgcggctgccggtattttgcggcaaacgagatcaagacctcgtaagtaggagaacgtgacacgcagatcacaaagactgtgtgtaagaacgggaaactgtgtcggcaatccggacggcgcatcggctgcgggtatgggccggctcctccgggcagcaggccatgacgctcccggaatctcccaaaagccggaagcagaggtacgatgctgtgtgatggcggggagaactctcaaaattgacagaacctctgcggagcgtaccgatatgttgctattttgacgcaggttcggtataattgcgttatatcaatggacaattttaattgtacccgctgaataaagctattgcgcgtttttgcggcaaatgaagaggaggctgcctatggatgcatttgaatacagcgaatccgatgtgctttatacgcagctcagtttcttccaaaaatttatgaagcgtcactctttggacaaaatgactgcgctccagctctttaaagaaaatgaggtttttgagatcctttcggattgctacgaatcggtacagcttgacggcgatggcgaaattttggatgacatcgatgctttgctcagaaataacggggtgaccatagaatgattctttatcacggaagcgaccgcacggtcgcagaaccaaatctgcaaacagatgccgcaaagaaagaactcggctctggcttctatctgacccctgattctgcacaggcagcaattgccgcccatacccgcgtgcggcgggagcagcgactcttggaaaagaagtcagactatgacaggggtgtcgtttcgatattcaaattggatgagaccgttcccctgaaggtatttcggttcgagtctataacggcagagtggcttcaatttgccgcggtaaatttcaaaaacgatgtctatagggagcaactgacacagaatattctcagcagatattccgattatgatgtgataatcggaaagcgtcctgatgaccatacaagcatgattctgacagcctatctggcagaatcctatgggacgccagaaagtgcagatgccataaattccgccctttctcatgttttcccggaacagctgtcagaacaatattgtttcaggacagagcaagccatccatgccttaaaatttcaaaaaaaggatgctcccatgagagcatcctcaaaaaaatttacggctgacagagcccttacaatggcggcacaaatgcttgccgcggagcaggggatttcagggatcgatgcattagtaaagctgataaaatcaccggtctacgacgccatctatgatttggagacgggaatgtggcgggaaggcccttccggtattctggaagcctatcaagcacatccgaaagaggaacattgatatgccttatctggttgcgaaaaacttttatcaacacggatgctacgccatgcccgtagagcatggccccgagctcgtcgagctgaagcacgatttgcaggcggcaacttccttagagcacttacagctcgttaccatcagccgccctgccgcatacggcgaatatgcgccctataccattatcaaagaccgggaagaatttattcgcttggttctccaaatgaagccctgtcaggcaagtgatgaagatgtgaggaagatttccgagcagctcatggagaaaaaccgtaccgcgtatgagacgctggcaaagtgaagccttgattcgaatgcgttaccagatctcatttccctgcggtttgccccagtcgatctcatcttcttttgtggggcttatttgatctacgggcgtatggtagtattcctccagacgctccgtgacggttttgtgcggatggtttggacgcatctgctccgggtggaacacgaggacattgtgcagttcctgcggcgtcgcggccaggatttcttccacaagagaggcgtgtgcggccctgttaggcgctgcggaatacgcggcaaattctttgcggtattcctccgcatactccactatatcccggcacagcgctttgatggccgcttctttcgagggggcattgacaacaaggtccatatcatccatggagagtgtgatgctgccatcgccctccgtatatacggtaacttggaataccatattgcttacctccactgcattcagcttgttgcaaagcgaaccaagtgttcgcgctcatcactgtccgtctgagcatctctgcgcccggccagggacgtagttcaaggtgtaaaaaggccattgacgcaggtctcactgtgccaatggcccttgttggttcggcagggggggactttggccaagtgctctgcctgtcataaaattgagatataacttcattttattcaaatatgatacctcaaatccaaattgccgtcaaattttgcgttttgacttcgtgttttgacacaaatgccgtattgtggtataaagcaaaagtagaaacacaagagaaatgaacttggaaaagaagaccggaatgctggtattcaaggaatacccattgttggacgaatagccggtacccccccggctaaagccgggggcttgcgagaaatcatgaaaggagagcgcgtcatgttgctttggacaatggaccaaatgagggagcttcagcttcagtgggcccgagaactatactggcaggagggacaagccagaggtgcgatcaggacctgtaaggccatggggctggactttgcggatgctttacagcatttgcaggccctgctcccggaacttccgcaggtgaacgcggaacggctcgcccggtattactggaaggaagaaagcagtgcaaatgctgtggcgaaaatcgactatgaaatcgaccgccgcacggacagggagatcaaccgcgtgtggtacggggaagaatactgcaagtcctttgatgaaggctacatcaatggcgctgtaaaagcactggcagaggtcatcaagatctatggaatctcccttaacgatagctgtctccaggatgaggcggattctctgaacctctctctgggagaactgagggagagactggatgccaagctgaaagaaatggagcatcccgaagaaaagtgatgcatcaaccctgtgtaaaagcaatatggcggtaagattttgcgtaaaggaggggggacactatgcggtctcggatggcaaagcaagttcaggagcttcggcttcggtggtcacaggagtcgttctggcaggaggggcaggcaaggggcgcggtcagggtctgtaaagttatggggcttgaccaagcaggcacctgtgagtatttgcgtgcgctgctcccggagcttccacgggaggatgcggagcggctggttcggtattactggcgggatgatattgacggtaccgctgccacggaacgaattgacgataaaatcaagcaccgcataacgatggcggtttaccggacgcaatataacggagcgtgctgtgagcagcttgaggagagctatctcaaaggtgctgtctatgcgttggccgagacggtcaatcgctgcggcctgctcttggatgaggattatctgcagcgggcagcggaccgtctggaacttccgctggagaatctgaagaagcggctggacgctgtgatgaaggagtttttctcagaatagggtacagtaaaattgctacgggtgcccctatttccactgtaaatttcaccatttaacttgttaaagtatggtacagtaaaattgttgtaccgtaccctatttttccttatcatggtgagcgtcggcagagaatcattctcttaaaagttacttattgagccggcacatctggttgcgttctgccaatagcacggaaacagatttgcgtgttgccgcgacttcttcagcagtaccaactgcaactgtttgttggagtgagcacaaaaagcgtgccgtggacaaggatgacggagccttttgcgccgccgggcctgaaaaatcaagcggagattgctattttgccgtatgtcctgtataattgcgttataccagcgaaaaatacaatacgaggagaaaatacaatgaataagactgaattgatcgccgtcatggctgagaccagcggcctttccaaaaaggactgtgacgccgctctggccgcgttcatcaccacggtcgagactgctttgaagtccggcgagaaggtgcagctgatcggcttcggctcctttgaggtcaaagagcgggccgcccgcaccggccgcaatccccgcaccaaggagatcgtggagatccccgcatccaaggctcccgtattcaaggcggggcaggcattcaaggacgcgatccggtaatgacagaagcacggcctgggaaaagatcccaggtcgtgctttttgccgtacatgggattcttgcgtgaatgccaatcggaaagaacaaatcagagcagatattagaatggcagggaagtgaaagaatgtccgcattgaccgtgatagggggactatcatctcccaagccgtaccgggctgcactttggctgttgtaaacacagtgccttcgtgatatactgacaatgataaaatgtgtgaaatacacctgatttgttgctgtatcgagagaatgtgaaaggagtatatggtatgtctgcacctgtcccgcatgatggtatcgttgttcgaaacgcgcggttagctgtgaagaacgagttggaaaaaaagcgccttttgaatcagcctattgcaagatttgacccgaaaagcggcaaggtttatatggaacacgctgatggcaccaagacccttgtgggagaggctataaaaaaaggtggatatggaaaacaagccgattaagaagccggagattgttgtctttgcagggccaaacggttccggcaagagtacaataacagatctgctgcgccctccgatgctcccttatgtcaatgcagatgagattcagcgagtcctggattgtgataatatggaggctgccaaaatcgcagaaaagcggcgtgaagattacttggataaacacaaggggttttgcttcgagaccgtcttgtccacagaccggaacctaaaactcctcaagcgagccaaagatgccggctttttcgttcgctgttattatgtcctgacagccgacccgcaaatcaatgttgcccgtgtggcgtcccgagtttccgccggcggtcatggtgttccaaccgaaaagataatttcccgctatgataaggcattggcccttgttcatgaactggtcccgctttgcgatgtatgccacatctatgataattccttggatgcaccataccggatcttcaaaaaacgcaaagaggaatactggtattgcccggagcgatatctatggaaaaaagacgatataacagctctaaccggtgttcctaacgcacagagagcatctctgaataatcacagaacttaaccgtgaggaacaccgcgtctacgttgcggccaactgcttcagccttaaaaaatgagtgaaaaagggatgagtcctgcgtatccaaacgcaggactcatcccttttgtttatgcaagggcccgccagtacaatcattttatcagttcatctaaaggcaggggctttacggcacattctggtaagaggggagcggggggcgctcacgaaggggcgccctccgtccatgtgagatttaaaatgtattccatgcagatgcagccctcctcgtcacaataggagtgcaggagatccgcatgattagaaagcattcccatcgcaaccgtgggccccttggcaagtgtgtggccgtttggaatggagaccgtgaccgtggcggcgggcataccgattgccggcgggacctcctccacagaaagggcgggatccatgagggggagctgcgcacctatagtggagagtgcacgccacgcaaggcgcttgtcggaggatagcttttcgatgtcgatgtctgagtggcgcttcattccgcgtcctccgtgacccacatcttggaaacagtgaaggtgaagcagatgccgcactccgtcttgtccgtctgcacggtgtcgcaggcggagaacaggaaggacagcgcctgccggatggtggagttgagcaccaccagcggcgtgggaaattccagcgccacggaggcggtatcccggctttcgtggggcggctgctccatgaggcggacgtgggggaccagacggtcgatttttccggcagcttcccgcagagcggtgaaccgggacatggcggtggggtcgatcattttcacggcgaatactccttcctcagtaaacaattctgctccagattatagacgatgctccggaaaatgtcgagtaaaaagggaaggtcgttaacggtgagggcaatgtgcgcttcggcatcttgaagtggagaccatgaacctaaccaagcgattttgctgatgctctgaatacattattgcaatcagatgcggaacacgctctcattacaagggccgctactgggttatatcgtcccgctattcgtgtcgggcgtaggtgcggatgatggcgtggcgatcttaaattatttgcggcaggcagtatgcgaaaagacgtgtaaattccggcgtgtgagctacatgtgtccggagatttagctacagctgtttcggaggccagcccctctgacttgcttgttaggcgttgtcccagcggaagataatttttatggactgttcataaatgtcctgttcggtccattcgaagcaatcgtccagttctttagagaaaatcatcaaaatctcccgtttagcttgctcggcattgcccttgttatggaaccaccaggcatatctggtgtccagcaattcacgggtcagggtcatgtcattcctcccggtttctcagaccgtggcgctcccgcatggagatctttccgtcaatcaggatttcgcaggcgttatgctcttgtgcggatctgaagcaactcgcaggatgtttctgtaggcgagcaattgatttcctcctcgataaaggtcagctgtgaagtttcaaagcgcgctcatcacgcaaaaacaattacttcagataaattcagaaaactctactatcccggtattccgcaagcaataaaaaacgcagagagtttttctggcagctttcccgaattgttcgatcatttgggaactaacttacctaaactgcttgacattcttgaattccatgtttaaccaaggagaaccgattttcgtggatcctgcgtttacggtcattggaacaggcagagatcatctgccatttacatagggctctttccggttttcgttgaatttttcgtaaagaaaaagctttgcccgcgatgcagggctgtttcgattacgcgtgcggccggatgtagatgactttttctgtaagcccggcgctggcggatctgtccctgctgaaatatataaaaatgttgacattttttaggaaaaagcgtacactttaaatgcccttataccactacgagggaaaatcgtgttactacgataaggtagaacacctcgaagccctaccccggccttatcggccggggtatcttcgtattttaggaaaggagccctctcagatgtcggaatttcattatgcgcttggattggacataggcattggttctgtcggctgggcagtcctccgaaatcagccgaacggagagcctgaccggatccaggacttgggcgtgcgtatttttgacaaggcggagcagccaaaaaccggcgccagccttgcggccccccggcgggacgcaagaagcgcccggcgccgcctgcgccgccatcggcaccgtttggaacgcatccgttacctgatggagcagcgcggcatcatgccggttgcggatattcaggccatgtatgccgccggcggcttccaaaaatcgccctaccagctgcgcgccgaggcactggaccgcccgctcaccaaggaggaagcggttcgggtgctgatccatcttgcccagcggcgcggctacaagtccaacagcaccgcggaggcggcgaaggacgaaaaggagacagggaaggtcaagaccgccatcgaagaaaatcgccgctgcatggccgagtacggctaccgcacggtaggcgagatgatgtatcgggatgagcggttctggcaaaaacatccggacggcacgcactatcaccagactcgcaataaggcggaggattaccggttcaccgtggagcgcgcggccatcgtggacgaggtgcggcagatcttcgccgcccagagaaggctgggcacggtctggatggacgaggatatggagaccgcctatctctccattctggagagtcagcgcagctttgacgaaggccccggcggggacagccccttttccggcggcatcggggaaagggtgggtgcctgcaccttcgagccggatgagaagagagcggcaaaggcgacctacacatttgagtatttcaagcttttgcaggacttgagccgcatgcgcttgaccggtatgggcatgccgccggagccgctggatgccgcgcagcgtgaagcgctgaaaagcgcggcgctccgttcggcatcgctgagttacgggcagatccgcaagaaactgaatctggatgatgatgtgttctttcacggtctctattacggcgagaaaacgaaagaggaagcggagaagcgcaagtggccgcagatgcagtcctatcacaagatgcggacggcgctggacaaggtgggcaagggcgcgatcggcaccttgaccgaggagcaactcaatgccgttgccaccatcctgacggagtgtaaaagcgacgcgaagcgcatagcggcgctgagggaggccggtattccaccgcagtttgacgaggcgctgctgccgctgtccttcagcaaatacggaagcctttccgttcaggcgatgcagaagctcattccgctgctggaagaaggactgcgctacgatgaagcgtgcacgcgggtctacggcgaccatcggggcttgcggtcggaacagcggacgaacagactgtccttgaacgacatggaggagatcacgaacccggtggtccgcagagcggtatcccagaccatcaaggtcatcaacgcggtggtccgcacctacggcccgccggatgtggtgcgcatcgagctggcccgtgaaatgagccggaccttcgatgagcgccgcaagatggaaaagcgtcaggatgataaccgcgcggccaacgagcgggcaaaggatcaaatcgcggaatataagggagaccacgccaccggcctggacatcgtaaagttcaagctgtaccaggagcaggacggcgtgtgcctgtattccggacagaacctcgacatagcccgcctgttcgagccgggctatgcggatgtggatcacatcatcccatacagccgctgctttgacgacagctatcagaacaaggttctggtgctggccagcgaaaaccggcagaaggggaaccgcctgccctacgagtatttcggacaggacgaagcgcgctggcacggctacgaggtgcgggtggaaaatttgatccacaattaccgcaagcggcagaagctgctgaaaaggcggctgaccgaggaggaaagcacgggatttattgaccggaacctcaaggacacacagtacatcacaagagccgtctataacctgattcgggatcacctcgcctttgcggagtccaactaccggaaaaagccggtgcaggcggtgaacggcgcggtcacagccatgctccggggccgctggggtgtgcagaagatccgcgaggacggcgacctgcatcactgtctggacgccgcggtgatcgccgcgaccacccccggtctggtacagcgcctgaccgcgtacaacaagcaccgggagacatgggaaagatcgcctgcgggctatgtcgatcccgccacaggcgagatgctcgaactgccgcaggaagcgcggcgcgacccattcccgaagccgtgggagcgcttccgtcaggagctggaagcccggctcgaccccatcgaccctcggcatcagatcgacctgctgaagcttgagacatacgaaagcgatgaggagatcaagcctgtttttgtttccagaatgccgaaccataaggtgacaggcgcggcccacgcggagaccatccgcagcagcaagggcggcgatggcttcaccgtgacgaaaacaccgctgacgaatctgaaactcaataaatttggtgagatcgaggggtattataatccggcaagtgatacactgctatacgatgcgctgctggcgcggctgaaagatttcggcggcgatggcgcgaaggcctttgcccagccgttctataagcccaagaaggatggttcgccggggccgcgggtagacaaggtgaaaatctgcgagaaagccacggtgggactgccggttcgagacggcatcgcggccaacggcagcatggtgcgaatcgacgtattttatgtggagggcgacggctactatttcgttcccatttatgtggcggatacgaagaaggaaagcctgcctaacaaggcggctgtggcgatgaaaccgtataatttgtggaagaaaatgaaggacgaaaactttgtcttctctctttatcccggagatctggtacgcatccagagccgcaaggggatcaagctgaatcttgcaaagggcggtacaggcgaaaaggagatcgttcggcaggagggaatgtattattaccggagcgcaggcattgcggtagcacagatctctgtggaaacacatgaccgacgatatttacagccgagcttaggcattaagactctgcaatccatcgaaaaatatcaggtggacgtattaggaaactattacaaagtagatctccccgaaaaacggatgacattttccaaggagggctgagatggaatatcggaatatctttttggcgaaccccgcgcggctcagtgtacagcgagaacagctggtcatcgaacaggcggaaaaaatcacggttccgttggaggatatttcgtctgttctcatcgaatctcagcaggtcaccctgtctgtccacgcggcggcagcgatggccgatcatgggatcaccgtatttctgtgcgacgagaagcatttgccaagctgccagctgctcccgatcaaccagttctgccgtcagcgaaagctgttgctatcgcagtgcgagatggggaagccgctgcaaaagcagctttggcagcagatcgtcgtccggaaaatacaaaatcaggcgcagtgtctgcgtctgatggggaaggaagaatggcaggagcttcagcaaatggccggaaaagtcctttccaatgacagtgataaccgggaggcggtggcggcggcgctctactttccggcactgtttggaaacggctttttcagaggctccgatgatccccggaacgcggcgctgaattacggctatgcggtcatgcgggccggaattgccagaaatcttgttgtgcatggcttggagccctgcatcggactgcaccatcgaagcgagttgaacaacttcaatctggcggatgacctgatcgaaccctttcgccccattgtcgatctctatgtggcgcagaatttctccaaagacgatgttgtgttgacgccgcggcagaaagcggggcttttcaatctcaccaattatcttgtgaagcaggcgggcagacgatacagggtcatgctgtcgatcgaccgggtgtgtatggctttggccaatagcgttacagcgggggagaatctgctggaattgccggagctgatccccttggagctgcatcagtatgaataggcttatgagaatactggtgatgttcgacctgccggtcaaaaccaaggcggagcggcgcagcgcgacgcagttccggaattttctggtgggcgatggataccacatggtacagtactctgtgtatgcgcgtgtctgcaacggccgagattccgtggagacccacaagaaaagaattctgctggcgcttccgtcaaaggggtctgtgcggatgctggtgattaccgaaaaacagtataatgccattgaactgctggtgggcaagccaacgccatacgacaagccgcagcaatttgagcaactgatgattttttaagaaaaatacggaacgacttctcacagaaatcgttccgtatttttgtgcttttgcctgccttgtgatgagaaagacgtgctaaaagcgttgaatttgcgttcttgattttcgcctattataccactacgagagaaaattgggaactacgacgccagtgccgcaaggccatcgaaatcattgattataccactacgagagaaaattgggaactacgacggtaatagatggctgctgacagttcatttcattataccactacgagagaaaattgggaactacgacgctttcgtcggcctcggcgttggcctgattattataccactacgagagaaaattgggaactacgacttttgaattctgtggaaatagcggttgattattataccactacgagagaaaattgggaactacgacgcaacggtgagcctgctaggactgaaagcgattataccactacgagagaaaattgggaactacgacacaactcttgtcggggtatcaaatgaggaaattataccactacgagagaaaattgggaactacgacctgttagcgtggccattcaaggcctttaggattataccactacgagagaaaattgggaactacgacttgaaactggtgcttctgttgttgatcatgattataccactacgagagaaaattgggaactacgactaggacagcctacgcagccgacccggtggaattataccactacgagagaaaattgggaactacgacttcagttttgcgatagtttccggggtgctgattataccactacgagagaaaattgggaactacgacgcggcttgatctgggataatcgtggtttccattataccactacgagagaaaattgggaactacgaccagcatttgaaaaagggctggcacgtctatattataccactacgagagaaaattgggaactacgactatatactacgactatataaagggttttttattataccactacgagagaaaattgggaactacgaccgtagacgcagcgtatcagtacaagggcaaattatgccactgaaatgactgtgtggagctattcggttccgcccggcggcgcgcgcaaggagcgcggcagctccggcttgatgggaatggtctggtgacggctctcagcgtatgaccttccgcgacagcagtaccaagaagtaacttgtggaagtgacgccgaggaaagcctctgtcagagacaccatttttgtaatggtattcagcggaaataaatcgccgtagccaacagcgaaaaaggttatcccgcttgcgtagatatgctcaagccacgtgcttgcgccatggaaggacaggaagggtgcgcaataatatagcgtaccaaacagcacgatcaccgcaaggatcaccaacagcattctgaatggtttggtcccatagccgcttatgccatcgagcatatatcgccctgcctttttcagacgattccgctcacatttcgttttagatctctgaaaatagagatggcagatgtcctcattctcatactcgccggtttgcctgaaattctcttttaacatgagcagctgcgcgggatcgctggaggatgcggcggtaagcggtggaattgcggatacaaaatccgtgaagcagatccttcccgtattgattgtcccggaaagggtgagggtttgggcttgcggcacagagagcttccatacagccgcgtttatgcagtcatctatatggagctcctgtatatggccgccgatctcagcatactcgagaaatttacaccgcttaaacgctaaggaatcaatatgcgcctctctgatatccacggtgtcgatttccgcatttgttatcgtgacggtatttgccgcagctttcacaaagcaaatctctttaaatgtagtgggaagaggatctaatgaaatagtcgtgttgctggttttggcgcataagaaatccaggaaaaggctttgcgacatcagcatcgtatctatttttacggtatccgcttttatatagcgaaaagaaatttccggagaaaagtacgaatttcctccacacgcgatcattccaacagaaatattggaatgatcaaagcgcgcaaaatcgaatacaagatttccctgttcaacgcttaaattgcaaagatccagattgagattgaaaaagcccgaataggaaaaatccatatcaccctttttcagttttgactgcatgatgtggaagtaagccggttccccgtggttattcagcagggcgcaccgcgcggaaaagccttcacgttccgtatagggaagtgattccacctcataaggcagttcatccccaagccatgcgaagtcatcgatgtatgtataatttaaattgatctcttttccggcagaatagtactcgaccagcttttcgtaatcagggagctgtagctgcgcgatttgagtaacatgaccagcctcatccttttggtaaatcgctgcactgatgccggagccgacatttgaaatcgctgacgggtagatgcctcccgtctgtctgtttgtgatttccttcttccagatccaaaactcctggcttgggttttcaattttttcaacaaaaatttgcatgatacactccttgcggcctttgtaaaaatgatttgccgaatgggcggaaagacggccaatatgacggtaacgggacgcgtatgcgtcccgttaccgttgttttctatgcggttttgcgcggcgcggacagtgcggggcaggggaggggatcagccgtccagaccggccttcagggcctccaccgttcgccgcagctcctccagattgacaaggcaggtgtccagctttttccgggcggtggtgcggtccacgtcggcggagagatccagcgccttcagctgtgcggtggagcggcggacggcccggccaaaggaatccaccgtccgcagaggattggcggccggggcgggcttgggcggaggcgggggcagctcggcggctttcgcccaggcgattgcccggtggacaaggccggggaagtcccc

SEQ ID NO: 1970 - DNA, 15584 bp, synthetic construct
  misc_feature 1..15584: note = Synthetic
  source 1..15584: mol_type = other DNA
gggggcggccgctccggtgtcgccgccgcaggccgcgaggctgagtgtcagcacacaggccagcaagagagcaaatacttttttcatgttcatttctcctttatatgatttggcccatgccagggtccactgatagagaggggtcacagtttgatgaccgccttgatgacatcctgccggtcgttgagggaattctcaaaagccagctggacgtcctgaaagtcaaattgatgggagacgatccgtctcaggtcgatttttccggaggcaaccatctggagggccgtttcaaagttgttgcggtagcgatagatcgtgcggatctcaccctccttgtacatcaggtccataaagcggtagggtgtctcgccgttgatgttgcccaccatgaccaccacgccgcagcgccgcaccagatcagaggtctgggccgccgtgtgggggttgcccgccgtctcaaagactacatccgccccagttccgccggtcaactccagaacgcgggcctgcacatcctcctccctggcgttgatcacggtgtcgccccccaattccagagccttttggaggcggctgggaaacaggtcgcagagaatcaccttcgcggcgccccgggctttgcaggccatcatggtcaaaagtccgatgcagcctgcgcccaaaatgaccacactctgccccagggacacgccgccccggctggcggcggaaaggcccacggccagaggctcgatgagcgcaccctccagtgtggagatggaatccggcagcttgtacgccagatgcgccggaatagccacgaaatcccgaagcattccgtcgtgaggcgggaccgacggaaactgcacgtcggggcacatgttgtagtgcccggagcggcagtagacgcaggttccgcaggtgatctgcggctcgaagcacacccggtcgccctgccgcagtcccgtgacgccgggccctgtctccacaatggttcccgcgcactcatggccaagaatgaaggggaggtcaaagaacttgccctttctcatgccggactcgaaaaagtggacgtccgaaccgcacacgccgacatactccacattcagcacaacttctccagccccggcccgggggatgggaagctctcggatttccatttgtttgaccgccgtcatataggcggccctgtttgttgtcctcacgctgccacaccttccctagaataatactcatcataaacaaatttacataatttatgataatttcttggattaattcttgttattttatgagtaaagtttagcaatcttttcggtaagatgcaagacgtaaattccacaacatttttgtccatttttgttcgatatatacaacaaaattttcttgacaacttgatttttagcgtttatttgataatattgaaaaaaagatttgcatgcccactgtatttgtgttaagatttatccatatttagctcaaaaataaccaactcatggaggattttatgagagcggatcgtttgaacgagatggaacagtatattttaggcagggaaaacgtatctttggaggagctttgcgttcaatttagcatctctatgaacacggtgcgccgggacatcgccgagctgctgaaccgcggcaatgtccgcaaggtctacggcggcgtgtcctctaacctacagcaccgtcccctaggcttttccgtgcgggagcggaaaaacagcgaggcaaagcaaatcattggccaactggcggcgcggctggtgaacaacggctcatccatcttcttggattccggttccaccacgcccaacattgtgcggcatctgggcgaaaaaaacggggtaacggtcatcacccacagcctcaccgccctgtatgaggccgcatccctccccaacctgaacatcatctccctaggcggcatctacgccccctccacctcctcttttaccggcatctccacactggacaccctttcccatctgagcatccagaccattttcatctccgccaccggcgtcactattgaaaatggtctgaccaacagcacctatctggaggcggagatcaaacgcaacgtcgtccagcggggaaaccgggtcgtcctgatggcggaccagagcaagttcggtcactccgccgtcatcagtttttgttcctttgagcagctttatgccgtcgtgacggaccgcatgcctcccgcaccctatctggcgttgatggagcggtacggaatccgcctgatctgccctggccacgaggacatttcgtaaccgttcttttgccgaggcaaaacccagccccaaagggacttctccccgcagtgcgggcaggatgctgtggtgctcaaattaaggggcggctgcgaaggtgtgttttcccacccttgggtggggcaagcatcgcgcctggctatacgccggacgcatttgccagggcaaagccccggccccctgcccctaaggggagaggagaatggaatacagagagtgaaaagtacagcgatacggcagaccggcctatgtttcggcctgtgagctgctgtgtgcgatttcaagagaggacagcaccccatacacctgacaaaccgggaaaggatgtgttaaggctttgcaggcgaagagctgcgccgatacagcgccccctctgagacagctcaaaaactggttcgctataaacaaagaatacgccttttcctgccctcccaaatagagcggggaaatgtatgaaaaaaacggttttccagcaggcggaaaatacgattttttgataacaccgcgcaggggcgctggatatttttgcagactgctggtatggtgtgtcgctgaataggaggcgatatgccatggcgaaaaggcgtgccaatggagaggggagtatccgcaagcgaaaggacggccgctgggagggacgatatacagcgggccgtgatccagcgaccgggaaggctatctacaaaaacgtcctcggcaaaacccaggcggaggtcaaggcaaaactcaaggctgctatcgaaaaaagtaattcgctgtgtgcagttaccaaacgctacacagtaggccaatggctggatgcctggatggaaaactacgccaagctccaggtccgtccctcgtcccacaagacctaccagggttttattgaaaaccacatcaagcctgccctcggtggcattcctctggaaaagctgacggcgatggatctacagcggctgtacaagcacctgctggagagcggcagagtgaagtgtacggagtcccgcaataagtcgaagggcctcagtgtgaaaacggtgcgcaacatcaaccagatgatttcttcggccctgaactgtgcagtggaacagcgtctgattcccagtaatcccgctaagggctgtgttctcacgaagctggagaggaaggagatgaaaatcctgccgccggagagtttgggcaccttcttcgaggaggcacggcgcagcggagtgtttgagctctactacatcgacctcgccacgggtctccggcggggagaactgccgcccacgtcaccgcctccatgcagaagcaggcggcgaacgcggtggggagtttcctctccggtgccctccagacctaaccactccaggttccctgtatgggtcacggcttgggacaaccgcccgctgtaaaatccaaacacccgaaaaagcacagaaagcaagaacaaagccacggaaattcaacgaattttcgtggctttggtacgccctgagggattcgaacccccggccttctggcccgcagcttatctgggggctcgcagcaagtgctttttgccccatttggtgctgttcgctcaggatattagccgcctttcgtgctgtgtattttgttaattccacagagaaatttcctgttctgggtcaggttatgggccaaagtgacgaattaggcactgcaattgaagttaaaagtcttgacaacctatggaatccattatacaatataaccatcttgtaccacaacaagagattttaggttactgcgatcaggcagtatgcctcgaagctctaccccaaccacatttgtggttggggtatcttcgttctggaaaaaacgactgagggaggcggcgagatgcactatacgcttggactggatattggaatatcatctgttggctgggcggttcttcaaaatatgcctgacggggaaccgttcaagattgaagacttgggagtgcgcatttttgagaaggcggaacagccaaagaccggcgcaagtctggcgctgcctcgccgggaagcacgcggcgcgcgccgccgcctccgtcggagacggcatcggaaggaacggatcaaagcactgcttcaagagacggggtgcatcggccgtgaagagctggcggtattgctggaggcctccggttttgacaaagatgtttataccttgcgggcagagggactggaccgccggctgacgcaggcggaatgggccagagtgttgctgcatctggctcagcggcggggctatcgctccaacagcacggcagaggcggcaaaagaccaggagaccggcgctttgaaaactgcgctgtccgccaatcaggtactgatggaggcaaagggataccgcacggcaggggagatgttctgccaagataaaaaattccagatgcttgggccggatggacaaatttggcgaaagactcgaaacacagctggagattacagtttcactgtgacacgggatatggtggaggccgaggtacatatgctgtttgcctctcagcggcagtatggaagttcctatgcgtccgaaaatatggagagccgttactgtgaaattctgttatcccagcgggattttgacgttggccccgggggaagcagtcccttccgcaaaggagacctgcgggggacttgtacgtttgaacgaacagagctgcgggcttttaaggcgtgctatacctttgagtattttaagctgcttcaggatctgaaccatatccggatccagtctgcgggacattcttcccgcggactgaccgcggacgagcgggagcggttgaccgctcttgccatgaaaagtgccagcctgcattatggacagcttcgcagggagttggcgctgaacggggaagaacggttcaatacggtgcgttaccagttggatgatgtggacgccgaggagaaaaagacgaggttccaggcgatgcagtcctaccataagatccgtaaggctctggatggcgtaggaaagggatatattgccgcattctcccatgaccagctggatgagatcgccacagttctcagtctgtacaaatcggatgagcggagaaaagaacagctgggcggcctgggattagaagatacggtgatccaagtgctgctcccgctttcgttcagcaaagcggggagcctttctctgacggctatgaaaaagatgatcccctatctggaaaaaggcgtcaactacgatgaggcggcccgcgctgtgtatggagaccaccggggccattttgaaaagacgcggacagagacgctttcctatggggcgctgcaaaagcagggggccctggacgacattacgaaccccgtggttctgcgggcggtttctcagacctgtaaggtcatgaacgccgttgtccggcggtatggctctccccaagcggtccatattgagctggccagggaaatgagccggaattttgcggaccgccaaaaaatcgataagcaatatcaggaaaaccgggcggcaaatgaacggctcataaagcagattgaagagatcaaaggccgccgcgccaccgggcaggatcttgtcaaattcaagctcttccgggatcaaaatgaggtctgcctgtactctggcacaaaattacaggcggagcggttgtttgacccgggatatgtggatgtggatcatatcatcccctacagcatctgctttgatgatggctaccgcaacaaggtgctggtgctggccgctgaaaaccggcagaagggcaaccgtcttccgctggagtatatggcgggcgacgcagaaaaaacggggcgctttatcacgttggtggagaccggtgtccgggactaccgcaagcgccagcggctgctaaagcagaagctgacggacgaagacctggagggattcaaggcgcggaatctgtcagatacccaatacattacccgggcggtatatcacctgctgaatgaccatctcaaatttgcggaagatacgcctttcgcgaaaaaaccggttcgggccatcaacggcgccgtgacggactatatgcgcaagcgtttagggttgcacaaaaaccgggccgacggagatctccatcatgccatggatgccgctgtggtagccattactacggatgggatgatccagcgcatttccaactatgccaagcggcgggaatggggaacgaagatcttgggaaattatgtggatcctgagaccggcgaactgttgacacaagaggcgtttgacgagaagtacgcgccctccttcccgccgccctggccccagttccgccaggagctggaggcccggcttgccccagacccggacgctgaaatccggtcgctgaatctgccccactatgacccggagcagatggtccgtccgatattcgtctcccgaatgccgaaccggaaagtgagcggcgcggcccataaagagacgatccgcagtggaaaactgccgggatactccgtcgtaaagacggcgctgagtgacttgaagctggacaagaacggagaaatcaaggattattacgatccctccagcgaccgcctgctttatgaggcactgcgggaacagctgaagctgtttggcggagatggaaagaaggcgtttgcacagccgtttcataagccgaagaagaacggcacgccggggccggtagtcaataaggtaaagacttacggaaaaagcagcttgaatgtggcggcctgcggcggcatcgcggacaacggcggcatggtgcggatcgatgtgttctacgttgaggacgatgggtattattttgttcccgtttatactgcggacacggtgaaaatgcaactgccgcagaaagcggtggtgcaaggtgccgcagtagatggttggaaagaaatgcgggatgctgatttcctgttctctctctatgctggagatttaataaaagtcatggcaaagaaacctatcagattacagttggccaacaaggatgcttccggcgagccggagctgcagagaaaagagtggatgctttattatgttggtgccagtatcagtacaggggctattacggtaactacccatgatcggaaatatcaaaaggggagtctgggagtaaagacccttttatccgtcgagaagtatgaagtcgatccccttggtgaatatcacaaagtacatactccggagaagcgtcagaccttccattaaaggagaggaggccctatggaattccgcgccatttttattgcgaattccgcacagctctcggtccgaaaggaacaactggtcatccggcagacccaggagatcacagtccccatggaggacatcaccagtttgatgctggagtcacaggctgttaccgtttccacggcagcgctgcaaaagctggcggattatggagtgacggtatatttctgtgatgaaaagcatatgcctgcggccttgctgctgccgatcaaccggcacagccggcagctgaaggcgctgaaaggccagattgctgtgacaaagcctgcgcaaaagcggctttggcagtctgtggtcatggcgaagattcggaatcaggccaagtgcctggagctgttggaacgtccagggagcggagacctgcgggaactggcccgcacggttcgatccggagatccggataactgtgaggcagttgccgcagcccagtatttcccgtcactgtttggacatggatttaccagagatacagattgtttgaccaatgccgcattgaattatggctacgccattctgcggggagcggtggcaaggaatctggcagtccatggactggagccctgcctggggatatttcatcacagcgaactgaatcagttcaacttggcagacgatctgatggagccgtaccgtccactggtagacctgtatgtggcatccactgtctgtggaggcgaggagagcctgacaccgaagctgaaacagcaattattcaatttaacgaattatgtggtgcgccaaaacggaaaacgctaccggatgatctccgccataggccgtatgacggagagctttgccagggggctgacacaggatgggacgtctttggaattgccggagttgatccggttggagtcctatcgctatgaataatcggcttatgagaatactggtgttttttgacctccctgtaaagacaaaggcggagcggggagccgccacgaagttccggaactttctcctgatggatggataccatatggtacagctctccgtttatgccagaatctgcaatgggacggattcggtagcggcacataagctgcgtcttgcggcggcggttccgtcaaagggttctgttcgtatgctggtcattacggaaaagcagtacagcaatattcagatcttgctgggaaagccgacggtatatgatgagccgcagcagatggagcagttgatgctgttctaaaaaatggagctgcatttgaaaaagtgagctaaaaaagcagaaaaaacatgcgtttcatttttgaaaaacgcatgtttttctgcttattcttgcgaaatctcttgaaaacgcgcatgatttgccgatgactttggagttccagagaagtcaattataccacaacaagagacttcagggaactacaacggtaaaggcttacgacagcgaagggctttaattataccacaacaagagacttcagggaactacaaccgggctttttattcattgcgcattcctcctattataccacaacaagagacttcagggaactacaactgacccggttccgatcctgatgatgcagccattataccacaacaagagacttcagggaactacaaccaacccgaagcggcgatactggcaaattttattataccacaacaagagacttcagggaactacaaccaaagttagtcacgccgttttcaactttcaattataccacaacaagagacttcagggaactacaacattggattaaacgtttatgacaaagaatctattataccacaacaagagacttcagggaactacaacttaaagttagaagcacctgaacaaacatttattataccacaacaagagacttcagggaactacaaccagattgatatttttgagcctcggaagattattataccacaacaagagacttcagggaactacaacaatcttcgctctgaccatttagaagttttcattataccacaacaagagacttcagggaactacaacgaagccgtagttgttcagcttccggtgcttattataccacaacaagagacttcagggaactacaacatgaaagagacgctgcatgaaatcaaggcgattataccacaacaagagacttcagggaactacaaccgtagctccaacatcaagggcgacagactgattataccacaacaagagacttcagggaactacaacttatcatccgattgaagcttgggactacacattataccacaacaagagacttcagggaactacaactgcgctaggtgacagcatccattaaagtgtattataccacaacaagagacttcagggaactacaacaattgccctccccttttgtaatcgcgtcctattataccacaacaagagacttcagggaactacaacttcggtatggggcgtaatattcgggaatccattataccacaacaagagacttcagggaactacaacattccgggttcaaagtcgcccgcgttttcaattataccacaacaagagacttcagggaactacaactactcagtttctccatattatgtatcctcaattataccacaacaagagacttcagggaactacaacgaacgggttatggttccggcagtctgcttaattataccacaacaagagacttcagggaactacaacatcatgcagcaaggtaacaggtgtaacaaaattataccacaacaagagacttcagggaactacaacatttgagcttatagtgatggagtgttggtgaattataccacaacaagagacttcagggaactacaacaagttaacgcctgcattgtgccttgtgattattataccacaacaagagacttcagggaactacaacgcgggtactgctggagcgggtggactctccattataccacaacaagagacttcagggaactacaacgtcccaggcgacggtcaggcccagagcctcattataccacaacaagagacttcagggaactacaactttgattatagcacaggaactcgtccggattataccacaacaagagacttcagggaactacaacgcttccagtcacgaccatactggtcctcggattataccacaacaagagacttcagggaactacaacagggagaaaaagcgcacgacatgaaccccgattataccacaacaagagacttcagagagctacaactcccgatctacttgataatctgatggatgtatgttttcccacctacagggggcaaacatggaaaccggctatacggcagccgcattcgccagggcaaagccccggcattcctctacttcgaaaggggagaggaggacggaatgctgaggtgagaataaccagcgatacggcagatcagcctgtgttccggcctgtgagcggctgtgtgcgatttcgcgccatacacctgacaagccgaaaaatgacgtgttgaggctttgcgggcgaagaaccgcgccgatacagcacctcctctgagatggccaaaaactgagccgcaatagacaaaagagcaggcaattggctggatcttcctggagaaatacgtgcagagcgcgtgggagaatgaggatgagtggcaagactgattatcaagagtccctacttcaaaggcggcggttccagcggtaagaataccgccggatatcctcggtacattgccactcgtgaacgtgtggagcttctgccggatggccgtccgccggcgcgcaaacaggagcagctcatcgaaaaactggtaaaggattttctggatagtagagagatgccgtcctatgcggagtacgcagaggagcctaccaagtaccacgcctcagagttcataacctccgtgcttgaaaatcattggccggaagtgagtcagtccggagcctgcatgaagtacatcgctacccgacctcgggtggaagggcagggcagccacggactgttcggtgatgaggatacggttgatcttcaaaaagcgatgacagagttgagtgagtacccaggcaacatctagacgcacatcatttccctcaagcgggaggacgcggagcgcctcggttacgataatgtgaaagcgtgacagaacctgctccgcacccaccgcaacgaaaccgccgccgccatgaatatcccgcccggtaactttcgttggtacgctgactttcacaacgagggtcaacaccctcatgttcatatgatggcttgatcggcgaagccggggccggcgtatctcaaccaggagggcatccgcaaaatcaagtcagagctcactcaggatatttttcaaggcgaactgctgcacctctatgagcgtaccagctcgtccagggacgagctggtacggcagagccataaggcgctgctggagctgacgaagcgtatgcgcccggagctctgtgacaacctcgcaattgaaaataagctgctggagctctcacggccattagagactgtcaagggcaagaatgtctacggttatttgaaaaagtccgtcaaggctcaagtggacgccgtcgcggatgagctggcaaagctgccagaggtggaaaaatgctgcaaaatatggtggcggctccagtgtcagaacgcccgttatctcatggacaaactcctgcgggacgggcctctgctgattccagatacaatgaaggctcggtactggtttgagcaagcggcagtgcaaggacataccacggcgcagtatgccctttggaagctgcttctctccgacgatgtggaagtccgtaatttggaagaaggcttgcgctggctggagactgccaccgaaaatggcagccattacgccgcccactggctggggaaagagtatctcagaggaaagaccgtcgatgtccatgtggcgagttcaaaaattgaaccgctataaacaaagagaagttccaaaccagcaaatacaaattttttgataacaccgcacaggggcgctggatatttttgcagactgctggtatggtgtgtagctgacaaaggaggcgttacgctatggcaaagcgcagagcgaatggagaaggcagtatccgcaagcgaaaggatggccggtgggagggacgctacacggcagggcgcgattcggtgaccgggaaagtaatctacaaaaatgttctcggcaagaaccaggcggaggtcaaagcaaaactcaagtcggcaattgaaaagagcggctcactggtgacgaccactgagcacttcacagttggccagttgctggaggcctggatggagagctatgccaaactgcaagtccggccctcatcccataaaacctaccagtgcttcattgagaaccacatcaggcccaccctcggggacatcccactggaaaagctgacggcgatggacctccagcggttatacaagcacctgctggaaagcggcagggtggaatgtatggaatcccgcagtaaacccgaggtcctcagcgtgaaatcggtacggaacatcaaccagatgatttcctccgccctgaactgcgcggtaaaacagcggcaatcccaccaagggctgtgtcctgccgaagctggagcagaaggaaatgaaaatcctgccaccggagagtttgaggactttcctctccggtacaccccagccctaaccgctccgaactcccgtatgggtcacggtttgggtcaactccaaaacgaaaattccctcatgcgtacttcaagcggcccttcggctccgccaccggacgcaaatcagagaacaataaattcttgtccttggtcccgctgagaatcgccaacaacagcttttcctactggctcacagtctcccgtcctgcgctgtgtcattctgttttcttcctgataactactatagcatatcctcggcgagaaggaaagggatgttttgcgcttcccgcatgttgcgcgctcctccgcgagtggtctacgctttcaaaatttttacttgctcagccgctccagtccgctaagctccacccgggtgccgctgatgtccaccgccgtcacagtggcggggtcgatgtagcagggaacttccaactccagccgtctgaaatgggtttcggcaaaaagaagccgcttaccacagtctgccttcctctacggcctgctggacttcttccaggctcataccctcgtagtgaccctggcaggggtccgtttgctcgcggatgacctcgccctcctggtcatagagaaaataggtatactcgtgggggcattcctcttttggcaagccgctcagcttgtcaaactctgcctgccgttccgccattcggacatactcgtcccccatcttcgccaggtccggctcgtagcccacatagtaagccagctgtccaaggccgtagctctcgccctttttattcttcggataatctccgttgaccaaatatttctccgccaggtttttgttctggtcgtccaaggcgctgttgttccccaccaggtactcataccaaagctccccgtctttattcttgaacatcttttcgtttccccggtaggagttcgggtcgtcgtccggcagaatcgtgccgccccggctcttgatgaggtccacgtcgccccgacgggggttttcaggcaccgtcttgggtgtgcggaggtcaataacgttttcgccggcggcaggctgggcgggctgctcccccaggaggaccgtcttcgtggcggagtcatagccaatctccgtgcccagcagttcgctgatggtgcggatgggcagatagttcgttttccctcccgcctcgtcggtgtagaggatggagccgggaaccttctggccgttggcggcggtaatgtcttggcccgctgtgattttctgctgtccgtccaaggaaacgttggcgaagttgtagctcacctgcccggaagcggccagggcggtggtcaggcaaagggacagggacagggcggcgaaaaagccgctggcaaaggatgtgattcgttttttcatgataataccttcctttcttttccggcgggaagggaacgccctcccgctctgttctgtctggtaaacggaggaggagggcattgtatttcacgatttgaaaaattttgaaaaaacttttttattcctcaagacgctccagtccgcccagctccacccgggtcccggcgacgtccacagccgccaccgtggcggggtctatggggtagggatagcgacagctcacgttgccgcctccgccgctggactccgaatttgagaggtccacatacttcccatcctctgtccagaggccctgcacgctgtcctgaaccgcgtggcagaccgccaaggttgcttgaaagcgccggtcattttcctccggagagagagccgggccgggctcaggcagatcctccgggttcacagcctcgtaggcggcggacagctccgtggcggaaagctcaaacccggtaaaccggagggggatgtccgtgagcactatctcgacatcggccccctcgtaacggatgggcaggatcggctcctccagggtgaaggtcaggtcaaagggccctgcaacaaagaccatgcccggatggatattctcaaaggggtttacgcttgcttggccttcactgtcgtttacgtaggtgcctacgcgctctatatgcaaagtcagctccggccgcttggtctctgtgaaccaatcggcctccaaaaacgtgttctcctgaaacttgagggtgttcccctcccgctcctgcggcatgaggaagcttccaaagcccggctgtcccttgtccagctcggcttggatatccgcctctatctgttccggggacgcacccatagcggtgccggattcttccacctggtttctcgtatactcctcccactggtcgtcccgcaggaagaaacggcagtccgccatatagaggggggtgtaccgctggacttcctccgggatgttcgggctctcgatgtccatggacacccacagatcggtcccgttccacacggcagcgtggagggtcaccgtggcgtctcccacggtctggctctgttcgatggccgtgcctgtccgggacaggacctcctcggacacctccggggccccctggtccacccccagccgggggaaccactgggagaactgcccggcgggcttcggggcctcctctttggcctcttccctgggctccgccgccagggccgcgcagctcagcgacgccagcagggccaaggtggtcagccccgaaaccaaacg

SEQ ID NO: 1971 - DNA, 14785 bp, synthetic construct
  misc_feature 1..14785: note = Synthetic
  source 1..14785: mol_type = other DNA
aagcttggtgtaaatgcggctttgaaggcggccatccaggagaatccggtcgcccaccttgcaatttgcagcctgggcggcaactctgccccataaaatacagggaagatagtccgcacgccggaatccccggggaacggccagcatcacgtcgcagatttcccgtcccaggggggtgcggcggtaggtcggttcccggcatacaatgccgtccagtaggcactggttcatggcttcgccgtcctcggcgcagatgtgggctgcaaatacaaaaatggacaggtgtcgtcgtccgttttcccggaggttgtgggagcgtacctgaccgctgacggtcagcatcccgccgcctgataagtccagcgtgtccaaaacagagccttcggcaatgacaggcagaatgtccacgaccccggaaagccggggcacctccagcagaaaacggaaaaactgcttattgtggttttcgtgggaaagttggggcagcgccaaaaggcttccccgcagggtgatttgatttcgggtcgcagccggttccatagttaccacctcatgcgttagatgtatggaacatcctatgcaccgggatggcggaaagaacctcagccttcgtccgctgcccagccgcgggtacaccggacggccttttcccagccgctgagccttttttggcgttcgatttcagctaacatgggccggaaaatgcgatcagtgtgccgaatggtgctgagctgttgctggtcttcccagaacttaacagccagtcccgccaaaaatgccgcaccggctgctgttgtctccacgcattttgggcggtcaaccggggcgcgattgatgtccgcctgggtttgcatcaggtagttattggctgccgcgccgccgtccaccttcagggaggacaggcggatgcttgcatccgcctccatggcggagagtacgtcatgaatttcataggtgatggaatccagggttgcccggatgatgtggtttttgttcacgccccgggtcagccccacaatggcaccccgggcataggcatcccagtatggtgcacccaggccggtaaaggcggggacaacatagcacccgttggtgtccggcacccgcttggcaaggtactccgaatctgcagcggagtcaatcagatgcagctcgtcccgcagccactggatggcggcacctgctacgaaaatagagccttccagtgcatagttgacgcttccgtccagcccccaggcaatggtggtaaccagcccgttttgggagcgaatgggcttctttccagtgttcatcagcaggaatgcaccggttccataggtgcatttggagtcgccgggctgaaaacaggcctgcccgaacaatgccgcctgctgatcgcccgctgcgccggagatgggaatgggagccccgaaaaactggggttccgtcagcccatagcagcagctggagggcatgggtgtgggcagcatggagcgggggatttccagtcggccaagaatatcatcatcccattgcagggtgttgatgttgaacagcatggtgcgggaagcgttggagtagtccgtgacatgaacccgtccgcctgtcagcttccagatgagccaggtttctacggttccgaacagcagttcccctcgctgggcggcagccatggcaccggggacgtttttcagaatccaatggattttggtggcggaaaaataggggtcaatcaccagcccggttttctcccggatggcttccgtcagtccctctgcccgcagatggctgcaaatgtccgttgtccggcggcattgccaaacgatggcgttgcacacaggctgaccggtgtatttatcccacacaacggtcgtttccctctggttggtgatgccaatggcggcaatgtctgcggcgctggcaccaatactggcaagcgcctgccgggcaacggccagctgcgtttcaaaaatttcatccgcatcgtgctccacccagccgggctgtgggaaaatctgggtaaattccttttgtgccacggcgcagatatcccccgcctggttaaatagaatgcaccggttagaggttgtcccggcatccagcgccatgatgtatctgggcatttttgtccctcctgttactgaatgtggacgtgattgttgatgtgatcctggcagtagcagtagtaccccttgcacttactgcaatagcggaattccagctctggattcgttacatccgtgcggccacacacggtgcagcgatggttatagttctgctgttccttctcctgctggggcttttgggtgacatgtaagtggataaccttcggccccttggccttgggcttcacccggaaaagcttttgcagcttcaggcggaagctgagggggaagatgttcagcacgtcagcgccaaagaacaaaaagtagttggcaatggcaatgatggggaacaggttataggggaaacggttctgaatcacggagaggagcaccagcaccagctctaaaatggcaaagaaccatgccttaatgggaataatcatcatgaacaggaacgtggcatcggggaacatggtggcgtaagccaaaaacaggctggtgttcaagtggctggcatcggcgcggcagccggggatgagcatacagaaaatatccatcatcaccacgccggacaaataaaagaggttaaatcgcaatgtgccccagctgcgttcaatcaccataccaatggaatagaagcagaacaggctgatggctaccagcagcaaatccaacccgccgctcatgccgctgtaggtggtcagggggtaggtgaacagccgccagatctgccccttgaggatggaagcccggtcaaagcacagcaggtagtaaaggaaatagttttgggcaaacatactcagtaaatacacaacggcgttgccgatgcagatgtagagcatgagattgcggatgcctttgttccggttgcgcaggcagaaccgctcaaaatttctgcgtaggtttttcaagttactcaactcctaaaattcggttgccatctattttaccagcacttttctcaaaagtccatatcgtatttgtgaacaatggaggaaagtttcgcgcctacttgacaaaggacgatttgtgtatataatagtccccaaacataaaaattgcatacaagccttatcaagagcggtggagggaacggcccgatgaaacccagcaacctgtcaatcaaggtgctaaatccggcggcaacgaaagatgaggattcgatatttgcgcacatcgaatcttcggtgtgcggttttttgtttacttgtttttctgcgtatagagaaaggaattatcatggaaaaaagaattttcacctctgaatgtgtaaccaatggccaccccgataaggtggcggactccatttctgatgccatcctggatgcctgtcttgcccaggatcccaattcccgtgtcgcctgtgagaccatggtcactaccaacttctgcctcatctgcggcgaaatcaccaccagcgccaaggtggattatcccagcgttgcccgggaagccatccgcagaatcggttatgtctaccccggtgacggcttcgatgccgacacggtggagattcagtgccgcattcacacccagtctgccgatatcgccatgggcaccaatgaccaggtgggcggtgccggtgaccagggcatgatgtttggcggtgcctgcacccagaccccggagttgatgcccatgcccattgcgctggctcgtgccctgtctaatcggctgaccgagtgcattcacgaaaacaaaaagctgcgtgccgatggcaagactcaggtctccgtggaatttgatgaggatggcaacgtggttggcgttgacaccgtggttgtttccgtgatgcacagtgctgatttccccatggaggagctgcgcaagtacattgctgacgaagtgattgcccctgtccttgcaaagtacggtttccgtatggaggatgtgaaccacatctacatcaatcccactggcaattttgtcattggcggccccaatggcgataccggtctgacgggcagaaagattattgtggatacctacggcggctatttctcccatggcggcggtgcattctccggcaaggatcccaccaaggttgaccgcagtgctgcctatctggcgcgctatatggccaagaacctggtggcagccggtctggcaaccaaggtgcaggtgcagctggcctacgccatcggcgtggcagagcctgtctctgtccgtgtggattcctttggcactggtgttatccctgaggagcagatgacggaactgctgcgcaagaccgtggatatgacccctgccggaatcatcaagcgctttgacctgcgccgtcctatctatgcggacaccgctgccaagggtcacttcggcgtagacggtcgtccctgggagcgtactgatttggctgaggaactgaagcagctgatttgatgacgctgcgaacatagtacggatacgttggttcccgaacacgcccggtgacgattgacgcaggaaactgttgcattttgaatgggggaaagtacactggaatacatttatctgcatggcctggggcaaacggcaagcagctggcagccggtgcttcaagcgcgctccctccccggaacaagccggtgcctggatttggtggagcttttgagggggcaggaggcaagctatcagaacctctatgctgctttttcccgtcagtgccagcagacggcgggaaaagtaacgctttgcggcttgtccctgggcgcggtgctggcactgaactacgccattgaccatcccgagggggtggaggcgctggtgctgattgcgccgcagtataagatgcccaaaaagctgctgtggctgcaaaatttgatgttccgttttatgccggaatcccaattccaggaaaccggattcaagaaaaaggattttgtttccctgtgtcagacagcggcggtgctggattttaccgattctctgggggcggtgcaatgccccacgctggtggtttgcggagcaaaggacagcgccaatcgaagggcggcaggggagctggcagtcctgcttccccatgccagtctcatggaagttccgggggcagggcacgaggtaaatacccaggcgccggaggctctggcagaaatcctacagcggttttatgcacacctgtaacaaaaaaggcagagcgtcggggttggcgctctgccttttgaaaaattctttggagctgagataatgaaccgcgtggaattatcggaatatatacaaaatcgctacagcgtctcgccggatttcccttgggcaaagtaccccagctatgaggtttttcgccatggcagcaaccaaaagtggtttgcggttatcatggagatacccagcaaaaagctggggctggacggcgagggatgcttgcaggcggtgaacctgaagtgcgacccgattttgattggctccctgctggaagaagcgggctttttccccggttaccacatgaacaaggaacactggattacggctgccttggatggcaggatcccagatgaaaagctcaagattttactggatatgagcttcgatgccaccctgtgagaaatctgaatgaaccctcccggtttgatgccgggagggttttgctacagcagcacaggctgcatttgccttccctggacggcaagttccaccgcctggggaatcagatcaaaatgggcaaccagggatgttggtttctgctccgggtcatcctgcccatagggaataaaaaagtattgctttcgtgccatcaggcggccaatattctctgccgcaccggccagcccatcgttggtggaaatggcaaccagaaccggcctgccgtttcgcaaatggctttttgccgccatggtcactggggtgtccgcaatgctgtggctgagttttgccagggtgttcccggtgcagggggcaatcaccagaatatccagcagtttctttggcccgataggctctgcctcggcgatggttttgatgaccgttcgcccgcaaatttcctccgcacgttccagaaattcgcttgcttttccaaacctggaatccgtggtggcggacacaaaggaaaaaatcgggtataccgtgtgcttctctgccagcgcctccaccaccgggaaaacttttgaaaaggtgcagaatgacccgcacattgcaaatccaatattcatatccgttcctcctgtagccggtgcaaaagggtgtccgcaatcagcttgccggagctttccggcacatagattccgggcagtccccgcgccggaataacgtcatcccctgcaatgccgggcagggatgccagttcgattttcaggcagtttctgcattgggcggaaaccgcctccggtatcatcattcccggtgcggtgttataaagaatgcggaagtttccaattgcaccgtccaggttttcccggtgtaacggacgcagcccaaaggaggcggcttctgccagatgggcttcgctgcgggagagaacggaaacaattgcgccgcagccctgcaacagccgcgccagatgttttccaatccgcccccagcctactaccagcacatttgttccgcgcagcgaaaatgcggttttctcagcggtgacccgcagggcacaggcagcagtcagtgccgcattttcgtataagtacccttcgtccttcaataaatccaggctttggtattcatcgggaatctggctgcccagattgccgccaatcagaatgatttggggcggcagcagctccagaagagaacgcagcgtcctgccgctttttaagattcccggactggaaaagctgggaacatccatcagcaggtgcgttgcctccggggtcacatggtcggtaaccgggattccccgtgccgcaagaatccgagccgcctcgtggcaggcttgggtgcagccaacggggtatagtagcaattgttccatcttgaatcactcctgtgctccaccatatgcgccgtttgtgccgcctgtgacgggggacttgatttttctcattcttcctgtataatattcttgggtgtatctactcagctggaaacgccctgaagggaggaatcaatatgcagcgattgggctttattcacgatatgctggatgtgaaggtactcattctgtttgtcatgtccaaggtcgattatccggccaccggccagcagatttatgaattgtgcctccaggatgattgcgtgagctattttgatatttatgctgcgcttccgcagctggtgaaatccggccatttggttgaaaaggagaaagacctttatgccattaccgaaaagggcagggcagacggggcgctgacccaggactccattgcctacaccgtccggtgcaaggcggaaaacgccgttgatcgcttcaaccggcagctgcgccgcagcagctatgtcaaaacgcaggtcattccccgagagaccggcgaaagctctgttatcatggcgttggatgatgaaaccggaaatctgatgacgttggagctgatggcccccaaccagcgccaggcagtgcgcctgggcaagttctttgaaaaaaaggccgagaagctttataatatgattatggcagaacttttagaggaggaggacgaaacggaagcctgaccccttgccggtgtgccaaaatcgtggtatagtataagtaccccgggagaaccggtacatagaaaggagctgccgcatatgaagtttcagtttagtgaaaagaaagtcaagcttcctgagaaggtacaccagtacgccgagaagaaagtgatgaagctttcccgctacttcgaggatgatgcagaagccttgattgttttctctgtggagaagaacagaaataaagcagagctcaccgtccacggggcaggaacctggttccgcgcctctgagagcacttccgatatgttcgcctccattgatgcagcggttgccaccatcgaaggccaaatccgcaagaataaaacccgccttgcccggcggctgcgccaggacgctttcgtccgcagtgtccaggaggaaacgtcctttgcccccgatgagccggaggagaatcttaccatcactcgcgtcaagcatttcaatatgcgcgccatgacgcgggaagaggctgtcttgcagatgaatctgctggagcacaatttcttcgcattccgtgatgaggacaacggcggatgctttgccgtggtgtataagagaaatgatggcggctacggcgtgattgacgacgaagcgtaaataaaaagctggggctgctttgttggcagccccaattttgcagcccggaagggttcagccagtgccaagcggcactggctgttgctttttgcgggaggatcaatgcgtcttccacacaacgcggattccgtgttcctccagccaggccgcgtggcgttccatggtctggcagcggatgccctttggctgggcacacacaccgatgtggacaacctcaacgccggaggacaccagccgttccagcttctcagtcatgccggggtcttcctgtggcgttttgccgcagctgctgcaacgcagaaaagcgcgaaggtcaacgtcctctcctgcatagcaggaaaagccagcccgccgctcccgcaaagcatccaggcaggccacaccggcgcagacctggtttgctttcaggcagttcatcattgcaatttttgtcattcctgttcctttctggccagtggccgatacaaaatgcgggggatgccccacacgtcggcttccacaatgtccatccgctgcaaacgggaaaaaggcaataagcgggagcagataaaatcgtctgccagacgttatttctttttcccgcagcagtttttatattttctgccgctgccgcaggggcagggggcatttcttgccggtgtacctgcaatagtggcggcgggggccgtctttgctttgaacagtgcagccatttcacccagataatcccggtaattggggtcaaagtgcaactggcttgccacttcgtctgcatcctcatggggcagtcccgcttctgcgggggtgtgtccgcacaggctgtatctgcgggtgtggtagctcatttccagaagatgctccgcaaattcccggacttcctgcggggtcttgcactgaacgccaagacgctggcagtcattcgccacattttgatagggatgttccagtcggatgcacatttcaatttcagtgataacatcgtcgataggacatttgagctttcgctgggttttgcgcaggtattccgccatttcacggagctgtggcgtttcttctatgtaatactcatcggtatatttcagcagttcctcttttgcggggatataccattcccgtccctcctggccgtcctttgtctcccaatatgccttgtcatcaaacgcatagatgtgctcagcaaccaactcctgctccatggggtcagaggaggtggaatccgcctggaaaacctgcggccttaaaatgctgtaattatgttgctcgtggacgataatgtcagcagcggccagaaaatccgcctgggagatggccggattctggctgttgtagattttgaaaaccatgcccaggggaattatcgcgtaaaattcactggctgcatcaaagtagtcgcgaagtgcttgaaatgtctccctggaaatctccaatttgctttccattttccgaagcttctccggcgtgtagacaaccggaaacccatattcgtcccagcattccgtgctgtttgtttctttttccatgtatgttgtaccgtccgttccgtgtttgctgattcagttccattataaccgacctgcctgtttttgcaagggcaaacttttagtttgatattatttttcaaacgatattgacaaaacttgccagaatgccataataaaaatggcttatgccactacgagagaaaatggtgtttactacgataaggtagaacacctcggagctctaccccagtcgtaattttgcgactggggtatctacgttctatggagaaaacgggggataacgcaatgaagaagggacagaagcattgtcactacacattgggcttggacatcggtattgcgtccatcggctgggcggttctcggcaatgacgaggatggaacgccaaaccggattattgacctgggcgttcggatatttgaatcagccgaagttcaaaagacgggcgagagccttgcagcgccccgccgggatgcccgcagcgcacggcgcagacttcgccggcaccgtcaccgcctggagcggatacgttatctgctggtgcagcagggggtgctcacccaggaggaaatgacccatttgtatgacaaaagcgacatggtgtcgccctatcagctgcgtacagaggggcttgaccggcttttgaatgcacaggagttttcaaaagtgctgattcaccttgcccagcgccggggctaccaatccaacagtaccgccgaagaagcaaagaacgaaaaggaaaacggcattatcaagactgccattttggaaaatcagcagcgcatggagcggggcggctaccgcaccatcggtgaaatgatgtatcgggatgcggcattctgggagacaatcaacggaatccgctaccactgcacccgcaataaggcgggggattaccgctttaccgttgaccgtgcctctattctggcggaggtttccattctctttgaagcccagcgccgtcttggctccccttgggcttccgtggaaatggaagacgcttacactgcaatcctgtccggccagcgcagctttgacgaaggccccggcaacgacagccacggcaacgaaagcccgttccgaaaagccatgtctcacaacgtaggaaattgcaccttgataccaacggagctgcgtgcggcaagagcggactatactgctgaatatttcaagctcctgcaagacctcaaccatatgcgcctgatggacaacagcggttcgcaccccctgacccagcagcagcgtgccatcctggaagaaatggctttccgctcggcaaacctgacctatgggcagctgcgcaaaaagctggggctttcggatgaggtgcggtttgcgggtctttactatggggaggacaccatagaaaaagccgaaaagagaaaatgggcgcagatgcagtcctaccacaagatacgcactgccctggataaggtgagcaagaatgccattcagacgctgacccaagaccagctggacgcaatcggggaaatactggcgggcggcgtgtcagacgcaaagagaataaattccttttgtttggagggaatcccagaggagtaccataaagcattgttgcctctttccatctcgaaacgtgccaagctttccatagctgcaatgcgcaaactcattccgtttttgcagcaggggatgcgctatgacgaggcgtgcaaggcagctggtttggattttcatggagcagacggcaaagtggaaaagctcagcgacttcctcaacgagataaccaacccggttgtccgccgggcggtgtcccagaccatcaaggtggtcaaagcggttgtggataactatagtaataggaaagaaatgaaactggatgcagtacgcattgagcttgcccgtgaaatgcaccattccatcaaggaacggaacagaatgaaaaaacggcaggaggaaaatcgggagaaaaacgagcaggtgaaggcgcaaatcctggaaacaaaaccgggaacccgggtgaccggattggacatcgtgaaattcaagctgcatcaggaacaaaaaggtttttgcccatattccggtgtggaaataaaaaaagagcgtctctatgagccggggtatgcagaggttgatcacatcattccctattcccgttgctttgacgacagctacagcaataaggtgctggtgcttgccgaagaaaaccgccaaaagggaaaccgtacaccttacgaatattttggggcggacgaacagcggtggcatgaattttccgcccgtgtgagggcatctgtccaggatttcaagaagcggcaaaagctgctcaatacctcctttggggaggagcagaaaaatgaatttacccagcggaatttgaacgacacccagcacatcacccgtgtggtatataactatctgcgcaacaatctcgaatttgcggactctgcttacgccaaggctccggttcgggcagtgaacggtgcggtgacggcaatgctccggggcagatggggcattgaaaagatgcgtggaaacggcgacctgcaccattgcaaggatgcggtggtgattgcggcaaccagccgctccatggtacagcgcctgaccaattactataaagaagaagaacggctctttatggggaaaaccaattttgttgacccggcaaccggcgaggtgctgaccaggaaagaatttcagcagcgctttgcgccgaaatttccacagccgtgggatcgattccgggaggagctggaagcccgcctggatcccattgaccccatggaggcggtgacggcgctctatctgagcacctacgagccggaggaagaaatcgcccctgtttttgtctcccatatgcccaagcatacggtgaccggggcagcgcatgaggaaacgattcgcagcagaacagagacgggaaccgtggtcaaaacagccctcacctctttgaagctggataaaaatggcgagattgacggctactataatccccaaacagacccccggctctatcaagccctggtggagcggctcaggcagtttgacggggaagggaaaaaagcgtttgcagagccgttctataagcccaaaaaggatggaacccccggccccagagtggacaaggtgaaaatcgaaaggaaatcctctctgagtgtgtccaccggcaggggcgtggcggataacgggagaatggtgcgcattgatgtgttccgtgtcccggatgacggctattactttgtccccatctatgtggcggataccaagaagggaatcctcccctccaaggcagttgtggcgggcaagtcgccggaagcatggaaacagatgaagccggagcatttcctgttttccctgttcaagggcgacctgatttacgttgagagccgcaaggggatttcccttgcactggcagaaaaagcaaccggtgaaaagacaatccaggtcaaatccggtctgttctatttttgtggagcagatatttctactggcagcatcggaatggaaatccatgaccgccgttacacaaaaagaggcttgggaattaaaacgctgacattgattgaaaagtgccaggtggatgttctgggcaatgtcagcaaggtaaggcttcctgaaacacggttggaatttcgggggaggaaataaaaatggaatatcggaatatcttcattgcaaatccggcaaagctcagcatccaaaggaatcagcttgtgattcagcaggaacagcagttcaccgtcccccttgaagacatttccagtattctcatcgaaagccaacaggtgacccgagcggcgaagccgccttcgctccctctttgagggagctgctgagcgaagcgaagctgagggagtgtcgtgggttaaaatggtattgcccacggtttttgcccgtacccgtaccgaatgggtcgcctaccaggcgacccgctccgaaccattgaattgctgatcggaaaaccaaattccagcgatgcaacgcaggatgatgagcagctgatgcttttttagagaaaaacagcaggacaatctcaaaacagattgtcctgctgtaagcatttttctgccgactttttccataaaagggggcgagaaaattgtctttttgcgtggtatttctgtggtggttataccactacgagagaaaatggggaactacgacactttcgggcagcttatgattgaatccaatgttataccactacgagagaaaatggggaactacgacttggaaatctacgatacgccgaaaccgctggttataccactacgagagaaaatggggaactacgacgacaagggcaacattgaccgcgttcttgctgttataccactacgagagaaaatggggaactacgaccattgataaagcattatcttcagattcatggttataccactacgagagaaaatggggaactacgaccctgtaaaaaccaggtcgtcgcagccgttggttataccactacgagagaaaatggggaacaacgacaatgtctcagcctccaatattccgtgacgatttcaccgcctattatatccgcattttccgcttgcgtcaatccccaaatggagagaaacgtttttaacaaaaatagtccctcgaaatggatgctcccttccttggagttcccctggcaggattttataaggatgaccgccgagatgcaatttgcattctgattcacaaaacggaagcagttttctcttgacattggccgcctgcggcgctataatatcccggtaagtgaaacgggcttgtagcgcagctgggagcgcaccacattcgcattgtgggggtcgggagttcgaatctcctcaagtccaccagaagtccaccgtaattttgatagaattacggtgggctttttctgtacaattccccgcacacgcggggtatcatgctaaaaataaaaaaatcctattgacaaatggcgcatcctgttgtattataaccaagctgttactgagacagcatgaagcgagcaagcgcatggagaagtcgcgtagctggccgagcgcgcacgattggaaatcgtgtataccccaaaagggtatcgagggttcaaatccctcc

SEQ ID NO: 1972 - DNA, 14572 bp, synthetic construct
  source 1..14572: mol_type = other DNA
  misc_feature 1..14572: note = Synthetic
actgcaccggtcggcaaattcgcagccctcgcccacatccgcagggttgggcgtggcaccgggaatggtctccagcttctgatcgtctgcaaggcccagcaccggcacactgcgcagaagggctttggtatagggatgggacggattctcgaagatctgctccagagagccaaattccaccacccggcccatgtacataacgcagacctcgtctgcctgctctgccaccaggcccatattgtgggtgatgaggatcacggacttgccttcgttcacctgcaaatccttcatcagctccatgatctgcgcctgaatggtcacatccagggcagtggtgggttcgtctgcgatgatcagctccgggttgcagatcatggccagggcaatgaccacacgctgcttcatgccgccggagaactggaagggatagtcatggatccggtgctccggatcgggaatccccagcttccggaacatatccagcaccttctcctgggcttccttcttggacattttgaagtgctgcaatagattttccgccacctggtcgcctactttatacaccgggttcagagaggacatgggatcctggaacaccatgccgatctcggtaccccgcaaggaacgcatttccttgccatagggggccatgttctccagccggtacgcatgaatctgtccgtcccgcagggcgttatactggatcttatccgccttgaccacggcgttttttggcatcagcttggcaatggagtgaaccgtgacgctcttgccgcagccggattctcccacgatggccagggtggtgccccgcttgacccggaaggaaacatccttgacaatcttgatttcctttttctccaccatgaagctggtgttcaggtgggaaacatccaaaataatatctttgctatccatggcttttcctccttactgctgcttgggatccagaacgtcccgcaggccatcaccgaagaagttcacggcaaggacgaacacagagatgaccacaccgggcacaacccacagccaccagtagttcgccagaacatccagagactttgcggcgttgaggatattgccccaggtgggaacggaagagggaacgccaacaccgataaagctcaggccggcctcggagaggataaagcctgccacattcacggtggtagcgacgatcacaggggaaagtacattgggcaggatctgcttgaacataatggcaggccgggacataccaaaggcctcacataccttgacataggtctcctcacgcagtaccaaaaactcattgcgcaccatgcggaaggtagtcatccagccggtaagggagaacacgatcagcaggttattcagtccctgccccaaaatggccaccatcagcaggatcaggatcatattggggaaggtctggaacacctcagagatccggatcagcagggaatcaatccacttgccgaaatatccggcgatggcccccagcacagcgccgatcagagaaccggccagtgcgcctaccacgcccaccaggatggacacccggccgccgtacagcacccgggcgaacacgtcccgccccagcttgtcggtgcccagcagatgctctgcactgggagccttggtaatggcggcgaaatccggtttaatggggtcgtagctggtaagcaccggggccaggatacaggccagggtgataatgatcatgcaaataaagccgatcatggccagcttgttgttgcagaatttccgcaggtttttcttccacagcttggtggctttggatttatcagtcaatgccatagcttctacctccttactcacccagacggactctgggatccaacagggctgtcagtacatccaccaggaagctggcaatgagcattgcggcagcaaccagaactgtggtcaccatgatcaccgggtagtcaccggccaccacggcatcggtgatggtaatgccgataccgggccaggagaatacggactcaatgaccacggaaccggagatcagcaggggcagacggaacaccagcaccaccatcaccggccgcagggcattccggaaagcgtgcttaaagtacaccttccactcaggaaggcccttgctccgggcggttttcacatagtcactgttcataacggacagcatattgttccgggtgtagcgcatcagcaccgcacacatggaaatggtggtggtgaccaccggcaggatcaggtgctgggcctgggtaaattctccggtggcagacatccggttgcctgtggggaggatgcccatcttaatggcgaagatctgcaccatacagatgccgaagaagaactgggggatggactggccgataactgccaggaaccggccaatatagtcgatgataccgttctggcgaatggcggaaacaatgccgatggccacaccgatgacggtggacagcagcagtgaccacagcgccagctcaaaggtagcaggcagacgctgggccagcatggtcttgatggaagatccggtggtgatgctgtagccatactcgccacgcagcatttcacccacccagcggaaatagcggacaaagaaggggtcattcaaacccatctgctcccgcagagcctccagattttctgcactggcagccatatccggagaaaccatgtagctaatggggtccacccccgtcatctgcaaagcgccaaacaccagcaggctgatgagcagcagcatgggtatcatttgcaggagctttttcagggtaaatttcagcataaatacactccattctattttgtcgggaacgcagaagcgatggttccccagggggaatctctgagatccgcacacagctgaaattggtcagcgtttcccaggatcggtgtttttaaaaatggggaatgcggtggttccgcattccccaatgggtatccgttgccggacaaaagcacaaatagaacgcttacgatctgctgctgtccgcagatgggatcgtgccattttgcccagtcttagccaacgatctcccagttctcaaagccgatatcggtcttgtaccaggggttgccaaagacctggttgtcattgaccttcaggtggttggtgttgatgaacacgttgttgcccagggtgaacagaggcagcttgtacagcatctcgttctccaggttggacagctcggtgaggatcttgttggtctcggcttcgtcggtagcagcagccagcttggagatcagaccatcaaaggcagtgtcgccgccgaagatgttctggaagttggcgttggcagagttgtattcgccgtaccactcgctgatgtcgaaagcagacaggcccttatagcccacatcgtagttccgggtctggaacagatcctgggtgccctgggtggtctggataacttccacatccatgcccacctctctgaggtagtaggcaatggcttccatgaagtcaatggagccctgatcggagtagtagtacaggatacggaacttgtggctgaagtcatagttggcttccttcagcagctccttggccttctcggggttgtactcaaagaccttgccgttgaaagcgggagaggtgttggaaacaccggagttcacaagggttgccaggccggggaacaggctggatgccagagtctcccggtcgatggcgtggaggatggcttcccgaaccagcggattctgcattgcggggttctcgttgccgtccacacccttcatgttgcagatgaaatagcggtagaacaggatgtccacggggaacatctgcatgccgttgatcttctgaacttcgttgatggtgccaacaatgttggtgttgaagtagtcaacctgaccggcctgagcggcggtgatctggtcagccacataggtggaaacgatcttggtgatcttgggctttacgccgtcatagtaggggttctgctccaggacatagtagttgcccacattgaactcggtgagcatgaaagcgccgctggaaacaggatggctccagaactccacgttcttggtcagctccagaacatccgcgtccttcagcacatgctcgggcaggatggcaaactgggccagagtggcagccagtgctctgtagggggcatccagggtgatggtgatcttgttgccgtcgatgaccagaccttccagatcgtcagcggagccgtccttccaggcagcggcgcccttgatcttgttgaaggcattggtgtagatgccgttggaaacggcggtcttcaggttggccttgatggagaaagccacgtcctgaggggtgatgggttccccgtcggaccacttgctgccgccgatgaagttgatctcgtacaccagaccatcgtcggacaccttgaagttggcatctgccagatcggacttcagggtggtcaggtcagtctctgccaggaacaggctgcggaacatctgcatggttcccaggttctggtcctcccaggggctgataaggcggtcctgcacaccggtgttgccgccgttggcggtgatcaggcgcagggtctgctccacaggagcggaggggtcagcgctggctgtggcattgttggcaggagcctggggctgcgcagtcgtgggagccggctgctggctgccgccgcaggcagccatggacagaaccatgaccagtgccagcaggagagcaaaaatctttttcatagcttcacctcataatataatggttatgggaaacttcaacacagacagtctcccaagacttgacattattctacataatgatgaacagaatatctattgacggaatcgtagaataaaatatgtcgattttgtaaaatgtgaataatcgctaattattttcagtaagaaatctgccagaaaacaattttcaaaacaaaaagcgatattttgtatgggttaatatgtttttcattgcgttttcgtaaagaaataccgataattcaaaaacgtccctggtttctgtccgtgggcaaacagcgcggatttttgtcccattttttcatatatatgcatcctccatccctgcaaacagcccccagccttaactccgggcctttgagggcccgatgttgtaacctttaaaagtcccaggcattccccggatcataaaatccccaccgcaggctgtatagaaagcccgtaacactccctgcccagatgcagccgcaaaagggcattcgcagtgcgctataaaaccacagatcccgggcagcgttcaactgcccgggatctgtttttttgaaagcgtatgtccggcaaaagcgcatccctaaccatattggacgtacccagtctgggggacaaaccatccgtccctcctacccgatcatttcattctccctctggtagacgcagctgtccggcacccgctccaccagtcccttgggaacgttccggtagtcaaacagagagaactgccaatccgagcaggtatccaggtagcggaaaatgcggtgcatcacctgctcctgcacttcctggtcggcatcggaacggaagcgaatcacaaaagcactggtaaagaagctgtccgtgatggttttgcgcaccagatagattttatcaatggaatcgtcccggatatgggcaaggatctcctccagcatcccctccggcagctgctccgtgccgaggtggtcttttttggtcagttggccgatttcgctgtattgatcttcctggcgctgcatcagttccagtgccttctcccggtaggtatccagctcctgctgcattccggtaagggtgcagtaggtgccaatcagctccagcgcactgtcaatggcattgttattcatctcgatggcggtatacagatcttgcaggccgcctgcatcgtaccggcgcagccgccagctgccgcggatgaagtaggcataggcagcggcagggggctgaagcgcctcaatggcacagttgcacagagcgatggcctcgctgctgcgccccagcatgtgcagcgcatcaacgatatcggcgtattcctccgccaccaccggggaaccggcagactgccactgctccaccttctgcttgggttccaggtattgggtgcgatgatcctcttcaaaactcatctgggtaaattctgcaatacgggcatccatatcctccagcacctttttctgctcctggagatattccccatctgcagggaaggaaagcaccggaagttcctccaggcccagggcctggattctgctccaaacggtgggatggctggcactccgcgcttccatttcctgcttggttagtttctcccagtctgtcttacgagtcgggaacgcctggtggaaggctgccagctgccggcgaagcagatcctccaccacagattcataggcagccggtgtgtcgtccccctcctgctcccagagaaacaggtcaaggtatttggtcttgagcagggaggcggctgccgcctccggcattcttgccatggcactgtccgccgcctgttctgcggtgatggaagcagcatagctgtaaagctcataattcatagcgtacatcaggtcagagaaattgtaaaacggctggttaaacatggacagcatattggggtgtcttccctgacaaagaaaatccctgtaactgcccgcccggatctcttcccgattggaacctgagatatgggagaattcatggagcagcatggcataaagctcctcctccgtcagcagtgccaatataactgcgcccaggccgaccaccgccgtctttcccaccaggctgatggaaacattgttgtccgcccttgccagcagaagcaccggccctgtccagccggtttcctgggcagcttcttttgcgatctgataaaggcggggcgtgtcctgctccggaagaatatccctcatgtcctgaagcacggccttcgcggtgcacaacggaagctgctggaaagaaagctgaatcagaaataccgaaatcaagattgccacagtactccccgtgcagccgctgcaaagccccagcaccagtcccatggtcagcagcaccagcgcatacccattggttgcccggcgaatatgccgtagggtacgcaatttctgtgccgctgcctgctctgcctgctcccgatgggacaggacaaactgctgccgctgctggatgtccatctgccgaaagcgccgctgatacagatatacaccccagaaattagcagccaacaccccagcggccagaagaatgcagccgatttctccccgccaggcaatctgctctgcaccctcatgtccggtgcgaagcacgatacccagcaggcgcatcccaacagaaatgcacatagcgacaggaatcattaccagattccacaaaaactgcgcctttacagcatgggtcgtcttttgcgctggggcgccgcccttatccatagcggatgccgttttgcccagaatcgtcaccgtgatgagctccagcaccccggcccctgccagcacccagtagtccctgccgctcatttcgctgacctcccgtccgccggtcagcaataccgccaggataatccagagaaacatggcaagcagacagacagtcaaaacaatggctggtttctttttcatgtacaattccttctttcatttgtgatcggcttcatcatagccgcagggatgtccaataaaacggacagtttcagatttttccgatctcccttttctgccgcagcggcgtattctatccctattatatagtacccctccgaaaatgcaaggcagcttttccctttcacagaattccaaatgcaaacaagttggcgtaaaagaatttttcctggtaaggtttccaaagcggaaggatcctttgcgcacccgcaggggattgccggacaggccgttcctgcacggctgcctatgaacggccagcggcagttattggggattttcgagtaacggaagccagcaaaacacaaagcccccggcggtgaggtgcgcaccgctggaggctatgattgtgattcaaggtatcccgtttccccttatgcctggcagtcccccactgcggggatctccttttccttgcacaaggctccaaccaacaggctcagtgccagcattcccaatgccacgcccagccagccaaagcccattttataaagaggcagtctgtgcagcagctgccccaggctgcccagaggcaccccggcatctccaagggcatacaggacgctgaccgccgccgttcccagaaccgtcataggatagacaaagggattccgcttccaaaggtcgtggctcagtcccagcagaatcagcacaatggacacaggataaatggcattcaacacaggcacggagatgctcaaaatcatgttcaagcccaggttgcaaaccagcagggagaagaaggtaatgacaaaaacccaggtgcggtaggaaacccctgcaaaaagggtggaaaaatactgggaaatggaattgatcaggccgacgcaggtcgtcaggcacgccagggtaaaaatcgccgccagcagcacagcgcctgtaccgccgaatacctgatagacgatgcaccgcagggtccatgcgccgttatcctggagcgcataaacaccggagctgcacattcccatgtaggacagcatggcgtataccagcgccaggatcgttccggccagaagtcccgccagaacggtatagcgcattctgtcccgcttttctctcaggccgaaggatgccagggtggtggagatcaccaggccaaaattcagtgcggcaatggtatccatggtattgtagccctcggtaaagcccttcagcagcggtgcggcagcatagctgtcccggggctgggccacctgtgtctctccccggaacaggaagcagacaaacagcagggtcagcagggtcagcatagccggagtcagtccccggccgatccggttcaccagctttccggggctcaggcagagccaaagggccaccaggaaaaacaccagagaatagaccgccatccacagtgacaaattggctccctggggcagataaggagccaccgccatctcaaagggaaccgatgcggctctgggaattcccagtcccgggccgatggaaagataaataagcagcgtaaacaccagggcaaaccgtttgcccacctgctgtcccagcttttccaaaccgtcgaagcgagctaccacgaccacacccagcaccggcaggatcaccgccgttgccagaaagcccaccattgccgccaaggtatgcgtgcctgcattctgtcccaggaagggcggaaaaatcaggtttccggctccaaaaaacagcgcaaacagcataacgctcaccactaacagatttctttttcccagtttcatcgttctcttccttccttttgaacaaaaaaataaagacccgtctcaaatttctttgagacgggtccaaaatacccgcggtaccactcaaattgtgcgccgaaacgcaccactcttttcaggctccaacaagccctaggcactaacgcagcccacgcgaaagcccctaccgacaatactgctttggggactccggctcagaagggatgggatttatgaaggcagtccaccgggcttccaccacccccggctctctatcggctgtacgatcaaatccgtcttcgtcatcgcttttctatgaaattacgcctattgtacacccgaaaatcccggctgtcaatagctattttctgcccgcaacgattgcttttttcggatgggcgtatttacagcaaaaagccaagtacaagccccatagccaacggagcagcacacagccggttccctacggttgctttcgttttacagttcgcaaaacatttacttatgcaattgtcacgctgcacaattgtcgtgtaatatttttaaaatctcttgacagaacctgacaatatgctataataaaagcggcttatgccactacgagagaaaatggtgtttactacgataaggtagaacacctcggagctctaccccagtcgtattttacggtacgactggggtatctacgtttatagaggaaagggtgacaacgcaatgaatatggaatcgaagcactacacattaggactggacattggcattgcatccattggctgggcggttctcaacaacaacgtggatggcacgccagaccgaatcatcgacctgggcgttcgattatttgaatcagccgaagttcaaaatacgggcgagagtcttgcagcgccccgccggaatgcccgcagcgcacggcgcagacttcgccggcatcgtcaccgcctggagcggatacgctatcttctggtgcagcagggcgtactcacccaggaggaaatgacccatttgtatgacaagtgcagtatgctttctccctatcagctgcgcacagaggggcttgaccggatcttgaatgcgcaggagttttcaagagtgctgattcaccttggccagcgccggggctatctatccaacagcactgccgaagaagcaaagaacgagaaagaaaacggtgttatcaagtcggccattttggaaaatcaacagcgcatggagcacggcggctatcgaaccatcggtgaaatgatgtatcgggatgcagcattctgggagacgataaacggaatccgctatcactgtacccgcaacaaggcggggaactatcacttcacagttgaccgtgcctctattctttcggaggttcacattctctttgaagcccagcgccgtcttggttctccctgggcatcccaggaaacggaagacacttacgctgcaattctgtccagtcagcgcagctttgacgaaggccccggcggcgacagcccgttccgaaaaggcatttcagaacgtgttggcaattgcaccttaattccaacagagctgcgtgcggcaaaggcggatgaaacctttgaatattttaaacttctacaagacctcaatcatatgcgcctggtggacagcaacggttctcaccccttgacccagcagcagcgtgcccttctggaagcagcggcattccgcacggcaaacctgacctatggacagctgcgtaaaaagttagggatttcggatgaggtacggtttgcgggcctttattatggacaggactccatcgaaaaagccgagaagagaaaatgggcgcagatgcagtcctaccacaagatacgcaccgctctggataaggtgagcaaggatgctatttcgatgcttacccaggaccagttggatgcaattggggaaattgtaacggcatataaggcggatgcagcgcgaattgagcatcttcaggcagctggaatcccgaaggagtatcataacgcattgctgtccctttccttctcaaaatatggaaagctttcgtgctgcgcaatgcgtaagctcattccgtttttgcagcaggggatgcgttatgatgaagcgtgtaaggcagctggtatgaattttcatggagcaaacggcaacgtggagaagctcagcgactttctcgatgagataaccaacccggttgtccgccgggcggtgtcccaaaccatcaaggttgtcaatgcggttgtgcgcacctacggaaatccggatgcagtacgcattgagcttgcccgtgaaatgagccattcctttgacgagcgcaacaagataaaaaaacggcaggaggatggcaggcggaaaaatgagcagataaaggcgcaaattctggaaacaaaagcaggacatcgagtaaccggattggatattgtaaaattcaagctatttcaggagcaagatggcgtatgtccctattccgggaaggcactggacgtccaacgtctctatgagccggggtatgcggatgttgaccacatcattccctattcccgctgctttgatgacagctacagcaataaagttctggtgcttgccagcgagaaccgtcaaaagggaaactgtacgccttatgaatatttcggggcagatgaacggcggtggcatgaattttctgtccgtgtgggggcctctgttcgggattttaagaagcggcaaaagcttctcaatacctccttcggcgaggagcagggaaaggagtttatccagcggaatttgaacgacacccagcacatcacccgtgttgtgtataactatctgcgcaataacctcagttttgcagattctacctacgccaacgcaccggttcaggcagtgagcggcacggtgacagcaacgctccggggcagatggggcatcgaaaagatgcgtgaagatggcgacctgcaccattgcaaggatgctgtggtgattgcagcaaccagtccctccatgatacagcgcctgagcaattactataaggaagaggaacggctctttatgggaaagacccattttgttgacccggaaaccggcgaggtacttaccaggaaagcatttcagcagcgcttcgctcccaaattcccccaaccgtgggatcgattccgggaggaactggaagcccgcctggatcctgttaaccccatggacgctgtgatggcgctccatctgagcacctatgagccagacgaagatatcacgcctgtttttgtctcccacatgccgaagcacacggtgaccggggcggcccatgaggaaacaattcgcggcaaaacagagacgggaaccgtggccaaaacagccctcaccgccttgaagctggataaacatggagaaattgagggctattacaatccccaaacggatccccggctctaccaggcactggtggaacgactcaaacagttcggtggagacggcgcaaaggcgtttgtagagccgttctataagcccaaaaaggatggaacccctggccccagagtggacaaagtaaaaattgcaaaaaaggcatccttgagtgtgtccaccggcagaggcgtggcagataatgggaatatggtgcgcattgatgtgttccatgtcccggatgacggctattattttgtccccatctatgtagcggacacaaagaaagccgccctcccgtccaaggcagtcgtggcacacaagttgccggaagcatggaagcagatgaagccggaacatttcctgttctccttgttcaagggtgatctgattcagttggaaaaccgcaagggaatttcgcttttgctgacaaaagaagcaattggcgaaaagaccatccaggtcaaatccggcttgttctatttctgtggagcagatatttccaatggcagcatcgaaatcgaaacccatgaccgtcgctacggcaagaaaagcttggggctgaaaactctcacagccattgaaaaataccaggttgatgtcctaggcaatgtcaacaaagtaaaacttcctgaaaaacggttggaatttcgagggaggaagtaaaaatggaatatcggaatatcttcattgcaaatccggccaagctcagcatccaacggaatcagcttgtgatccagcaggaacagcggttcaccgtaccccttgaagacatttccagtattcttatcgaaagccgacaagtgaccctcaccacctccgcactttccgccattgcagaggcaggagtgacggcattcctttgtgatgagcggcatatacccagtgcagtcgtgctgccaaccaatcagtattgccgccaacggaagctgctgcttgcccaggttacattgccaaaaccattgcaaaagcagctttggcagcagattgtcaagcaaaaaattcgcaatcaggcattgtgcctgcgcttgctgaaaaagcagggggcggaaacgctggaagcactggcggatgccgtgcgctctggcgatagcgacaatcgggaggcggtggctgccgctgtctattttccagcgcttttcggagagcacttttccagggagctggattgcctgcaaaatgcagctttaaactatggctatgccattttgcgaggctgtattgccaggaatctggtggtacatggtttggagccatgtctggggctgcatcattgcaatgcacagaataattttaatttggcggatgacttgattgagccttaccgcccgctggtagatttgtatgtttccagctatgtggagctgacgggagagcttacaccaaaacggaagcagcagcttttcaatttgaccagttatctggtaaagcagggccagcgaaaataccgtctgatgacgggcgttggccgctgctgcgcctcgttggcctcttgcatcagtgagcagtctaaggacttggaattgccgcagctgattgcattggaacagcggagcaatgagtagactgatgcgaatcttggtgatgtttgacctcccggtaaaaaccagcagccagcggcgggaagcctcgcaatttcggaattttctgctgcgagacggctatcatatggtacagctgtctgtttatgcccgcatttgcaatggccgggattccgtggaaacccataaaaaaagaatccttgccgcacttccctccgatggctctgttcgtatgctagtcataacagagcgccagtacagtaccatcgagctgctgatcggaaatccgaattccagtgacgagcctcaggattatgagcaattgatgattttttaggaaaaacagcaggacaatctcaaaacagattgtcctgctgtaagcattttttcgccgacttttcca

SEQ ID NO: 1973 - DNA, 14339 bp, synthetic construct
  misc_feature 1..14339: note = Synthetic
  source 1..14339: mol_type = other DNA
agctacttattgagccgacacatctggttgcgttctgccaatagcacggaaacagatttgcgtgttgccgtgacttcttcagcagtaccaactgcaactatttgttggagttttgatagggcagagcacaaaaagcgtgccgtggacaaggatgacggagccttttgcgctgccgggcctgaaaaatcaagcggagattgctattttgccgtatgtcctgtataattacgttataccagcgaaaaatacaatacgaggagaaaatacaatgaataagactgaattgatcgccgccatggctgagaccagcggcctttccaaaaaggactgcgacgctgctctggccgcgttcatcaccacggtcgagactgctttgaagtccggcgagaaggtgcagctgatcggcttcggctcttttgaggtcaaagagcgggccgcccgcaccggccgcaacccccgcaccaaggagatcgtggagatctccgcatccaaggcccctgtattcaaggcgggtcaggcattcaaggacgcaattcggtaattattgtagaacacggcctgggctaagcccgggccgtgctttttgccgtacatcgggttcttgcgtatgcggtattcggcatgtttcaatgtgaaaggctattagaatggcaggggagtgaaagaatgtctgcattgaccttgatagggggactatcatctcccaagccgcactgggctgtactttggctgttgtaaacacagtgccttcgtgatatactgacgatgataaaatgtatgaaacgcacctgatttattgctgtatcgagagaatgtgaaaggagtatatggtatgtctgcacctgtcccgcatgatggcatcgttgttagaaacgcgcggttagctgtgaagaacgagttggaaaaaaagcgccttttgaatcagcctattgcaagatttgacccgaaaagcggcaaggtttatatggaacacgctgatggcaccaagacccttgtgggagaggctatgaaaaaaggtcgatatggaaaataatccgattaaaaagccggagattgttgtctttgcagggccaaacggttccggtaagagtacaataacagatctgctgcgccctccgatgcttccttatgtcaatgcagatgaaattcagcgagtcctggattgtgataatatggaggctgccaaaatcgcagaaaagcggcgtgaagattacttggataaacacaaggggttttgcttcgagaccgtcttgtccacagaccggaacctaaaactcctcaagcgagcaaaagatgccgactttttcgtccgctgttattatgtcctgacagccgacccgcaaatcaatgttgcccgtgtggcgtcccgagtttccgccggcggtcatggtgttccaaccgaaaagataatttcccgctatgataaggcattggcccttgtccatgaactggtcccgctttgcgatgtgtgccatatctatgataattccttggatgcgccgtaccggatcttcaaaaaacgcaaagaggaatattggtattgtccggaacggtatctatggaaaaaagacgatataacagctctaaccggtgttcctaacgcacagagagcatctctgaataatcacagaacttaaccgtgaggaacaccgcgtctacgttgcggccaactgcttcagccttaaaaaatgagtgaaaaagggatgagtcctgcgcttggatacgcaggactcattccttttacccagataggacttaccgctgtcagggggagccgggacgcagacattcagcccctgttcaatgaagccaagggaggccaacattgaggtaagaggggagcggggcgctcacgaaggggcgccctctgtccatgtgagatttaaaacgtattccatgcagatgcagccatccccgccgcaataggagtgcaggagatctgcatgattagaaagcattcctaatgcaaccgtgggccccttggtaagcgtgtggccgtttggaatggaggccgtgaccgtgacggcgggcatgccggctgccgacggggcctcctccacagaaagggcgggatccatgaggaggagctgcgtacctaaagtggagagtgcacgccacgcaaggcgcttgtcggaggacagcttttcgacatccgaggggcggttcattccgcgtcctccgtgatccacattttggaaacagtgaaggtgaagcagatgccgcgctctgtcttgtccgtctgcacagtgtcgcaggcggagaacaggaaggacagcgcctgccggatggtggagttgagcaccaccagcggcgtggggaattccaaagccacggaggcggtatcccggctttcgtggggcggctgctccatgaggcggacgtgggggaccagacggtcgatttttccggcagcttcccgcagagcggtgaaccgggacatggcggtggggtcgatcattttcacggcgaatactccttcctcagtaaacaattctactccagattatagacgatgctcaggaaaatgtcgagtaaaaagggaaggtcattaacggtgagggcaacgtgcgcttcggcatcctgaagtggagaccatgaacctaaccaagcgattttgctgatgctctgaatacattattgcaatcagatgcggaacacgctctcattacaagggccgctactgggttatatcgtcccgctattcgcgtcgggcgtaggtgcggatgatggcgtggcgatcttaaattatttgcggcaggcagtatgcggaaagacgtgtaaattccggcgtgtgagctacatgtgtccggagatttagccacagctgttccggaggccagcccctctgacttgcttgttaggcgttgtcccagcggaagataatttttctggactgttcataaatgtcctgttcggtccattcgaagcaatcgtccagttctttagagaaaatcatcaaaatctcccgtttagcttgctcggcattgcccttgttatggaaccaccaagcatatctggtgtccagcaattcacgggtcagggtcatgtcattcctcccggtttctcagaccgtggcgctcccgcatggagatctttccgtcaatcaggatttcgcaggcgttatgctcttgtgcggatctgaagcaactcgcaggatgtttctgtaggcgagcaattgatttcctcctcgataaatgtcacacggtgtcgtgcgcagatatcattatagaggaattttcaatgtgtggctctgtgaccggaatttacaagacgataacaattttactctcggtattgataaaagtgaaaaaatcacatataatgcgcataggaggtggtttcatgcttgtcagattttcagttgaaaattttttgtcattcaaaaatctaactgagtttagtatggtagccggaaaaatgacgagacacagcggccacattgcagtgtgcaatcataaacgactgcttaaaggcgcctttatttttggcgcaaacgccagcgggaaaacgaatttgattcgagcaattagtttcgcaaggaatattgttcttaatggcatcgaaagaacaaattgtgataaaaagttctttcgaattgacgaagactgcaaagacaatcctggcgtttttcaatttgatattttttcacagggacatttttattcatatggatttgctatatcctatgctgcagcagtagaggaagaatggctatatcaaattgataatcccaataaggaattttgtgttttcttacgcagcaagcaggaaaatgatgagacatttacaatatcttcagacattcaattcaaggatggccgccaagaagcaagattttccgtatacaaagatgacatttcgagttccaaaatgaagcaaacgctttttttaagagacatcgctatgaggagcccagaggattcgccagaatatcagccatttagagatgtgatgaaatggtttgaacgtttggtggtagtatttccgaactcaaaatatgggaggatcactcagcttttagaaaatgataatgaaaagaccagattggaaaacttgctgaattattttgatacaggtattatatccgtttctaagaaagaagttgaatttgacaaagctttctcaatgctgccgaatgaggttatagattcgcttaagactgacattgcaaaaaatctggaagaaagtgggcaaaacgcatttgtccagcaggatgcctcactgatagaaatcaaaaacgtcaatggcgaacttctcacatatgaagttgtttctaaccacgggaacgacacggatctatttgaacacagcgatgaatctgatggaacacagcgattgtttgatctaataccgctttttcaaaaattgcttttaaatgctgttgtgctaatcgatgaggtggatagaagccttcacacaaaagcggttcaggaatttattaactacttctactcattgaccgagcagaacgcgtctcagcttattgttacgacccacgactcaaatattatgaatttagactttgtacgtcaagatgaagtttggtttattgaacgtcaaaaagatcacagttctaaattatattcgttaaataagtttatggctcgttttgataagaaagtcgaaaaggactatttacttggccgatatggagcaataccgatttttagacaagtagcattagaaccgggtgcgttggaagaaggtgagcagagtgcagaaggcagttagccgatttcgcctccaatcttctgcttttgccagaaaagatgaaacagaaaaaattgagccaaaaagaatggtttttctttctgtggaaggggatcaaactgaaagaacatattttcagaatctaaacgattatttggatactcaactgattcaaattgaagtattacggcatcggcgcggtgacggttacagcgatcccaagtatgtaattgaacttcttgaagaatatattgatgtgcgtcaaggcgatcttattccaaaagaattgccgaaagcgtttactgaaaaatactctaaagactttattcaagagtatatcgccggtgacagtagattaaccaagaaagagcgaaagcaattcagtgaagacctgataaaaatcggaattgatatcaagtatcgccaatatttacaagcatttaggaaggatgaggattattttgcgatagttcttgaccgagaccgcgggtcccatagcaagcagcttatgcaagaatgcttggataaatgcaatcaagagggttatgggtgttttgttacaaatccctgctttgaattctggcttttattgcatttgtgtgatgtaaaatccgagttctcacctgaagaattggaggagctgtattcaaatcaaacgaactctaatagacacacaaaggtcagctgtgaagtttcaaagcgcgctcatcacgcaaaaacaattacttcagataaattcagaaaactctactatcccggtattccgcaagcaataaaaaacgcagagagtttttctggcagctttcccgaattgttcgatcatttgggaactaacttacctaaactgcttgacattcttgaattccatgtttaaccaaggggaaccgattttcgtggatcctgcgtttacggtcattggaacaggcagagatcatctgccatttacatagggctctttccggttttcgttgaatttttcgtaaagaaaaagctttgcccgcgatgcagggctgtttcgattacgcgtgcggccggatgtagatgactttttctgtaagcccggcgctggcggatctgtccctgctgaaatatataaaaatgttgacattttttaggaaaaagcgtacactttaaatacccttataccactacgagggaaaatcgtgttactacgataaggtagaacacctcgaagccctaccccggccttatcggccggggtatcttcgtattttaggaaaggagccctctcagatgtcggaatttcattatgcgcttggattggacataggcattggttctgtcggctgggcagtcctccgaaatcagccaaacggagagcctgaccggatccaggacttgggcgtgcgtatttttgacaaggcggagcagccaaaaaccggcgccagccttgcggccccccggcgggacgcaagaagcgcccggcgccgcctgcgccgccatcggcaccgtttggaacgcatccgttacctgatggagcagcgcggcatcatgccggttgcggatattcaggccatgtatgccgccggcggcttccaaaaatcgccctaccagctgcgcgctgaggcactggaccgcccgctcaccaaggaggaagcggttcgggtgctgatccatcttgcccagcggcgcggctacaagtccaacagcaccgcggaggcggcgaaggacgaaaaggagacagggaaggtcaagactgccatcgaagaaaatcgccgctgcatggccgagcacggctaccgcacggtaggcgagatgatgtatcgggatgagcggttctggcagaaacatccggacggcacgcgctatcaccagacccgcaataaggcggaggattaccggttcaccgtggagcgcgcggccatcgtggacgaggtgcggcagatcttcgccgcccagagaaggctgggcacggcctggatggacgagtatatggagactgcctatctctccattctggaaagccagcgcagctttgacgaaggccccggcggagacagtcccttttccggcggcatcggggaaagggtgggtgcctgcaccttcgagccggatgagaagagagcggcaaaggcgacctacacatttgagtatttcaagcttttgcaggacttgagccgcatgcgcttgaccggtatgggcatgccgccggagccgctggatgccgcgcagcgtgaagtgctgaaaagcgcggcgctccgctcggcatcgctgagttatggacagatccgcaagaagctgaatctggatgatgatgtgttctttcacggtctctattacggcgagaaaacgaaagaggaagcggagaaacgcaagtggccgcagatgcagtcctaccacaagatgcggacggcgctggacaaggtgggcaagggcgcgatcggcaccttgaccgaggagcagctcaatgccgttgccaccatcctgacggagtgtaaaagcgacgcgaagcgcatagcggcgctgagggaggccggtattccgccgcagtttgacgaggcgctgctgccgctgtccttcagcaaatacggaagcctttccgttcaggcgatgcagaagctcattccgctgctggaagaaggactgcgctacgatgaagcgtgcacgcgggtctacggcgaccatcggggcctgcacccggaacagcggaagaatcggctttccctaacggatatggatgagattacgaacccggtggtccgcagagcggtatcccagaccatcaaggtcatcaacgcggtagtccgcacctacggcccgccggatgtggtgcgcatcgagctggcccgtgaaatgagccggaccttcgatgagcgccgcaagatggaaaagcgtcaggatgataaccgcgcggccaacgagcgggcaaaggatcaaatcgcggaatataagggagaccacgccaccggcctggacatcgtaaagttcaagctgtaccgggagcaggacggcgtgtgcctgtattccggccagaacctcgacatagcccgcctgttcgagccgggctatgcggatgtggatcacatcatcccatacagccgctgctttgacgacagctatcagaacaaggttctggtgctggccagcgaaaaccggcagaaggggaaccgcctgccctacgagtatttcggacaggacgaagcgcgctggcacggctacgaggtgcgggtggaaaatttgatccacaattaccgcaagcggcagaagttgctgaaaaggcggctgaccgaggaggaaagctccgggtttattgaccggaacctcaaggacacacagtacatcacaagagccgtctataacctgattcgggatcacctcgcctttgcggagtccaactaccggaaaaagccggtgcaggcggtgaacggcgcggtcacagccatgctccggggccgctggggtgtgcagaagatccgcgaggacggcgacctgctgtattgcagtggacagctgatcgggggaaactatacgatcgcaggcaatgtgtcctctcaatatatttcgggccttctcatggcgctgccgctactgatcagagacagtcttcttatggtgtccggcccactggaatccgcggcttacgtcgccatgacggaggatgcacttcagctttctaagctgaccatccccaaaatgggggcgatgtgggcgattcccggtcagcagagatgtcatctgccgaagcgcacggtcgtcgagggcgactggtcgaacacggcgttcttcctctgcatgggtgcgctgtcgaaagagggcgtgaccgtcgaggggctgaatttgcagtcctcgcagggcgaccgcggcgtgctggacgttttgcgccggttcggcgcggaagtcacggagcacggcgacgccgtgacggtcaggcgcggcacgctgcatggcgtgacgatcgacgccgcacccatccccgacctcatccccgtgctgagtgtcgttgcgtcggtcgcagagggggagacgcgggtcgaaaacgcctcccggctgcggctaaaggagtccgaccgcctcaagagcacggcagatctgctgcgcgcgctcggcggacgagttgaagagaaagaagacggccttgtcatcacgggcgttcccgcgctgcacggcggcgcggtcgaaacgcagaacgaccatcgcctcgcgatgtctgccgccacggcggcctgcgccgcgacgggcgagatcacagtcgacaacgacggctgcgtggcaaagtcctatccctgcttttgggaggattttagcagcttgaaaggagaaggtttatgagcagcacctatggcgaaaatctgcatttgaccatcttcggccagtcgcattcccctgccatcggcgtgacggtcgagggcatccctgcgggcgagaaagttgatctggacgagctccagcgctttctgaatcgccgcgcgccgggcaaaaacgtctggtcgacgccgcgcaaggaggccgacgcgccggagatcctctccggccttgtgaacggctatacctgcggcgcgccgctcacggccatcatccgcaatacgaacacccgctcgcaggattacgcgaatcttgctgtcacgccgcgccccggtcacgcggactacaccgccgaggtcaaatacggcggctatcaggaccgcgcgggcggtgggcacttttccggccgcttgaccgcaccgttgtgcatcgcgggcggcatctgcctgcaaattctcgcgcgcgaaggaatcacgcttgtgagccgcatcgcctccattgcgggtatttctgacgaaggagagctgacaggctcgcttgtaggcaaggagttccccgtcgtcagcgatgcgcgcggcgaggagatgcgcgaagccatcgcggcggcgcgcgaggctggtgacagcgtcggcggcgtcatcgaatgcgcggttttcggtgcgcccgcgggccttggcgatccgatgttcggtggcatggaaaatcgcatcgccgcggctgttttcggcattccggcggtcaagggcatcgagttcggcgcgggctttggcgtggcgagccttcgcggcagcgaggataacgacgcctttacggtcgaaaacggcaagatcatcactgagacgaaccattgcggcggcattcttggcggtatcacgaacggcatgcccatcgtgttccgcgcggcgttcaagccgacgccatccatcgcgcgcgagcagcagagcgtcaatttgcagacgatggtgccggagaagatggccgtcacgggccgccacgacccgtgcatcgtgccgcgcgccgtgccctgtgtggaggcggcggccgccatcgcggtctatgatgcgtatctatcgcgcaaaagggaaatgaggtaagggaacatggacttaaacgactatcgaaaagagatcgacagcatcgacgatcagctcatcgcgctctttgcccagcgcatggagaccgctgaaaagatcgcggaatataaaaaggccaacggcctgcgcgtgctcgatgcgcgccgcgagaaggagaaaatgcgcgagattctggacaaaacgccggacgacctgcgcgaatacgtctcctcgctctactccctcattttcgagctgagccgcagccgccagagctgtcttctcggcacgaagggtgatctgcccgcgaaaattgccgaggccatcgaaaagacgccgcagctctttcccgaggacgccgccgtcgcctgtcagggcgtggagggcgcgtattccgagcaggcgtgcgagcggctgttcaagcgcccgagcacgttctttttcagttccttcgaggcggtgttctccgccattgaaaagggcctctgccgctacggcgtgctgccgctggaaaacagcacggcgggcagcgtgaacgcggtctacgacttgatgacgcagcacaacttccgcatcgtgcgctcggttcgcatcaaggttgaccataatcttctcgccaatcccagcgcgaagctcgaaaacatccgtgagatctactcacatgaacaggccatcagccagtgcgcacactttttacaggggcttcccaatgtgaaggtcatccgctgcgaaaataccgcggtggcggcgcgcatggtggccgagtccggccgcgacgatgtggcggcgctgtcgtcccgcgcatgcagagagctctacggccttgactgcctcgccgcctctgtgcaggatcagggcaataacttcacgcgcttcatctgcattgcgaaaaacctcgaaatttaccccggtgcagaccgcacgagcctgatgatggtgctgccgcaccaccccggttcgctctacaaggtgctctcgcgtttcaacgcgctcggcgtcaacatgaacaagctcgagagccgcccgatgccggaccgcaacttcgagttcatgttttacttcgaccttgaaacctcggtctatgccccgcagttcacccagctcatgggcgagctgcccgagctgtgcgaggagttcacgtatcttggctcttacagtgaggtggtttgaatgaagcgctgtggattactcggtgaaaagctcggccacagctattcgcccgctatccacgcggagctggcggactatgaataccgactctatgaggtcgcgcccgaaaagctcggcgaatttctgacgggcggcggctttgacggcatgaacgtcaccattccctataaaaaggccgtcatcccgtactgcgcagagctttcacccattgcgcaaaaactccagagtgtgaacgtgctggtcaggcgcgaggacggcacgctgtacggcgacaacgccgatgcctacggctttgccggtatggtcagggcgagcggcattcagatcaatggcaaaaagacgctcgtgctcggctccggcggcgcctcctcgacggtctgtgccgtgctcgaggagatgggcgcgcgcagcgtgaccatcatctcccgcaagggggaggacaactacaacaatctggatcgtcacgcggatgcggaggtcatcgtgaacaccacgcccgtcggcatgtacccgaactgcggcgtgtcgcccgtcgacctgtcgctcttcccgaagctcgagggtgtgctcgatatcgtctacaaccccgcgcgtacagcgtttgtcttgcaggcggaaaagctcggcattccttatatgagcgggctctacatgctcgtcgcgcaggccaagcgcacggcggaggtctttgaaaaccgcgacatccccgacagcgagaccgagcgcatctggaaaaagctgagccttgagatgcagaacatcgtgctcgtcggcatgcccggcagcggcaagagcaccgttgccgcgcgccttgctgagaagcttgaccgcatcgcgcttgacagcgacgccgagatcgaagagaaaaacggtatgagctgtgcccagctcatcgaaaagcacggcgaggcggaattccgagagctcgagagcgaggccattgccgaactcggcaagcgctcgggagcggtcatcgctacgggcggcggctgcgtgacgagagaggaaaactacgatcttctgcaccagaacggtatcattttctggttgaagcgtgatatcgaccagctgccgcgcgaggggagacctctttccgtgggcgaccttgcggcgatgtacgacaggcgcaaggcctgctacgaaagatttgccgaccacatcgtcgacaacaacggcacagtggaggataccgtgcaggcaattttggattgtctgaaataaaggacaaaaacatcccgccgcaatttgcggcgggatgtttttgcgcgatggcggcagctacggcaggggatggcgagatcgctgcgcaagcgcttcgtcatagcatctcgcgcagcgccgccagtcgatcacctgcacacgcagggcgagggactcctcgctgcacggcaccaccggcgcggtcaggtcgagcagcaccgcgccgaacgagatgtcggggtccttcgtgccggtgagccggagtgagccgtccgccatcagcgagagcaggacgcgaccgccgcagccgcggcgcagcgcatgtgtgagcacgcgctcaaagtcctcccgctcgccgaaatcgcgcaagatcgcggcctcaaatgtattcaaaacagaccacctcgccacaaggtatgcaaaaagtccatcagacagcacaaaaaagcggaaagtcctgtgactttccgcttttcatttcaatttggattaacttagatgtggacgaccttcagctcactcgcctcgaagagaccgaggcgcttgccgacgttgacatatacctgcgggtcgccgctcgtgcagatgacgaatttgccctttttctgcgggttgagcgcgttctgctcggtgaggtatgccttgacggcgtttgcctgttcgagcgcggggttgatgaggtgcatttcgggatagcactcgtggaagttctcttccacgatgggatagtgcgtgcagccgaggatcaggttttcgaccttttcgcgcgcgagaatgttgtcgacctgcgtacggatctcggtgttaatgtcgtgctggttgaagtcgccgcggtcaacgagtgccgcgagcaggggagagcccttgccgacgaccttgcactcgggattaccctcatggatgagctcggcgtacttgccggaggcaacagtgaactccgtcgcgatgaggccgacgctcttgagatgctcgcgcaggacgtatttggcagcttcctctacgatgctgacgatcttgtagtcgaagcaggggcgcaggcggtcggccatggtggagatggtgttgcaggcgatggcagtgcacttgacaccgttgtcgccgaggaactggagcatgtggctgctcaactcgaagatctggtcagaggtcttgttgccgtaggggcagttggcactgtcgccaaaatagatgatatcttcgccggggagaatgcgctgtaattcgcgcacgacggtgagaccgccgatgccgctgtccatcacgccgatggggttgcctgcgttcaacatggttgaaagcctcctttttttgtctataaatattgtaccacgcgcacacaaaaatgcaagggataaatcatttttgctgtttgtaacaaatcttgggaaaaggattgcaattttgccctcacctgataaaatagcatctggtgagagttgggtattttacagcccgaaacctgcgccgcgcggcggcataatacagaagaagaggtttgaaacgcttatgacgattttcaacttgatcaccctctttggcggtctggcgctgttcctgtacggcatgcgcctgatgggcgacggactgaaaaaaggttcgtccgatgccttcaagcgcgcgatggaaaaggtgacgaacaatccgctcgtcggctttctgctgggccttgtggtcacggcggtcatccagagctctacggcgacgattgtgctgacgtcgggccttgtcggcgcgggtgtgatgtcgctgcaccagtcgatcggcgtcattctgggcgcgaatgtcggtacgacgatcacgggccagatcattcgccttctcgacgtgaacgcatcggagacatcgctgctcaatttcttcaagccctcgacgctcgcgccccttgcggcgattatcggcatcctctttctaatggcggtcaag

SEQ ID NO: 1974 - DNA, 13792 bp, synthetic construct
  source 1..13792: mol_type = other DNA
  misc_feature 1..13792: note = Synthetic
tcctgcgcgatggcgttgatgccctcgttcagcacatccgggtcgctcttgccccagcgggacaacatgctggcatatccctgaatgacggcaatcggcgtccgaagctcatgcgaagcgtcggaaacgaactgcttctggctgttgtaggatgtttcgatgcggtcgagcatggagttgatgaccgtcgcgaggtctttcagatcattttttgtcccggcgatgttgatgcggttggagaggttgttcgcggagagcgtcgctgccatgtcggtgatatcgcgaatcggcgcgaggacgctcttttgcagcctcttccgatgcaagatgaagtagaacatgcggaacaggtcagtgatgaccagcgccgcggcagatccgcagtacagcgcaagcgggcgggagaggctgagcgaaatcagcagcgactgccccgaaatgtgctgcgcctgcacgatgtagcgcccttcggtgaaaattgcctccgggtcaagcaaacggtaggcgctttgtcccacgatgatgccgtccgtgcgcgcttcgggcagcagcgtcacttccgcgtcatccagcacggagagggcaatggtgccgtctgcggacagcggcgcgcattgcagccgcgaaatgtcgcgttcagcgaggtacagcgtgccgcccgcgaacgccagcgtcaggatgagcagcgcggggagaaacgtccgcaccagctggaaggaaaagtgggcggcgatgcggaaggagagggacaaacgaatgcgggaaagggtggaaggcagcccgtgcggcttgggcgcggcaggggaaacatccttcttgcggcggatgcgccgtgccttcggacggtcagtcatcgacgcggaacatgtagccgacggcacggatggtgtgcagcgtcttgacgccgaacggctcgtcaattttgtggcgcagatagcggatgtacacgtccaccacgttcgtgtcgcccgcgtaatcgtagccccacacgtcagtcagcagcgcgtcccgcgtcacggcttctcccttgtgggacatgaggtatttcagcagatcaaattccttttttgtcaagttgatgggctgattgttcatcgtcactgtgtaactggacggctctaacaccagaccgcccgcccgcagcacgttggacgcgggcacaggcgtttcagcggcggaactccggcgcttcttcagccccacgcggatgcgcgccagcagctcctcgatggcgaacggcttcgtcatgtagtcgtctgcacccatgtccagtcccattaccttgtcggatacgtcgtctttcgcggtcagcataataatcggcacgtcgctgtcgtggcgcagacggcggcagacctcgatgccggacaattccggcagcatcaggtcaagaatcagcagatccggctgccagctttgcgcctgttccagcccgctgcgcccgtcgcctgccgtctgcacttcgtatccctcgtgcgtcagctcaagttccagaaagcgagcgatcttcttttcatcctccacaatcaagatgcggctcatggttatcctccattctccatatacgggcaaaagcggaacgcttgaatgcgtcccgcgaagggtaagtcaatgctgcctgcagccgccaatcagcccgaagaagagcatcagcgaggcgaaaacaagcacattggcaaacagcagcaagcccagcatcagcggcagcatatggatgcaccttccttacttaatcgttgcggagttgaagccgtccgtgtcgtcctccacggtgacattgccgtcttggcttggcacttgcaccggcacgttgatggtagggcaggagtggtattccggctttgccgcgcttgcagcgtagtaactgcggttgtccgcagaatccacctccgccttcttctcggaggattcgctctgaccgttcatgcccgcctgaaagccgcgcgcgaactcatccatcgtgctgcggacgttgctcgcggcgttcttgaccatgcgatccatgttttcacccgcgaaatccgcgtcgtccttgtcaaacgacacacgatagcccagcagcagaatcagaatcgcgctgagaatcagcaaatgcgggctgatgagcgccgcgacgagggtgaacagcagcgaaatgttgagaatcggaatcgactgccgcgcaaccttcacacgggcgcggtaaagcttgttgatgaagtgcatgaagccgcccttgctcttgctggcagcatcggtggacgctttcttttcggcggacttcggcgcatcctgtgcggcggcatcgggctttaagcggccgttgcgctccaaatcgaccagcgcgcgggcgacattgccgttgtggtaatccagcagcgaaaccgcctcctgatagctgatgccgctcttgcgccgaatcagttcaatatcttcaatcgtgtagcttgccataaaatcaatctcctttcccgctgagcgggcttttttccctgacgcctatatgataacacagattcctccgaaatgcttgtgaaagatgagaagaaatgatgagaatttcatgagaaaacgtggggatttgggggcaaattcgattgacaaacagaacaaaagtgctacaatataggatgtttcatggcatttggtgctgcaaagaatgagggagggaaaccacaatgcagatgtttgttctcgtgctgaatcgggaagaatttctggagccgctgctggaagaaatgctcaagcagaacatcggcggcgcgaccattttggaatcgacgggcatgatgcgcgtgctggatggtgaccataacatcgacgatctgccggtgctgggggtgctgcgccacctgtgcaatccggagcggaaacgctccaagacgattttcacgctgctgaaatctgaacagattccgcagatgattgaaatcatcaacaaagtaactggtggactggacaagcccgacacgggtatttgcttcgccctgcccacgacgtttgtggaaggggtcaacaagaacaaatgaatatcctgtttgcacttgccattgcaatggcggttggcatggccatgacgcgcctgattaagctgattcatctgccgaacgtgacggcgtacctgattgcgggtctgctggtcgggccgtatgtgctgaaggtgctgacgccggaaatgaacagcgagctggcgattatttccgatgttgcgctgggattcattgcttattccatcggcagtgagttcaaactttcctacatcaaggaaatcggcgcgaagccgatggtcattacggcgtttgagggctgcgtggcatcactgctggtgttcctgacgctgctggcgctgggtcagccgctgccgatgtgtctggcgctgggggcgattgccgcggcaaccgctccggcggcgacgctgatggtcgtccgccagtacaaggcgaacggcccggtgacgcggatgctgctgcccgttgtcgccatggacgatgcgctggggctgatgctctacgccatcatgatggcaatcgcccgcacgcttgacagcggcgcggcattaagcgtgatgacgctgctggtgaagccgctgattgaaattgtcggctcgctggcgatgggcgttctcattggcacggtgatggttttctgcctgcgcttcttccattcgcgcggcaataagctgacgatgacgattctcatcgtgttcctcgccgctggcttgagtaccatgctcgatttgagcagcctgctggtctgcatgatgattggcgcgacgatgatcaacgtcagcaacgattcgcctgcgctccttgagcagtgcgaccgcttcacgccgccgctgttcctgctcttcttcgtcttgagcggcgcaagccttgatttgtccgtgctgccgacagtcggcgtggtgggcattgcgtatgttttgagccgcgcaattggcaagtcgctcggcgcaaccatcggcgctgccatcgagaagtgtgataagaacatcatccgctaccttggtatgacgctgattccgcaggcgggtgttgccatcggcatggcacgcatgtgcctgacggatttgcccgcctacggcccgacgattaacgccgtcgtgctggcaggtacgctcatctacgaactgagtggcccggtcatcaccaagattgcgctgacgaaagccggcgaaatcaaggaaggcggcgcaaagcccgctgcggtgacggcagccgccaaataataattcatctggaaacagtataaatccaccaaacagaacgcccctttccggcagagatgcttcggaaaggggcgtttttgagtgcggtcagctgcgcggaatcccgtcagagaagtcctcacggcgcttcctgcggcgatgcacgcggaagatgatgaacagcgcaatggttggaatcagcagaatcacgacgacgggaatcaccgtttccggcacaatcggaatgccggtttgcccctgcgtcatcgcgacaatctcctcatacgtcagcggcatgttcgagcggcgcgcgacgctgcggctggcgacaaggttgaatgtaatcggcgtgccatcgtcgctgacgtaggtcattgtgcccataatctcgcccgcgctgacgggtgcggcaaaatcgcgcgtgtaggagacggtaacgaggtcgcgcaggttttcggacaggtagtcgatgcgcttcttcgtcgtactgagttccgcaagggcggcctgcgtggcatcctgcggctggcacaggagtgtcagctgcccctgattcgggtcatcaatctcatacgcgctggtgtaaatgctgatggggttcaggttgtacagctcggaaatcgtgacgtgctgatactggctgaagccgtacgccatcagcttcttcgtgtccgtccagacaccgtactggctggagtacatgaccacggaaatcaggtcaacgccgttcagtgacgccgaaccgacgtagcagtagcccgccagtgacgtggaaccggacttaatgcccgtcatcggcgcgtaatagtagcggttgtccgtcttgttgtactgcggcagcatgatgcggtggcgggtcgtcagcgtgcgcgaacgctgcttgttcgtcgtcgccatcttgtactcggttgttttcgcaatcgtgcggaaggtgtcgttctgcatggcgtagcgcgccagcgttgccaagtcgcgcgcagtcgtgtaatggttgtcgtcgtgcaggccgtgcgggttcatgaagtgcgtgctgttcatgccgaggtcgtgcgcggtctggttcatcagcgcgacgaacgtgctttcattcccggcgacggcctccgcaatcgctactgcgccgtcgttgcctgaacgaatcagcgtgccgaagagcaaatcctgcatcgtcagctcttcgccttcctgcaggctgatgacggtcgcttccgagtcaatggcgcgcatggcggcggcagaaccgttgtagctgaccgtcaccttgtcgtcaaggttgctgttgaggatgcccagcagcacggtcataatctttgtcgtcgaagcggggtacatggtcaaatcggcatttttctcgaagatgacttcccccgtgctctgctcgatgagaatagcggatgtgcagtacagctggtcggcttcgagcagctccgggtgcgtctcatcatacgggttcgcgttggggtcgagggtagggttcggcatttctgccacggcgctgatggtcagcagcccaagtgcgagcaggagacaaatcagccggcgaaacgttagcatcaggcgcaatcgtcctttctgcacagcaaagccatgcgagagtacaaatatctattctattatagcattttgcgccccggatggcaaggggcaaaaaaggctgcccgcccccaaagacggacagcccatgtgattgttacacattccagaaccgaagcgtgctcgtcaccgcaccagacatgtccggaatgacgaacggcaccgttcccggatagccaatcagctgaagtaccagaatcagcacgcccagaatcgccacatacagcgcgaaccagttcaggctcacgcggctgataaggctgagcatgaagcggatggcgatatagccgctgattgccgccacgaggatgcccaccagcgtcggcacgagcgtcaaatcctgcacccagccctcttcgattgcggttttgccgtcgatgatgagtgcgccaacaatcgcgggggcgctcatcatgaaggagaacttcgccgcgcttttgcggttcagaccggagagcagaccgcccgccagcgtcgagccgctgcgggaaacgccgggcagcagcgccacgccctgcatacagcccatgatgatggcgtgcttgaagttcggctggtcggcgtactgcttgcggtgtgcgctcagcgtttccgccagcaggaggaagaatcccgtcagcaggaagctcgcaccgaggaaccagcctgtctcgcaggaagtgatgaaatcatcaaacacaaccttgaacagcagcgtcggcagggaagcgatgaagagcagcagcagtgtcttggacttgaaggggttcttcagaatcgcccaccagtccttccagaacacgatgagaaccggaatcagcgtgccaacatgcaggaggatgtccagcatatggtaggcacctgtttcatcaatcgtgaagcccatcaggattcggctgagcagcagatgaccactggaggaaatcggaagaaactcgccaagcccctgcacaaggccgagaatggcagcttgcagaatattcatcgggaagcactcctttcggatgaccgaaattatcgtccacgaatcagtatagcatacttgccgccatttgtcagccttttgcaggaaattttacaggggaggcaggcgaattacacccgcatccactgcacgccttctttgttgtccttgacggcaatgcccatatccttcaaaatgtcgcggatgcggtcggattccgcccagttcttgtccttccgcgcctgatagcggctcagcagcagttcacggacggtgctctgctcttcatcggtggcgtctgccggggcaatgatgacgtattcgccgtcgccgtgcacttcgctcgtcgccttctgcgcgtcgcggatgaccgccgccttttccagcaggctgagggacagcaccgcgtcaaagtcgcccaccagcgccagcttctcatcatcggacaggtctttcgccttcagcacgtcgtacaggcgcgtcacggccagagaggtgttcaggtcagcatccagtgcctgacggaacttctcctgatatggcttcattttctccgcatccaccggcgtacccgcgggaatcagcgacgcaatgcgtcccagcagcttcgtgtacgcggcggcggcattatccatgttctcccaagtgaacatctggctctgccgatagtggctctgcaggcagaacaggcggtacaccagcgggtcatagcctttgtcctgcaaaagagacacggtcaggaattcgcccttcgatttgctcatcttgccgcccgtggtgttcaggtgatgcacatggaaccacgttttgcaccactcgtgaccgaggtagctttcgctctgggcgatttcgttggtgtggtgggggaaggcattgtcgatgccgccgcagtgcaggtcaaggtattcaccgaggtgctttttgctgatgcacgagcactcgatgtgccagccgggatagcccacgccccacggcgaatcccacttcagcgcctgatcctcgaacttcgacttcgtgaaccacagtacgaagtctgccttgttgcgcttgttcgtgtcctcatccacgtcgtcgcgcacgccgacttcgaggtcttcctcgttgtggtcgttaaagacgtagtacttttccagcttgctggtgtcaaagtagatgttgccgcctgcgtggtaggcatagcctttctccagcagcacggtaatcatgtcgatgtagtcggggatgcagttcgttgcgggctcaaccacgtcggggcgcttgatgttgagcttctggcagtcagagaagaacgcatcggtgtagaacttcgcgatttccatgaccgtcttgtgctcacggcgcgcgcccttgagcatcttgtcctcgcccgtgtcggcgtcgctggaaagatggccgacgtcggtgatgttcattacgcgcttgacgtcgtagccctcatagcgcagcgccttttcgagcatgtcctccataatataggtgcgcaggttgccgatatgcgcgaaatgatagaccgtcgggccgcaggtgtacatggacaccttgttgccaaagcgcggcacaaacggctctttgcggtgggtgagcgaattatacagaatcatcagattccactccttttactgtgcagcttcttcctgcttgacaaaggtgaagccgtagaaatcaaattgactgccggggaggaacacgaatgcgactgagcacacgcccggcagcacgttcacgtcgaagcactgcacgccgcgttccgttccgctgaactgcgccagcgaggtcagctgttcgccctcctgattggtgaagcgaatcgtgacggggttcgtcgaaagcggggtttgcccatccaagcggagttccgcatgggtggatgtgccgaaatccatgttctcccagacaagcgacacgttgttgccgatgctcgtgacggcgctgccactgcgggtgaagctgtcgccgtagactgtgtcggcgtcttgcgccgtctgcggcagccacgcgcggctctgcttctcgaacgagaagcctttaaggtgaatcttgctcgtcagcgagaagcacagcgtgtgcacgcccgtcaggcgctctggcaggtggtacgtttcgctctggtagacgttccaaatgctcggcttctggtagggcagaactgcaatcagccgtccgccgtccgccgggttgccgtcccagagcttgatttcgtacaggttgctgtccagcgcgaaaaccggaagcgtgataacgtccgaaccgacatcgccgaagtcgattttggtgtagcccgccatgctttcgccgtcgcgcgcgaaggatatgccctgctcgttgccattgccgatttcgccggaggaaagcgagtacagcccgccggagataaagccgtagggatcaaggaacggctgccccagcccggtgatgacaatatcctgctggctgataatgcgcggatggtcatacccgtttgtgcaggaggcgcgcaggtacaccgtgtcgtcgcccagcgccgtcaccgtcaccacgtcgccgtccaccgaacacgacgcgcagggggagtcgatgccctgaccattggtgacgcggaaggcaatcggctgcttgtccgcatccgccggatgaaccgccacgcggaaggagaccgtcggatgctcgctgcccagacgcttgtcgcccagcggcagcagctcaatgcggcgaaccggcttgtccgcgggcatttcttcctgacggcacagcacggcggaacagctgcgccccggcgttttgcgcgccgcgcggacgggcagcgttaattcagcgccgaccagcccaacgcccgacacgcggatgcggatggttccttcgtccgccagcgcgccgacaatcgccagcagcttgccgctgaacaggcggcgcgtgttcgtcttgtagccgtctcggtcggtggagtcgccattgtccagccccagcagccgccccttggctgccacggtctccagcgtgtgcagttgtgttttcatatcgtttgcctcctccagcaagccgtgtggatatatgcgcttttagtctatcacggaaccccgtccgggtcaattctggattattcaacttctaaacataggaaaaaacacaaatattgttttatgagaattgacattttagggaaatatgttataattaaagttatcttgtaccacaacaagagacatcaggttactgcaatcaggcagtatgcctcgaagctccgccccggccacattatttgtggtcggggcgtcttcgtttttctggaggtgtgaaatatggagtatacattaggactagacattggtatcgcttcgataggctgggccgtcttagccaatgacatcaacggagacccctatcacatccaggatcttggggtccgaatttttacatccgcagaagatcaaaaaaccggcgcaagtttggccactcccagaagagaagcccgctctgccagacggcgtctacgccggaagcgacatcgcaaggaacgcattaggtctcttcttgttcacagcggtgtcatttctcaagattctttggatgcactatttcttgattccagcttttcaaaagacgtatgccatctgcgtgcagaagggttggagcgccgtttgaatcgcgaggaatgggtacgagttttgatacacctatctcagcgacgcggttaccgctccaacagcacagcagaaaccagcaaagagaaagataacggcattttacagcaagcactgtcagaaaatctttctctgatgaatgaaaaaggttatcggactgttggcgaaatgttctgtaaggataaaaagttccaaattactggggctgatggaacacaatggcggaaaacgcgaaactctcccggagaatatcgctttactattactcgtgaaatggttgccgaagaagttctcaaactcttccaagcgcagcgcaactttgacaatccctatgcagaagaagcgttagaagctgattatacagcaattcttttctcacaacgccactttgacgaaggacctggcggagacagtccttaccgaaaaggcgatctacgaggattttgtacatttgagacaaaagaacggcgcgctttcaaagcctgctatacctttgagtatttcaagcttctacaagatcttaaccacatccgtatcctatcccccacagagcccacccgacgcttgctcccagaagaacgtcaagtccttattaaactggcacaaaaatcgccctctttagactattccaaaatccgaaaagcattgtctttggcgcaagataccagcttcaacgtagttcggtataactcagacacaccagaaaccgcagaaaaaaagacaaaattccagcagatgcaaagctatcacaagctgcgcaaggcattaaacgccatttcaaaagactttattctgcgttttgaccacgaacaattagatgaaatcgccaccatcctaagcctctacaaggccgatgacaagcggcgcaccctcctaacttccctgggactatccccggatacgattaatgcactgctccccttatcattcagcaaagctggcaatctctccttaactgccatgaaaaaacttatcccgcatctggaaaacggggagaactacgatgaagcttgccgaacagtatacggagaccaccgaagccaccaaagcggtcagcgctaccgcacgctgaccctgaaccaagaactgcgggaaactggtgcattggatgccataaccaatcccgtagtgctccgcgctctatctcaaaccaccaaggtactcaacgcaatcattcgccgctatggttccccccaacgaatttccatagaactggccagagagatgaaaaacaactttgagcagcggcgaaaactcgacgtgcaaaaccagaaaaaccaagaaaaaaactctaaaatcatggctcagatcgaagatttgaaagggggccgtcctacggggctggacctcgttaaattcaaactttatcaagagcaagacggcgtttgcctgtattctggcacccaattagatatcggaaaactgtttgaccctggttacgttgatatcgatcatatcatcccctacagcatttcttttgacgatggttatcaaaacaaagttctggtacgttcggaagaaaaccgccaaaagggtaaccgtttgccgttggaatatctatcagctgatccagtacgtgctgaaaactttatttccttggtcgagcgctacgtccgtgactaccgcaagcggcaaaagcttctcaaaacaaaactgacagaggaagacttttctggctttaaggaacgcaacctatctgatacacagtacatcaccagagctgtctacaacctgctcaatgattttctgatgttctctccccatgctcccaaaaagccagtacgtgcagtcaacggtgctgtgacagactatgtgagaaaacgtcttgggctaaagaaaaaccgtgaggatggagacctgcaccacgctatggaggccgttgttgttgctatcacgacagaccgtatgatccagcgcatctccaattatgccaaacggcgagagtggggcaaatcactctccaatgggtatgtagacccagaaaccggagagcttctcagcaaagacgctttcgacgaaaaatatgctcctgtcttccctgaaccctggccaggctttcggaaagaactgctggccagattgtcacctgccccggatgaagagatccgcgcccttaacctcccccactatgatacaaaaacggtcatacaacctgtctttgtctcacaagccccccgccgaaaagtgaccggtcctgcccacgaggagaccattcgcagcggtaagcttccggggtacaccatttccaaaaccccattgaccgccctgaaactggataaggctggtgaaatcgacagctactacaatcccgaagacgaccgactgctctacgaagcgttgaaggcccagctcctcgcctttggcggaaatgctgcagaggcctttgccgctcctttccgaaagcccaaaaaggatggttcccccggcccgatcgtaaataaagtcaagctgataaacaaaaccacccttaacgtagacacttgtcgtggtcttgcccaaaacggcgacatggtgcgcattgacatataccatgtgcccggagacggctattacttcatcccgctctacaccgcagacgttgtaaaaaagactcttccacaaaaagcagcggtagcaaataaaccctatgaacagtggaaagagatggatgagaaacactttatcttttcgctttatcccagagaccttgtctacgtaagcaaaaacaaagccattaacttgaaattaaataacaaaaatgctacgggagaacctgaattattgcgcaaagagtggctattgtattatgtcggcgcagatatttccaccgctgctatctctctaacaacccatgaccgtaaatacaaaagaagcggattaggcatcaaaaccttacattctctggaaaagtacgaagtggaccctttaggcaattaccacaaaatacagatccccgaaaagcgccaaggtttttaaatcctgccaaggaggatatcgatggaatttcgctcgatctttatcgcaaatcccgcaaaattatctgtcaaactggggcagctggtcattcagcaagagcaggagtttaccatccccatggaagatatttcttctctcctgctggaatctcgggctatctccattaccgctgccgctttacaggagttgaccgcaaacggcgtgactgtctttctctgtgatgatgcacacctgcccgctgcccttgctctgcccatgaaccgtcacagccgacaacacaaattgctccgcggacagatcgccatgacaaaaccaacgcaaaagcgcatctggcaagctgtcgttacagctaaaatcaccaaccaggcccagtgtctgcatcttctcggtcatcaggaagcagatactctgcgggccctgtcccatcaggtccgctccggagatccagacaacctggaggccaccgctgctgcccagtattttcctgtcctgttt

SEQ ID NO: 1975 - DNA, 12735 bp, synthetic construct
  source 1..12735: mol_type = other DNA
  variation 10235..10291: note = n is a, c, g, or t
  misc_feature 1..12735: note = Synthetic
cccacggcagtgccgctgaacacgcccatctggaggatggcgaagaaccacaccaccaggccgtacaggccctgggtgccgggaatgacctggagaatcatcaccttaccaaaggcagaggggtcctccgccagcagggcggtgcccgcctcaccggcaataccacagccccgggcagaaccggcggcacacaggccggcagccaggccggcgcccaggaagccaatggccaggcctccgaaatcagcaaagaaacttcccatgataattagtcctccttgatgtctacgaatttggtgtcatatttcaggggctggaagggccgtccgccctcccgataccactttccaaaaaactctaggaactgcaagcgcatcgtgtgtacaaagcagccgatgaggttgagtccgaagttgagcacatgcccaatgagaaacacggggatgaagaggaatatcccgcccagagagcccaactggttgaacacgctggcaatgacggagccggccagcatcagcgccatcagacgggagtaggagagaatgtcccccagatacccggtcacgccgttgtataccgccccaaacaggccggtaatccgcccgatgcccttccccttgaggaaggtggtaatcaccatggcggccacgccgatgatgagcaccacggggctttccgccagcaccatcaccgccgcaccggcgaagataacccaccaggacaggtcaaagacggcgtccacccagtttccgtcccgcacattgaggtataccccgatgcacacgccgaaaaacagatggattgcgcccagaatcatagccagcaccaacacatacagggggttgttcccctccagcaggttcagcggcagactgatgacaatctccccaatgcggatgtcccccagatggggcaccagggaccactcctgtccgaagatggagcccagcaccgatacagcgtcgccgaaaaatcccccggtgagaaacccgatgaggaaggtgctcacgccgcactgggccaccatggccagcatattgcgcatggtccccttggggtcgagcagcttgatgcccagcagtccccccagcaccatgagcaggccatagcccatatcggcaaacataatgccgaagaacagggcgaagaagggcatgatgaaggggttggggtccaacccgtcataggcgggcagggagtacatctcggtcaccacgctgtagggcgcagtgagggcattgttcttcagctgcaccggaacctgggggtactcctccttcttggggtcctccgtctcccaggcgcaggtgaagcctgccagcgtgccgcccagctgctccagtgcgggaacgggcagccacccctggaaatagaaggcggtctccgtgtccaccaggcgggttttggcctcttcccgggcgatgtcctgggcggctcggtcctggcactggcgcagtagatcccgctgtgcggcataggccacaatggcggcccgggtgcgctccatctcttccgccagctctgccatgcggcgctccacggcgcgggtgttctccgccgcagtgcctgtccacccacgcaccacggcacgggagaagccgaagggacgcatggcctctgcgcaggcctcctccacactggcgtggcacaccagcagcaggtactgcagctgctggtcctggctggccagagtcagctgtgccaggtcggacacctgtgccaccgcaccctctacctcccgcacttccgctttggcaggcagggtgccgaacaccaccgacagcacgccgtctccccccagctccagggggacatccagactcagccacggcgcaagggccgccagctgcgcctccagctttccccgctcggtgtgcagggcggacagctgccgctctgcggccataatctcctgtgccgcctgcaaaccattggcataggcctcgtcgtcaaacagggccccctcagagagcaccgggcgcttgcggaacagctcccccttggggggtgcgtattccttgagcacatccagggcagtgcggagtaaagtgtgggactgcctggcacgggacagcccccggctatccggccgtgtcagcgccgcccactccgggtcggtcaaatccatgccagcctcgtcaatctccacgcaccccagcttttgcaggcggcggagcagtgcctcacgatccgaccgcataccaaacaggcgcagccgtttcattttgacgattgccattaacgattctccacccttctaacaataaggtctgcggcctgttccagccgggtgcgggcctgttccttcatggtctcacaggccttggcgctctccgccagcgtctgctccagatacttggccgcccgtgcctccgcctcggacatcatcagctttaccttctcctctgccgccgcacgggtctgcttcaccagctgctgaccatcccgctcggcctccgccaggatgcgtttggcctccgccgccgcctcagcctttttctccttggcagactgctcggtctgggtgaccttttggattgcttcaaaagacattgttctcacctcgttttcctgactgcgcccagattttgtacccaggccagccttccccaatataatcaaattgtatcatctttgcccggcaaacgcaaggcttttttgtgatttttggcgtttttcctcctttttttctagtcaaaactgttgctgttttcccccatttcccgtgcttttcaagctgtttttgccttttccacctatttaactaatgctcacctgatttttttctatgtaattcgcccatgtttatccaatttatgcacaaaacccccagtccatcagactgggggttttgacacagcgctctatgcttccgccgtgggatgcacggacagacaggcgctttttgtcacgctcactcctccccatgttcccggcggtatcgagccatggagacggcaaacagctcggcactggtggggggcgtgtaggtgatggcattggccccggcggcaatggtggcccggatgctctcctcggtggggccgccggtggcgatgatgggcacagcgggaaaccgctcccggatgctgcgcacaatgtccggtgtgcgctgggcgccggacacattgagaatatccgcccccgcctccagacgggcggcaatgtcagtgtgctcggataccaccgtcaccaccacaggaatgtccagcacactcttcagcccccgcacaattttgtcctccgtgggggcgttgaccaccacgccgaaggccccctcgtgctcggcgtcgttggccaggttgagcacccgcaggccacgagtcaccccgccgcccacccccacaaacacaggcatatccgccgcctgcataatggcacggtgaatggccggctggggcgtaaagggatagacggcgatgatggcgtcggcattgatgttgcgaatgatggccacatcggtggtgaaggccagggatttgatgcgccgcccaaacacccggatgcccgagcactcggacacacaggtgggaatcttaatcatatggctgcgcagtgtgccgtggtactcaggcacctgcttccggggctttccctcaaaaacagcccgctccccctggggcgcctcccacgctgcggcgtgcatcacattgtcatatgtcataagtacgtcctttctacacggccctgggcagttccaaggggctgtgccattgccgccccccatgcctcagggcaaaagcctgtcagtctgtaaaactgcgggcgcacccgcccgcaatgcaggtgggtgcgcccacgccatactcacctgcccacagcagggtctttcatattggtccagctctcgccgctgcctacgccaaagcccaccaggcgggcggcagcctgctccatgcccgcctgctccaggctggcggcataagcggcgccccggtcctcaggcagcgtcacccacacccgcccggcatactgcgccagcagtgcggcggtcatgccgctgagggtgtccgtgcctgcaatggtcccctgggtggcgaccagcgccagcctggcgtccgtcccgtccagtgcggcagaggcctgggcgaggaactggctgacgggagtgttcaggtcctcagggcgcaaatcggaggtggccagcacatgggtctcccccaagtcggggaatccggggctctccagcaggatttcatcaaaccccatggcagccagctctgcgcacagcgccgccaggtagtcccgtgtctcctgggccgcagggctcacccagctcatcccccaggtgtcgtaccagatgtttccgccccgtgtcatcagcggaccgcccaccttgcctttggacatggcctgatcccggaagcaggacacccgggccaccaggtacatctgcccgtcctgcgccagcttggtgatggcctcggcaactgcgttgtcggcggcattgacccccagtgcggcggcctgcgccgtctgagaaatccaggccagcgctcccgacgggctcttcatctccaccaccagggcattgcccccggcctgggtcacatagtccgcagcggttcccccacgcacctgatcgatggtcacgcacacgccctgaatggcctgcagaggctgcggggtgggggcgggggtgggctcctccgtgggcgcaggctccggctcctgggtgacaatgaccagcccctccgagggcagcgcctcctcctgctcctgcgcccagggccagtgaatgatgaccccttcgtcggtgtattccacatattcatcggcgaccttcatgacgataagccccgccaccagcagtacggccaaaacgccaatgataaacttgagtaccaggctgccgctgcggcggccgcggtactcccggtatcctcgatgtccttgacttcgcatacccattctctccgctcaatgtaaagtcttacccgcagccaccggcggcaggtgccgccgaatgcgggccttgtgtgcatagtagtacggtcacatattttttatatgataccataactctccccagctttctacccccaacaacagggcaaattgtgaagttttttcccttttctttggaaaagtataggctatttgctcaaatccccccggcggtgaccagccactgcaccagcagcagcagggccagcccaggcacgcccagcgcccccagcagcattgcgttggcgggattgacccccagagacagccccagcgtactgcccaccccctgtaggagccatagcgccgccagccacccccctgaccgcaccgcccagccggccagcgccacgccggggcggcgcatcagcgccagccccagcacgcccgccccggcacaaagggcccaaatccatccgctcatcctgccgcctcccgttccaaccgcttggcctggcgcaccaggtaggagtaccggctgcgcagggcgttgatggtgtaaacgcaggcgtccaccaaatcgggatcgctgtggaaattaaagtctgcgtaagcctgactcagccgcagccgggtgtcctgcaattcccgttgcagcagctcccgctcgctctccggcgccttcccccgcctgcgccgggcggagattccttcccccatgctctcacatcctttccgtaccaatctatgtatagcctgttcaaatatgttttttatattcccattatcatccttttagcggcgtccgaaccttccttccatcattttctcatttttccccctttacattttgcgacttgtttactagaattacgatgtcttattagaaaatttgatttttaggattgaggttgatgtcatgagtatcttcgacgtcctgaccatgctgggcggcctgtcgctgttcctgtttggtatgtccgtgatgggtcaaggtctggagcgggccgccggaagcaggctgacgcagattttggagcgtatgacctccagccccttcaagggctttttgctggggatggtggtcaccgctgtcatccagtcctcctctgccaccaccgtgatggtggtaggctttgtcaactccggggtgatgcagctgacccaggccgtgggcatcatcatgggggcgaatgtgggcaccaccgtcacctcctggctgctctccctgtccggcctggaggggtctggctggattgcgtttctcaagccctcctccttctctcccgtgctggcggtcatcggcgtggtgttctacatctttctcaaggaccgcaaaaagcaggacatcggcgccattctcctgggctttgccaccctcatgttcggcatggaaaccatgtcgggggctgtttccgggctgaaggatgtccccgcctttaccaacctgctgctcatgttctccaaccccatcctgggtgtgctggcgggcgcactgctcaccgccatcatccaatcctcctccgcttccgtgggcattttgcaggccctgtcctccaccggtgcaatcactgtgggcagtgccatccccatcattttgggtcagaacatcggcaccaccgtcaccgccatgctctcgtcggtgggcgccaccaaaaacgcccgccgggccgccctcatccacctctacttcaatgtgattggcacggctgccttcctcgcactgttctacctcctccgggcgctggttcccatgcccttcctcaccgacgccattggagagagcggcattgccctggtgcacaccctgtttaacctggtctgcaccgccgcactcttccccttcaacaagctgctggtgcgcctggcctgcctcaccatccccgaggaaaagcaggagcccaaggctgcgctgctggacgagcgcctgctggtcaccccctccatcgccctggagcagtgcagcaagctgacctgcaccatggccaccctgtccgagcaggcagtcaaccaggccctctccctggtgggggcgtacaatccccaggccgctcagacggtgtgcgataccgaaacccaaatggacgagtacgaggacctgctgggcagctacctggtcaagctgtccagccgcagcctgtccatggacgacagccggggcgtctctctcctcctccactccatcggggactttgagcgcatcagcgaccacgccaaaagcgtccagattaccgcccagcgcctccagtcctcccagttttcccgggaggcccaggcggaactggaggtgctctttcaggcggtgcgcaaggtgacccacctgaccagccagtgcttcctctccaacgacactgccctgaccgcccaggtagagcctttggaggcagtggtggaccacctgtgctccgtcatgcgcgcccggcatatcacccgcctgcaacagggcgcctgctgtgtggagcagggcatggccttcaccgacctgctcaacgactgcagccgggtgtccgaccactgctccaatgtggccgccgccatcatcgagctgggccacgacagctacgagccccaccactatgtggagcacgcaaaggagcacgacgcccagttccaagcccattaccgcgcctatctggcccagtttaccctgcccagccactaaagcctccacaaacagcccccgcagagaaagcccccgccgtagaaacggcgggggctttccccattgcggtcaatctgcctctgcccgctggatggtgacgccggtatagtagtggctgacaatctcctgccaggtgctccccgcctttgccatggcgttggccccgtactggctcatgcccaccccatgtccatacccggtgacggagaaggtaaatcccccctctccataggacacctgaaagcaggccgagcgcagcccgaacagggtgcgtgccgcaccgccgctgagggtcaccccacccaccgtcatctccgccacccgccccgaaggggtgtagctgggctcccccagccacccttccggcgctccatccagactggcctcgggataggtctgcttcacacgggcggccagctcctccgccgtcaaggtgacggtggagtggtagttgggcacctcctccccctccgggctgtccaccgacaccagatagggcagactgcccccccaaaccgccgcagcgtcctcggtggcctgggtggacgaggagaagaataccgcctgaatgggcttgccctggtaggtgagtatctgcccatccgtctccgccaccgcctgggcaatcctctgggcatagccctccccatcgctgccccaccgctccatggcggcctcccgggtggtgtaggcctgacagcaggcggagctgtcgcacaggtctgcccccgcctcccggtgcttttccgccgtcatcttccacaggctgtacgtgcgggcgcacaccgcctgggcctgaagggcctggggctcgaaggaggcgggcatctccgccgccaccacccgccacaaatattcctccatggtcagctccaccacctccccgtccgactggagcagccggagcgtctgcccccgatcccagccctctgcggccgactgctccccttcccccggttgggtgactgccggcgtgggctgcgccgggagcaattccggctgctcctcctccagcaccatcaaagggagcaggagggtgagcagccccagcaccacgcccaccgccaaccccctgccaactcccatctgcctgtttgatgttcggatgtacaacgccagcgcccctttctcatacccaggatacccgatgtgccgctcccgcagcctgtcccgcctccatggggggcgtgcacgccccgctccacacccccagtctatgcccctcccacccaccgtagaaccccggcgcacgaccagcatcttccacaatccagcgcctccaaatttatgcacttcctataaatctttctttttccacagtttcccccatttcatcccttgactttcccataaagtatactataatacacacatcttgtaccacaacaagagacatcaggttactgcaatcaggcagtatgcctcgaagctccgccccgaccacagctttgtggtcggggcgtcttcgttgtatggaaactgttgtgcaaacactgaggaggtacaccgtatggaatatacattgggcttggacatcggcatcacctctgtgggctgggcggtgctggccaacgatgcccaaggagagccctaccgcattcaggatttaggcgtgcgcattttcgaggcggcagaacaacccaaaacaggcgccagcctggccgctccccggcgggaggcccgcagcgcccggcgcaggctgcgccgccgccgtcaccgcaaggagcgcatccgggccctgctggtgcaggaggggcttatctcccaggattgtctggacaccctctttgtcaactccggctttgcgaaggatgtctacaccctccgggccgaggggctggaccgccttctggacgaggaggagtgggtgcgtgtcctcctccacctgacccagcgccggggctaccactccaacagcaccgcccaggccaaatcggacaaggaaaccggcgtgttaaagcaggctttgggtaaaaatatcgagctcatggcgaaaaagggctaccgcaccgtgggcgagatgttcgccacagacgaaaagtttcgtgtggtcgggcaagacggaatgatttggcgtaacacccgcaacaagtccggaaattacaacttcaccgtcacccgggagatggtacgccaggaggtggcagccctcttcgccgcccagcgcagctttggcaacccccacgccggggagtcgctggaaggccgctacgccgaaattctctttgcccagcgccacttcgatcagggccccggcggggacagcccccaccgaaagggagatatgcgggggatgtgtacctttgagccagaggagcggcgcgccttcaaggcctgctacacctttgagtacttcaagctcctccaagacctcaatcacatccgcctcatctcagctaagggcgacagtctccccttgagcaaggagcagcgccagaccctcatcgccctgtgccacaagtccccagatctgaagtacaccagacttcgcactgcactgaacctgcccgaaagcgtcaccttcaacaggattcgctaccagcagcagccgggagaatccatccaggagatggaggagcgactggagaaaaaggaaaaattcactcagctgcaaagctatcacgaaatccgcaaagcgctcaatcatgcggacaaagccctgctccccgccctgctccaggagccnnnnnnnnnnnnnnnnnnnnnnnnnnnnnnnnnnnnnnnnnnnnnnnnnnnnnnnnngacgaggcccgccgcagcaggctggaggcgctgggactgtcccagccggtgatagaagccctgctccccctgtccttcagcaaggcgggcaacctgtccctcaccgcaatgcgaaagctcatcccccaattggagaagggagtcacctatgacaaggcctgcagcgccgtgtacggtgaccaccgcgcccactccggcgcccagcggtaccacaccctcaccttgaatgagaccctgcgggacagcggcgcactggacaacctcaccaaccctgtggtgttccgcgccatctcccagaccaccaaggtgctcaatgccatcatccgcaaatatggctccccccagaccattgccatcgagctggcccgggagatgcgcaacaatttccaacagcgaaagaaaatacaggactcctatgaagcgcaccaaaaggtcaatgaaaaggccatgaaacaggtggccgagctcaagggaagccgccccacaggacaggatttggtgaagtacaagctctatgaagagcagcagggcttctgcctttactccggcactcagctggaggccaaccgcctgtttgaaccgggctacgtggatgtggaccacatcatcccctacagcatctgctttgacgacagctataacaacaaggtgctggttctcacctcggaaaaccgccaaaagggcaaccaccttcccatggagtacctggcgagcgacgccaagaagcgggagcgctttatcgcctgggcaaagtgctgcatccgcaaccaccgaaaactccagagattactcaaggaaaccctcaccgaagaggactgcaggggcttcaaagagcgcaacctcaaggacacccagtacatcaccacagcggtgtacaacctgctcaacgattacctggagttctcccccaacgcccccaagcagcccgtgcgtgcggtaaatggctccatcaccgcccatgtgcgcaggcggctggggctggaaaagcaccgggagaacggcgacctccaccacgctatggacgccgccgtagtggctgtcaccactccgggaatgattcagcgcatttccaactatgccaagcggcgggagatggggcgcaaggtgaagggaaagtacgtggatttggacaccggggaactgatgacccaagaggcatttgatgcaaagtatgccccccatttccccgccccctggccccacttccagcaggaactgctggcccgcctctcccccgacccggacacggagattcgtgccctcaacttcccccactacgacccccaggaggtcatcgccccggtatttgtgtctcagatgccccggcgcaaggccaccggccccgcccacgaggacaccatccgcagcggcaaggcgcccggatacaccatctccaaaactccgctcaatgaactgaaacttgaagagaaaacgggcgaaattgaaaactactacaaccccggggatgaccgcctgctctacgaggccctcaaggagcgcctgcgccaatttggcgggataggcaaaaatgcctttgaagcgcccttccacaaaccccggaaagacggcacccccggccccgtggttcgctcagtgaaaaccatcaagaagtccaacatcggtgtctccgtcaatgggggcattgcaggcaacggcagcatggtgcgcatcgatgtgtaccgggtgcccaatgacggctactactatatccctgtatacatcaccgatacggtgcggggtgtgttgccccaaaaggcctgcgttcaagacaagccccccgaacaatggaaggtgatggacgactcccatttcctcttctccctctatcccggtgacttaatccgcgtggagcgccgcacccccatcaagcttaagcctcccaaaaaagctgctgaaaagtctgggattagtcgcaatgaatgccttgtatactttgtgagtgccgatatttcaaccgccagtatttgcattaccacccacgacagaaaatatattcagaagggcctgggggtgaaacggttgtccgccctggagaagtatgtggttgaccctctgggcagctaccacaaggtacagctgccggaaaagcgccagggcttttgaggagaagagggggattatcatggagtttcacaccattttcctggcaaaccccgcccacctctccctccgccggggccagctggtcatccggcaggaggcaggggagcgcaccttccccatagaggacatctccgccctgttggtggagtctcagaccaccaccatcaccgccgccgccctccaggccctcacccagcagggggtgacggtatacctgtgcgaccccacccacctccccgccgccctggccctccccatgaaccggcacagccggcagctaaagctgctcaaggggcagatttccatgaccaaacccacccaaaagcggctgtggcaggggg

SEQ ID NO: 1976 - DNA, 12386 bp, synthetic construct
  source 1..12386: mol_type = other DNA
  misc_feature 1..12386: note = Synthetic
cccgcagccactggatggcggcacctgctacgaaaatagagccttccagtgcatagttgacgcttccatccagcccccaggcaatggtggtaaccagcccgttttgggagcgaatgggcttctttccggtgttcatcagcaggaatgcaccggttccataggtacatttggagtcgccgggcagaaaacaggcctgcccgaacaatgccgcctgctgatcgcccgctgcgccggagatggggatgggagccccgaaaaactggggttccgtcagcccatagcagcagctggagggcatgggtgtgggcagcatggagcgggggatttccagccggccaagaatatcatcatcccattgcagggtgttgatgttgaacagcatggtgcgggaagcgttggagtagtccgtgacatgaacccgtccgccggtcagcttccagatgagccaggtttctacggttccgaacagcagttccccccgctgggcggcagccatggcaccggggacgtttttcagaatccaatggattttggtggcggaaaaataggggtcaatcaccagcccggttttctctcggatggcttccgtcagtccctctgcccgcagatggctgcaaatgtccgttgtccggcggcattgccaaacgatggcgttgcacacaggctgaccggtgtatttatcccacacaacggtcgtttccctctggttggtgatgccaatggcggcaatgtctgcggcgctggcgccaatactggcaagcgcctgccgggcaacggccagctgagtttcaaaaatttcatccgcatcgtgctccacccagccaggctgtgggaaaatctgggtaaattccttttgcgccacggcgcagatatcccccgcctggttaaatagaatgcaccggttagaggttgtcccggcatccagcgccatgatgtatctgggcatttttgtccctcctgttactgaatgtggacgtgattgttgatgtgatcctggcagtagcagtagtaccccttgcacttactgcaatagcggaattccagctctggattcgttacatccgtgcggccacacacggtgcagcgatggttatagttctgctgttccttctcctgctgggtttttggggtgacatggaagtggataaccttcggccccttggccttgggcttcgcccggaaaagcttttgcagcttcaggcggaagctgagggggaagatgttcagcacgtcagcgccaaagaacaaaaagtagttggcaatggcaatgatggggaacaggttataggggaaacggttctgaatcaccgagaggagcaccagcaccagctctaaaatggcaaagaaccacgccttaatgggaataatcatcatgaacaggaacgtggcatcggggaacatggtggcgtaagccaaaaacaggctggtgttcaagtggctggcatcggcgcggcagccggggatgagcatacagaaaatatccatcatcaccacgccggacaaataaaagaggttaaatcgcaatgtgccccagctgcgttcaatcaccataccaatggaatagaagcagaacaggctgatggctaccagcagcaaatccaacccgccgcccatgccgctgtaggtggtcagagggtaggtgaacagccgccagatctgccccttgaggatggaagcccggtcaaagcacagcaggtagtaaagaaaataattctgggcaaacatactcagtaaatacacaacggcgttgccgatgcagatgtagagcatgagattgcggatgcctttgttccggttgcgcaggcagaaccgctcaaaatttctgcgtaggtttttcaaataactcaactcctaaaattcggttgccatctattttaccagcacttttctcaaaagtccatatcgtatttgtgaacaatggaggaaagtttcgcgcctacttgacaaaggatgatttgtgtatataataaactcaaaacatgaaaattgcatacaagccttatcaagagcggtggagggaacggcccgatgaaacccagcaacctgtcaatcaaggtgctaaatccggcggcaacgaaagatgaggattcgatatttgcgcacatcgaatcttcggtgtgcggtttttttgtttacttgtttttctgcgtatagagaaaggaattatcatggaaaaaagaattttcacctctgaatgtgtaaccaatggccaccccgataaggtggcggactccatttccgatgccatcctggatgcctgtcttgcccaggatcccaattcccgtgtcgcctgtgagaccatggtcactaccaacttctgcctcatctgcggcgaaatcaccaccagcgccaaggtggattatcccagcgttgcccgggaagccatccgcagaatcggttatgtctaccccggtgacggcttcgatgccgacacggtggagattcagtgccgcatccacacccagtctgccgatatcgccatgggcaccaatgaccaggtgggcggtgccggtgaccagggcatgatgtttggcggtgcctgcacccagaccccggagctgatgcctatgcccattgcgctggctcgtgccctgtctaatcggctgaccgagtgcattcacgaaaacaaaaagctgcgtgccgatggcaagactcaggtctccgtggaatttgatgaggatggcaacgtggttggcgttgatacggtggtggtgtccgtgatgcacagtgctgatttccccatggaggagctgcgcaagtacattgctgacgaagtgattgcccctgtccttgcaaagtacggcttccgtatggaggatgtgaaccacatctacatcaatcccactggcaattttgttattggcggtcccaatggcgataccggtctgacgggcagaaagatcattgtggatacctacggcggctatttctcccatggcggcggtgcattctccggcaaggatcccaccaaggttgaccgcagtgctgcctatctggcgcgctacatggccaaaaacctggtggcagccggtctggcaaccaaggtgcaggtgcagctggcctacgccatcggcgtggcagagcctgtctctgtccgtgtggattcctttggcactggtgttatccctgaggagcagatgacggaactgctgcgcaagaccgtggatatgacccctgccggaatcatcaagcgctttgacctgcgccgtcccatctatgcagacaccgctgccaagggtcacttcggtgtggaaggccgtccctgggagcgtactgatttggctgaggaactgaagcagctgatttgatgacgctgcgaacatagtacggatacgttggatcccgaacacgcccggtgacgattgacgcaggaaaccgttgcgttttgaatgggggaaagtacattggaatacatttatctgcatggcctggggcaaacggcaagcagctggcagccggtgcttcaagcgcgctccctccccggaacaagccggtgcctggatttggtggagcttttgagggggcaggaggcaagctatcagaacctctatgctgctttttcacgtcagtgccagcagacggcgggaaaagtaacgctttgcggcttgtccctgggcgcggtgctggcactgaactacgccattgaccatccagagggggtggaggcgctggtgctgattgccccgcagtataaaatgcccaaaaagctgctgtggctgcaaaatttgatgttccgttttatgccggaatcccaattccaggaaaccggattcaagaaaaaggactttgtttccctgtgtcagacagcggcggtgctggatttcaccgattctctgggggcggtgcaatgccccacgctggtggtttgcggagcaaaggacagcgccaatcgaagggcggcaggggagctggcagtcctgcttccccatgccagtctcatggaagttccgggggcagggcacgaggtaaatacccaggcgccggaggctctggcagaaatcctacagcggttttatgcacatctgtaacaaaaaaggcagagcgtcggggttggcgctctgccttttggaaaaatctttggagctgagataatgaaccgcgtggaattatcggaatatatacaaaatcgctacagcgcctcgccggatttctcttgggcaaagtaccccagctatgaggtctttcgccacggcagcaaccaaaagtggtttgcggttattatggagatacccagcaagaagctggggctggacggcgaggaatgcttgcaggcggtgaacctgaagtgcgccccgattttgattggctccctgctggaagaagcgggctttttccccggttaccacatgaacaaggaacactggattacggctgccttggatggcaggatcccggatgaaaagctcaagattttactggatatgagcttcgatgccaccctgtgagaaatctgaatgaaccctcccggtcaaagtcgccgggaggggtttgttacagcagcacaggctgcatttgcctcccctggacggcaagctccaccgcctggggaatcagatcaaaatgggcaaccagggatgttggtttctgctccgggtcatcctgcccatagggaataaaaaagtattgcttacgtgccatcaggcggccaatattctctgccgcaccggccagcccatcattggtggagacggcaaccagcaccggcctgccgtttcgcaaatggctttttgccgccatggtcactggggtgtccgcaatgctgtggctgagctttgccagggtgttcccggtgcagggagcaatcaccagaatatccagtagtttctttggcccgataggctctgcctcggcgatggttttgatgaccgtttgcccgcaaatttcctccgcacgttccagaaattcgcttgcttttccaaacctggaatccgtggtggcggacacaaaggaaaaaatcgggtataccgtgtgcttctttgccagcgcctccaccaccgggaaaacttttgaaaaggtgcagaatgacccgcacattgcaaatccaatattcatatccgttcctcctgtagccggtgcaaaagggtgtccgcaatcagcttgccggagctttccggcacatagattccgggcagtccccgcgccggaataacgtcatcccctgcaatgccgggcagggatgccagttcgattttcaggcagtttctgcattgggcggaaaccgcctccggtatcatcattcccggtgcggtgttataaagaatgcggaagtttccaattgcaccgtccaggtcttcccggtgtaacggatgcagcccaaaggaggcggcttctgccagatgggcttcactgcgggagagaacggaaacaactgcgccgcagccctgcaacagccgcgccaggtgttttccaatccgcccccagccaattaccaggacatttgttccgcgcagggaaaatgcggttttctcagcggtgacccgcagggcacaggcagcagtcagtgccgcgttttcgtataagtacccttcgtccttcaataaatccaggctttggtattcatcgggaatctggccgtccagattgccgccaatcagaatgatttggggcggcagcagctccagaagagaacgcagtgtcttgccgctttttaagattcccggactggaaaagctgggaacatccatcagcaggtgcgttgcctccggggtcacatggtcggtaaccgggattccccgtgccgcaagaatccgagccgcctcgtggcaggcttgggtgcagccaacggggtatagtagcaattgttccatcttgaatcactcctgtgctccaccatatgcgccgtttgtgccgcctgtgacgggggacttgatttttctcattcttcctgtataatattcttgggtgtatctactcagatggaaacgccctgaagggaggaatcaatatgcagcgattgggctttattcacgatatgctggatgtgaaggtactcattctgtttgtcatgtccaaggtcgattatccggccaccggccagcagatttatgaattgtgcctccaggatgattgcgtgagctattttgatatttatgctgcgcttccgcagctggttaaatccggccatttggttgaaaaggagaaagacctttatgccattaccgaaaagggcagggcagacggggcgctgacccaggactccattgcctacaccgtccggtgcaaggcggagaacgccgttgatcgcttcaaccggcagctgcgccgcagcagctacgtcaaaacgcaggtcattccccgggaaaccggcgaaagctctgttatcatggcgttggatgatgaaaccggaaatctgatgacgttggagctgatggcccccaaccagcgccaggcagtgcgcctgggcaagttctttgaaaaaaaggccgagaagctttataatatgattatggcagaacttttagaggaggaggacgaaacggaagcctgaccccttgccggtgtgccaaaatcgtggtatagtataagtaccccgggagaaccggtacatagaaaggagctgccgcatatgaagtttcagtttagtgaaaagaaagtcaagcttcctgagaaggtacaccagtacgccgagaagaaagtgatgaagctttcccgttacttcgaggatgatgcagaagccttgattgttttctctgtggagaagaacagaaataaagcagagctcaccgtccacggtgcaggaacctggttccgcgcctctgagagcacttccgatatgttcgcctccattgatgcagcggttgccaccatcgaaggccaaattcgcaagaataaaacccgccttgcccggcggctgcgccaggatgctttcgtccgcagtgtccaggaggaaacgtcctttgcccccgatgagccggaggagaactttaccatcactcgcgtcaagcatttcaatatgcgcgccatgacgcgggaagaggctgtcttgcagatgaatctgctggagcacaatttcttcgcattccgtgatgaggacaacggcggatgcttcgccgtggtgtataagagaaatgatggcggctacggcgtgattgacgacgaagcgtaaataaaaagctggggctgccttttttggcagccccgattttgcagcccggaagggttcagccagtgccaagcggtactggctgttgctttttgcgggaggatcaatgcgtcttccacacaacgcggattcggtgaaaaaacaattgacaaaacttgacaaaatgctataagaaatgtggcttatgccactacgagagaaaatggtgtttactacgataaggtagaacacctcggagctctaccccagtcgtgattttgcgactggggtatctacgttctatggagaaaacgggggataacgcaatgaagaagggacagaagcattgtcactacacattgggattggacatcggtattgcgtccatcggctgggcggttctcggcaatgacgaggatggaacgccaaaccggattattgacctgggcgttcggatttttgactcagccgaagttcaaaagacgggtgagagccttgctgcgccccgccgggatgcccgcagcgcacggcgcagacttcgccggcatcgtcaccgcctggagcggatacgttatctgctggtgcagcagggggtgctcacccaggaggaaatgacccatttgtatgacaaaagcgacatggtgtcgccctatcagctgcgtacagaggggcttgaccggcttttgaatgcacgggagttttcaaaagtgctgattcaccttgctcagcgccggggctaccaatccaacagtaccgccgaagaagcaaaaaacgaaaaggaaaacggcattatcaagtctgccattttggaaaatcagcagcgcatggagcggggcggctaccgcaccatcggtgaaatgatgtatcgggatgcggcattctgggagacaatcaacggaatccgctaccactgcacccgcaataaggcgggggattaccgcttcaccgttgaccgtgccgctattctttcagaggtttccattctctttgaagcccagcgccgtcttggctccccttgggcttccgtggaaatggaagacgcttacactgcaatcctgtccggccagcgcagctttgacgaaggccccggcaacgacagccacggcaacgaaagcccgttccgaaaagccatgtctcacaacgtaggaaattgcaccttgataccaacggagctgcgtgcggcaagagcggactatactgctgaatatttcaagcttctgcaagacctcaaccatatgcgcctggtggacaacagcggttcgcaccccctgacccagcagcagcgtgccatcctggaagaaatggctttccgctcggcaaacctgacctatgggcagctgcgcaaaaagctggggctttcggatgaggtgcggtttgcgggtctttactatggggaggacaccatagaaaaagccgaaaagagaaaatgggcgcagatgcagtcctaccacaagatacgcactgccctggataaggtgagcaagaatgccattcagacgctgacccaagaccagctggacgcaatcggggaaattttaacggcatataaggcggatgcagcgcggattgagcatcttcagtcagctggaatccagaaggagtactataaagcgctgctgaccctttccttctcgaaatacggaaagctttcgtgctgtgcaatgcataaactcattccatttttgcagcaggggatgcgctatgacgaggcttgcagggaggtatatcaagaccaccgcacgaaagaagccagcgagaagaaacaacgcctttctctcaatgatattgacgagataaccaatccggttgtccgccgggcggtgtcccagaccatcaaggtggtcaatgcggttgtgcgcatctacgggaaaccggatgcagtacgcattgagcttgcccgcgaaatgagccattcctttgacgagcgcaataaaatgaaaaaacggcaggaggatggctggcggaaaaacgagcaggtgaaggcgcaaatcctggaaacaaaaccgggaaaccgggtgaccggactggatattgtaaaattcaagctgtatcaggagcaagatggtatctgcccctattccggtaagccgctgctcatcgagcgcctctatgagccggggtatgcagatgttgaccacatcatcccctattcccgctgctttgatgacagctatagcaataaggtgctggtgcttgccagtgaaaatcgccagaagggaaatcgcacgccctatgagtatttcggggcggacgaacagcggtggcatgagttttccgtccgtgtgggggcatccgttcgggatttcaagaagcggcaaaagctgctcaatacctccttcggggaggagcagggaaaggattttatccagcggaatttgaacgacacccagcacatcacccgcgtggtatataactttctgcgcaacaatctcgaatttgcggactctgcctactccaaggctccggttcaggcagtgaacggtgcggtgacggcaatgctccggggcagatggggcatcgaaaagatgcgtggagacggcgacctgcaccattgcaaggatgcggtggtgattgcggctaccagccgctccatggtacagcgcctgaccgattactatcaggaagaagaacggctctttatggggaaaacccacttcgttgaccctgcaaccggcgaagtactgaccaggaaagaatttcagcagcgctttgcgccgaaatttccccagccgtgggatcgattccgggaggagctggaagcccgcctggatcccattgaccccatggaggcggtgatggcgctccatctgagtacctacgagccggaggaagaaatcgcccctgtttttgtctcccatatgcccaagcatacggtgaccggggcagcgcatgaggaaacgattcgcagcagaacagagacgggaaccgtggtcaaaacaggcctcacctccttgaagctggataaaaatggggaaattgagggctactacaatccccaaacagacccccggctctatcaagccctggtggatcggctcaaaaagttcggcggggatggtgcaaaggcgtttgcagaaccgttctataagctcaaaaaggacggaacccccggccccagagtggacaaggtgaaaatcgaaaggaaatcctctctgagtgtgtccaccggcaggggcgtggcggataacgagagaatggtgcgcattgatgtgttccgtgtcccggatgacggctattatttcgtccctatctatgtggcggataccaagaagagaatccttccgtctagggctgttgtgagaggtaagctgccggaggaatggaagcagatgaagccggagcatttcctgttttccttgttcaagagtgacctgattcgtgtggagaacagcaagggaatttcccttgcactggcagaaaaagcggttggagaaaagacaatccaggtcaaatccggcttgttctatttttgcggtgcaaatatttctaattgcagcatcgaagtcgaaacccatgaccgccgctatggcaaggatggcttgggactgaaaacacttaaatccattgaaaaatatcaggtggatgtcctgggcaatgtcagcaaggtaaggcttcctgaaaaacggttggaatttcgggggaggaagtaaaaaaatggaatatcggaatatcttcattgcaaacccggcaaagctcagcatccaaaggaatcagcttgtgattcagcaggaacagcggttcaccgtaccccttgaagacatttccagtattctcatcgagagccaataggcgacccgagcggcgaagccgccttggctccctctctgagggagctgctgagcgaagcgaagctgagggagtgtactgcgttaaaatggtaactgcccatggttattgccgtacctgtaggggtcgcctaccaggcgacccgctccgaaccattgaattgcttatcggaaaaccaaattccagcgatgccactcaggattatgagcagctgatgcttttttagaaaaaacagcagggcaatcttaaaacagattgtcctgctgtaagcgtttttctgccgacttttttataaaaagggggtagaaagttgcgttttttgcgtggtatttctgtggctgttataccactacgagagaaaatggggaactacgacacacggtgtcaccgggcaaaatctcatcagttataccactacgagagaaaatggggaactacgacctagaaaatccatgtattcggattgtggtagttataccactacgagagaaaatggggaactacgactccgagcctggctctgatatctatatcgttgttataccactacgagagaaaacggggaactacgacacacgtactggttttttgtccctaatcgctgttataccactacgagagaaaacggggaactacgacctctgggcatatccttctagcaatgctccggttataccactacgagagaaaacggggaactacgacttgtgcgtaatgctagtgcttcgtctgctagttataccactacgagagaaaacggggaactacgacggcgaaagcccccgtttatcacgatgtctcgttataccactacgagagaaaacggggaactacgactcgatatgtcgatggtcagttcggtcgcttgttataccactacgagagaaaacggggaactacgacgtaattaacaacgataacaagcagatttacgttataccactacgagagaaaatggggaactacgacatataaatatatatatacccccttaaaagttataccactacgagagaaaatggggaactacgacaatgtctcaagccccaaatattccgtgatgatttcaccgcatattatatccgcatttaccgttttcgtcaatcccccaagtggagagaaacgtttttaacaaaaatagtccctggaaatggatgctcccttccttggagttcccctggcaggcacttataaggatgaccgccgaaatgcaatttgcattctgattcacaaaacggaagcagttttctcttgacattggccgcctgcggcgctataatatcccagtaaatgaaacgggcttgtagcgcagctgggagcgcaccacattcgcattgtgggggtcgggagttcgaatctcctcaagtccaccagaagtccaccgtaattttgatagaattacggtgggctttttctgtacaataccccgcacacgcggggtatcatgctaaaaataaaaaatcctattgacaaatggcgcatcctgttgtattataaccaagctgttactgaggcagca

SEQ ID NO: 1977 - DNA, 11704 bp, synthetic construct
  misc_feature 1..11704: note = Synthetic
  source 1..11704: mol_type = other DNA
atcaaaccgccagaaaaagtgcagatagtaagaacaaagccacggaaatccaacgaatttccgtggctttggtacgccctgagggattcgaacccccggccttctggtccgtagcttgtctgaggaagcgaaacggatgctttctggtccgtttggcggtgtccgctcaggatttcgttactctggaatactgtctgttccactgtttccgcggagaaatttcctgttctgggtcagtttatgggtcaagcctcaattttaatagctatcccccgttttttcctatatggtagacctgagttgttgatttccgtttgtaaaaggagacgatccatcttcggcgtggacacgccgaagatacagcgcaagctctaattgcaaacggtgttcaggatcttccagattcatctgcgtgagttcttggatgctgtttagccgatatgccacagtgttatagtggatatagagttcctgcgcaatgcggcgttgattgccgaggttttggaaatagaactccagcgtttcaagaagttccttttcgtgaggtaatttcggagatgccaagctctttagggtctccgcgataaaacgtccaatttcacgggatgggtcgctggagtataaaagccgcaaaacgccgagctgatcaaagcggaaaaagaagtctctaccctttgcatgggcggctttcagcgcgagttgtgcttcccaacggcagagggataggccggggattccagtgtgtgagcggctgcagcctccggtaggggccagggagggatacccagcccgcagagcttcaaaagcagcaggcagacgggccagtgcccgatcgagagaggctgagtcttctttggaattcatgaggatcagacagccatctggatgatccatgatatgggtatctatgtcgagttgttccaggctctggcgcaaaacatggaaaaaagcagtgcgctggaaggtggtcgcatattcgctgatagaattgtttggctgaaaattgagttccaacagggcatggggggccgatagatccagatggaaagcattggcgcggaattgctcccaattgtcgtccaggatgcggtcagagatcaggtgctggaagaattccgtaaagctccggccttcggttttccgcacagagtgttctctggagatctccaacgggatcgtttggagaatctgagagaggatgtcctcatgcagcggggggcggccctctatccggcacaggaagaccgtgccgaacagatagccatcgatccgcatctcatgggcgtccgcctcttccgaaaggacttggtacagggcatcgcgctccagagaagccagccgcgcggcgtccgtctcggacaggctgtacgcctgacgctggttgatggcgtctaccaaaagaacgcttccgcctgcgatttcccgcaccctttgagcaagatcctccagggaagctccttctgtgatggtctggagcagcatctgatttacggagatgctgtcgtggagcagagctgtctgccggcggagaagctcatcggagaccgctttggtaatatcggcgaaccggatcgcgggcggcagctcaatgaggggaaagctcagctcttttgccatcgagatcatgtattccggaatcgttcccaggaagcgtgagggtttgatacatacaccggccaattccctttccgcaaggcatccgataaatgcggacagcgcggcctcatcatcgtggatggagtaacagtttgtaatcagcaattcatgaggagatatccaatcgcagtaatctggaatatcggtcaaattgacgccagcgacgggaatatccagagtgtttcctccgctcagtacccggctgtttgaaaatacatcctgccgcagcaattcccgaagggttggatagtttgcgtgctccactgtatagcccctcctgattgtgatattatcataaattatataaatatttttgtggagtgtcaatatacaaaaggggcgtttcatgacgtatactggacatagaaacaaccgatggccatcgatgttttgacaaatctaaacgatggagggtttgaatcatgaacgcttcggtacattctgctcagcagggatgcttgaagttgcaggaatttcagaaagtgaaatcattcccgggaaaggccgccttacggggaacttggcggcgggcgcaagagaagagagcttgtcctttggagcggctggcgattgagtctctgcgattctatggataaggctttttgttgacatggaaaattagtcggatatttgggtggcaattgaagcgatagggtggagatatgctccggtaaatgcgaaagacggaaagtctgctgtatttgccggagcatttttgcaggctctattggtcagtggtaaaatgctgctgggtagtttttggagcgtaccagcatatacagaaaaatttttcgaaacggtgatacaacggatctgcctgtgtttcggcttgtgggccattgtgtgcggttttatggaggcagtgcatcccggggatctgctcgtgagtgaatccccatgtcagggctttgtgcggcgatgttggcaaactgcaaaagcgttgctgattagttgatggattgtacctgtgtctccaaagagcagcggttgttttggggatcagcaggatcggcggaatttttctcatagtgggaggagggtaaatctgccgagaccgagggtgaacccaccggtcgaaattatagcaggataaaagcgtggcgtcttgtgccgccacgccggattacaccgtcccgcagtgcgggccggggaaaccgaaaatgagagcttttgacggaataccgtcattctttcaaggcttttgtgcaattggtcatgtgacctcaaatatgggggactggtatcagatttgacctcttgtttccctcaacgcttacagcagcaaagaatttagtggcgtcaactgtggcttgacggagaaatcctcagtttttcaggaagcgagaggaggcagcggaataatacagagaagaaagagattgccaacgatgcccaaatcccccgtgtttcggcgtgtaagccgctgtgtgcggttttgtggaggagaaccccatacacccctccccagcggacaaatcgctgtgttggggctttgtgggcggttgtcagcaagggtggaaagtctgggagattcatccatggattgcaccactgtctacaaggagaaagaggtgcggtcactctacccaaccagaaccagttttcgagagttcatacagcgcaaaaaatgcgccgcctaatcaaagaataggtcttttttctctctgcctttttctaccgcagactatgaactttctgataactctccgatgaatccctggctattcaccgaggttactggtaatgtgtgtcgctgaataggaggcgatacgcaatggcaaagcgcagagcgaatggagaaggcagtatccgtaaacggaaggatggccgctgggagggacgctacacagcgggccgtgatccggtgaccggaaggacgatctacaaaaatgtcttgggaaagacccaggcggaagtcaaggcaaaactcaagtcggcaattgagaagagcggcgtccagtccctgcggacagagcgctacactgtaggccagtggctggatacctggatggagaactatgccaagctgcaagttcgcccctcgtcccacaagacctaccagggttttattgaaaaccacatcaagcctgccctcggggatattcctctggaaaagctgacggcgatgaacctccagaggttatacaaacacctgctggagaacggcagggtggaatgcacggagtcccgcagcaagcctaagggcctcagcgtcaagacggtacgcaacatcaaccagatgatctcctccgccctgaactgcgccgtagaacagcggctgattcccagtaatccaaccaagggctgtgtcctgccaaagctggagaggaaggaaatgaaaatcctgccgccggaaagtctgggcaccttcttcgaggaggcccggcgcagcggcgtgttcgagctctactacatcgatctcgcaactggactccggcggggagaactgctggggctgaaatggagcgatgtcgacctagaaaaagggatcatctacgtccgacgacaaattctccgtcagaacggtgaggtggtggaagcacccttgaaaacgaaaaactcctaccgcagcatcgcgataggagcggacgccatcaaagtcctcaaaggcatggaacagagggatgagtacgtattcccctcgccatacggcggcccaatgtcgccggacagtgtcctccatatgctccagagggttctgaaacgggcgggactggagcggatacgcttccatgacctcagacacacattttcggtgctggccctgcaaaacggagtagatgtcaaaaccctctccgccatgctgggccactactccgccgggtttacgttggacacctacgcccatgtaaccacctctatgcagaagcaggcggcaaacacggtagggaattttctctccgacactctccagccctaaccgctccaagttcccgtatgggtcacggcttgggtcaaccgcccaccgcaaaatccaaccacccgaaaaagtgatgaaaacaaaaacaaaaccacggaaattcaacgaatttccgtggttttggtacgccctgagggattcgaacccccggccttctggtccgtagcttgtctaagggatcgtagcaaccactttcaagcctgtttgatgccgttcactcaggaataagatgctctttgaccctggtgattccattgtttccgtagggaaatttcctgttctgggtcaggttatgggtcaaagcacgaattacgagctacaattgagttcaaagtcttgacaacctatagagcccattatataatataatcatcttgtaccacaacaagagattttaggttactgcgatcaggcagcatgcctcgaagctctaccccaaccacatttgtggttggggtatcttcgttctagaaaaaacgactgagggaggcggcgagatgcactatacgcttggactggatattggaatatcatctgttggctgggcggttcttcaaaatatgtctgatggggaaccgttcaagattgaagacttgggagtgcgcatttttgaaaaggcggaacagccaaagaccggcgcgagtctggcgctgtctcgccgggaagcacgcggcgctcgccgccgtctccgccggagacggcatcggaaggaacgggtcaaagcactgcttcaagagacgggatgcatcgaccgtgaagagctggaggcattgctggaggcctccggctttgacaaagacgtttataccttgcgggcagagggactggaccgccgactaacgcaggcggaatgggccagagtgttgctgcatctggctcagcggcgaggctatcgttccaacagcacggcagaggcggcaaaagaccaggagaccggtgctttgaaaactgcgctgtccgccaatcaggtgctgatggaggcaaagggataccgcacggcaggggagatgttctgcctggataaaaaattccagatgcttgggccggatggacaaatttggcgaaagactcgaaacacggctggagattacagtttcactgtgacacgggatatggtggaggccgaggcacacgtgctgtttgcctctcagcggcagtatggaagttcctatgcgtccgaaaatatggagagccgttactgtgaaattctgttatcccagcgggattttgacatcggccccggcggggacagccccttccgaaagggagatctgcggggaaattgtacgtttgaacgaacggaactgcgagcgttcaaggcatgctacacatttgagtatttcaagttgctccaagacctgaatcatatccgaatccaggctgcggggcatccttcccgcagcctgagcgcagatgagcgggagcgattgaccgctcttgccatgaaaagcgccggcctgcactatggacagcttcggaaggaattggcgctgcgtgaggaggagcgattcaataccgtgcgttaccagtcggatgatgtggagagcgcggagaaaaagacgaagttccaggagatgcagtcttaccataaaatccgcaaggccctggatggtgtaggcaaggggtatattgcctcattttcccataatcagctggatgagattgccactgtcctcagcctgtacaaatcagatgagcggagaagggaacagttgagcggccttgggctggaagatgtcgtgatccaagcgctgcttccactgtcgttcagcaaagcagggaatctttctttgtcggccatgaaaaagatgattccccatctgaaaaaaggcgtcaactacgatgaggcggccagcgctgtgtatggagaccatcggggtcatttcgaaaaggcgcggacagcaacgctctcctatggggagctgcaaaggcagggggctttggatgccattacaaatcctgtggttttgcgggcagtttcccagacctgtaaggtcatcaatgctgttgtccggcggtatggctcccctcaggcggtccatattgagctggcccgggaaatgagtcggaattttgcggaccggcagaaaatggacaagcagtaccaggaaaaccgtgcggcaaatgaacggctcatacaacaggtcgaagagatcaagggcagccgtgccactgggcaggatctcgtaaaatttaagctcttccgggatcaaaatgaggtctgtctgtactctggcacaaaattgcaggcggagcggctatttgagccgggatatgtggatgtagaccatattattccatacagcatctgctttgacgacggttaccgtaacaaggcactggtgctggcctctgaaaaccggcaaaagggcaaccgccttccgctggagtatatggcaggagatgaggaaaaaaccgggcgttttgtcacattggtggagatcagcgtccgggactaccgcaaacgccagcgcctgctgaaacgggaattgatagatgaggatttagagggcttcaaggagcggaatctgtcagacacgcagtacatcacccgggctatgtataatctgctcaatgactacctgcaattcgcggaagactcgccttttgcgaagaagccggttcgggccgtcaacggcgccgtgacggactatatgcgtaaacgactgggactgcacaaaaaccgggccgacggtgatctccaccacgccatggacgccgctgtggtggccattaccacagatcgaatgatccagcggatctccaactatgcaaaacggcgggagtgggggacaaaggttcggggaaattatgtggatccggagacaggtgaattactaacccaggaggtatttgacgaaaaatacgcgccttcttttccaccgccctggccccagttccgtcaagaactggaggcccgtcttgccccggatccaaatgccgagatccgatcgctgaacctgcctcactacgacccggagcagatcatccgccctgtgttcgtctcccggatgccaaatcggaaagtgagcggcgcggcccataaagagacgatccgcagcgggaaactgccggggtactcgattgtcaagacagcgttgaccgacttgaagctggataaaaatggagaaatcaaggattattataacccctccagcgaccgcctgctgtacgaagcactgcgggaaaggctgaagcagtttgacggagatgggaagaaagcatttgctcagccgttccacaagccgaaaaaggacggcatgctgggaccggtagtcaataaggtgaagacttacgggaaaagcagcctgaatgtggcagcctgcggcggcatcgcagacaatggaggcatggttcgcattgacgtgttccatgtggaggatgatggatattattttgttccaatctacacggcggatactgtcaaagggcagctgccacagaaggcggtggtagcatatgcggcggcggaagattggaaaccaatgagcgattctgattttctgttctctctctatgcaggagatctgatccgaatcgctcgaaaaaaaccaattggattgaaaattacaaacaaggattcctccggccaaccggagcttctccgaacggaatggatgctttattacagcggtgcggatatttcgacaggtgcaattattggcaccacacatgagcgaaaatatactggtcgcggcattggaattaaaactttacaaattattgaaaaatatgaagttgaccccctcggcgaataccatagagtgcataccccagagaagcgccaaactttccgctgaggaagaggaggtcctatggaatttcgtgccatctttatcgcgaatccggcgcagctctctttccgaaaggaacagctggtgatccggcagacccaggaggtcacagttcctatggaggacatcaccagcctgatgctggagtcgcaggccgtcacgatttcctccgcggcgctgcaaaaactggcggattatggcgtaacggtatatttctgtgatgaaaagcatctgcccgcggccctgctgctgccaatcaaccggcacagccgccagttaaaggccctgaagggtcagattgccatgacgaaacctgcgcaaaagcggctttggcagtctgtggtcatggctaagattcggaatcaggccaagtgtctggagctgctgggccgtcccggaagcggggatctgcaggagttggcccgcactgtccgctccggagatccggacaactgcgaggcaattgccgctgcgcagtattttccgtcgttgtttggacagggattcaccagagatatggactgtctgaccaatgccgcattgaattatggctatgccattctgcgaggggcagtggccagaaatctggcagtccatgggctggaaccctgccttgggattttccatcacagcgagctgaaccagttcaatctggcggatgatctgatggaaccataccgtccattgatagatctgtatgtggtatccaatatccaagagggcgaagagggcttgacgccaaagctgaaacaacaattattcaattcaacgaattatgtggtgcggcaaaatggaaaacgctaccggatgatctccgccgtggggcgtatgacggaaagctttgccagaggattgacgcaggacggggcggccctggaactgccggaactgatcccgctggagtcttaccgctatgaataaccggcttatgagaatattggtgttttttgatcttccagtaaagacaaaggcggagcggggagccgccacgaaattccggaattttctcctgatggatggctatcacatgatacagctctctgtctatgccaggatttgcaatgggactgattccgtagctgctcataagctccgccttgcatcggcagtcccgtcaaagggttctgttcgtatgctggtcattacagaaaaacagtacagcaatattcagatcttactgggaaagccgacggtgtatgatgaaccgcagcaaatggagcagctgatgctgttctaaaaattgaaaccacattcgaaaaagagaacgaaaaaagcagaaaaaacatgcgtttcatttttggaaaacacatgttttttctgcttattcttgcgaaatctcttgaaaatgcgcatggtttactggcaatttgagggtcccgatgaagcctattataccacaacaagagacttcagggaactacaacattcaatggagccgggggaattttacctgaattataccacaacaagagacttcagggaactacaactcatgttcatcgtatgctttgacacaatcaattataccacaacaagagacttcagggaactacaactgttgatggcctccagcggattactgccatattataccacaacaagagacttcagggaactacaacggaaattcttgaatatattcgttttcggcgattataccacaacaagagacttcagggaactacaacgaggatctctatggttatatccagtctcaattataccacaacaagagacttcagggaactacaaccgaccatggcttgattgcttgccgaccaggattataccacaacaagagacttcagggaactacaacttccgtggacagctccgccatggtggaggcattataccacaacaagagacttcagggaactacaacttaaaaacacaacctttatgaatagccttaattagaagctgtaccaataggggaaaaggtgctatactggatgcatgatacagaaaaatgaaagacgcagttatgcaagcgatttgagcgacagtcagtgggcggtcatagagccgctgtttccgcggacaggaaacaggagcaaatgggaaaagcgggaactggtaaatgcggtgctatatttggtagataacggatgcaaatggtgaaatctgccccacgattttccgccgtacacaacagctgccaatttttattacgctgcaatccgaagcgggctttgggaaaagatccgtgcagcgttggtggaacgggtgcggactgacgcaggccgaaacgcaggtcccagctacgcaatcatcgactcgcaaagcgtaaaaaccacctctgccgcagaagaacgcgggattgacggagggaaaaaaaaaggacgcaaacggcacatcgtagtggatactatgggtaatctgctggcggtggtagttcatgctgccaatatacatgataccaaggcaggaatttgggctgcgaaaaaagcatttgagacctatccatctattcagcggttttgtgctgatgcgggataccgcaagacctttgaacaggatgtttccaatctactgggacttggcgtggatatttctgtacgcatcaaacctgaatgggaggtcctgcccaagcggtggatcgttgagcgttctctggcgtggatcaacaactcccgccgtctttccaaagattatgaaatatctgtctgttctgctcagacggtttgtaccattgccgcttttcgcactctgctgaaaaggttttagcctattggtacagcttcttataccacaacaagagacttcagggaatacttatgttcctgaacgtaacgacggtgttgaaaatgctgggtgtatcgccatccagcggatacgagctgatgcatgaacagaatttcttagtgctaaaagttggaagtcgtatggtagtacccgaaaaaaggttcttgaatggatgtcacggcatactcaaggaggtgcggattgaagtacatacagaggagcggtagctcattagtacagaaaacacaaccgtcaccaccagggtcggtctgaagcgcaacggcaatctgctctacaccatccgcccaatccagttgaccctcgaccagttctacgagcagcagttgacgcagatggatgtggcggctgagcgtcagcaagtcgcaagggcactcacattccgcagtgataagtgcgattcagcatgacggcctgcgcgccatccagtgagttcaacacaaccgaaagtggcaggtgaaccggaggtcgaaaaaagagcaggataaaggtgtggcgtctaacgccgccacaccggattacaccgtcccgcagtgcgggccggggaaaccgaaaatgagagcttttg

SEQ ID NO: 1978 - DNA, 11625 bp, synthetic construct
  source 1..11625: mol_type = other DNA
  misc_feature 1..11625: note = Synthetic
ggtctgatgacggccatatgccataacttctcctttcatggttgcaaaatatcccgtgccggtgggcctgtgccgacagtacaattcttcttttcgctctaatcacctcccttttcgcctgagaaaagggagggatggcggcacaggcacgctggcacactcattgctttcttactttttcttatttttcaggggattccggacaccccggctgaccagatagacggacgcaccaagaatcgcgccctcggcaaagcaccccaggggagttcccatcacggcaaataaaatcggcataaacatcagtaaattcctcctttaaacaaagttttattgcctattcttaggcagtaactgcttccatgacgcacaaaactgccaaggaagtcacaaacccaaacaaggtccattccattcaaaccgcctcctttcgcacttttcggtaaaatgtacttggcttcagatcaagccgccgcatagcttctgcggcactgatctcacctcccctccatagctggaccacctgattgaaattcggtcgctggatcggcttacggcccttgtagacaccattggccttggcaatggtaatgccctcctgctggcgctggagaatgtattcccgctccagctcggccaccgcgccaaataccgtcagcatgaactttcccgtaggggtggtggtgtcgatggcctccttttgggagataaactccacttccttcgccgtcagcttctctaccagctccagcaggtctcgagtatttcttgcaaaccggctgatggactccaccactacggtgtcccctttgcgaacgtagtccatcatccgctggagctccggcctctgttccgcgttctttccgctggccttgtccaggaataactcatccacgttcagcgattccatgagcttttcctgacggatcgtgttttgctcttgcgtgctgacccttacatatccaatcttcaagttttctcttccttcctatttgtgatcccaagtatgatttccccccttgacggcaactacattttgtagtacatttgcattacaaggaggcgatttctatggcaatggacgctacggtacaaattcgtatgaatggggaactcaagacacaggtggaggagctctaccgcagtttgggtacctcttttgcagaggcggtgcgcatgtttgctcagcagagcctccgggaaggcgggctgcccttccgtcccaccttgaaaacctgggacgagatgaccactcaggagatccacgaaaaactggtccgaagcgaccaggacattgtggagggtcgtctatacacccaggaggacctggatcttcggatgaaggagcggttctctcatggacgaaatacagcggtataagatcacctatacggagacggccatccgtgacatggaggagaaggcagattacatcgcattccagcttcaagagcctgcattggcagagcgctggtatctgaacttgcgtgctgatattcagcaaaatctatccttctttcccttcaagtatccggcctatccagtggagccctggagctccagaggaatccggatgttttcaaccagcagcgatgtgatcctgtacagtgtggatgatacggccaagaccgtgtacatccggggcgtatgcaccaagggcagagatttgagcgcccacctggaagaacaggactcccagaaatgaaaaatcccaatagggtggttctctgatttggcacatgccaaaacgggagaatcaaccctattgggatacttttttgctgtgccgataggctataccccaatggcacagtcctatggcaccataggcagcacaatcaagctgccgttcagagggaagatcagctccgggacccgaaaccgctccaggcaccaggctgtctgctgttcggtcagactttcgaagcggtcactgtccgccggggccccgcataggaagaaggtcccggagatcacatcatagagctttccggactcgtccctcagacttcggatgaagggcagtcccagaaccttcccctcgtcgttgcagatcaaggcaatgggttccgaaaagggatagaggacctgaatggtcccgcctacaatttcctgcatgggtttcagccctgcttggaacgcctttttatagggggccttttcggactccaccacgactacgtgaagaaggtcttgcttagattctgccaaaatagatcatctcctcaatttcatcagtggaaaagccgccatctaacatggaatctaccagctccgatgtgtacccatagaaggaggcgaccgacttcaaaatccgaatgtattcccgctgggtggaggtccgctttggaaaatgccatcccatggcaggtggatcaagcataacggaacatggggaatatggataaatacgcagatttcggggatcaaattcaccacgaaattgattccctttggagtcaatttgcagaatgtctccccagtccaataccacctgattgggttttccaagggggactggtatcctgcttaaagcgtccaaaagaacgctctctgtagaggcatacagatagacgccggttttggggtagtggtagatacacaatgggttatcgccctttacaaagtagagattctcctgctcgtccagcacggtgaaggagaaagagccctccatctcctccgccatctttcctaaagaatcaaaggacaactcctggctctgctccagaagctgaacggctatgtagctgtccgtctcgatttctgtcttaggcaagtgaaacttatgtctcagaatcttgtcgttatagatcatgccgttatgggccaacgcaaaggcaacattaccggcctcgcccaggaaggggtggttgttttgattcttccgctcgttaccctgcgtggtgagtctcgtatggcccatgaccgctttcacttgacgagggacccgaatcttgagcttgtgcccaggcagaggccgcttatagacctggagcgttcctcccgcacagtaggcaatcccggaagcgtcggttcccctggcctcgcttgctctggccagagagcgaaggatctgctttttctggtggtaagcaaactgcccaccatagtctaccattccaaataaacagcacatgtcaaacttcctcctctgcgttcacaggctcattgacatacagccgccgctctttcagatattggatcagctctgaagcctgacagccggatacaaaggtggtccaggacatggctttcagctcctcatcggacaaaaagagagccacgtcacagatcttatcaagaagctgcagcgtggcgatcaaagtattatattttaaggtgccccgaaaaatccggaactcgatagtgtcatcgttggtcaggttgacgcaggtgtaccggccagcgtgactgcccttcttggcgtggtccaagatttcctgtggctgctccttgtagccgtaccgggaggcccatcggttcaactgaccttgggttctgcggctgaacttcagcagctcctcccagtgcttctcgaagaagtagaggacacgggcaatggcttgatcctgctcccactcttcatccccaaatgccgcccggctgacatggacgtgaagtccgcaagtcctagcttggtggctggtatatccctgctggaccgccagagccatgacctcctgccaaggagcttgcgtcaaatgataatctaaggagagcggatgggttacgatttccaaaccgtcgttcagagatccatcgtgcttgatgtaggccagatgatgattctgattgaagatgtccagcaggtcccttgcattggagcgggattctccggcttcgtcaatctccagttcgaccccaaagtatctgggaccttgaccgtagaaaatggggtcgggtttataggagtagtcgtggatcgccacacgatcttccagctcctcatagcagctcgaacaatagggcgaatcttcatcatcgtctaagtatctggcctcatgctcgtggatgacacgtccgcaccctacgcaagtaagaaaatgctggccaaagcagtctggacagattgcttgtccctcatcgtagtggatatcttcatcccagacgcgatttccacagtattgacagatgcccgtgtgggcttgaaggcagcccgggcagagagtctggtcgtggaaggtggcacatttaccttccggaatttcgttcccacagatggaacagatagtagttttgggcatggtttattcctcctggttgtaaatttaccccgaatgcatgaaggggctttcaggaagataatatctaactctgctttgcgatttttaccaaaaaacaaagttaaggaaaatagagcgaacatcattataatgctgaacaattttaaaggaggtagcataaatgtcaacaaactatgaaaatgaattgatcgctctgagaaccggtaaaaatcctccagagcgctccggagaatgttggacgaaagatgaactagaacaactgaaactgctttactacagcggagcgggattctctgaaattgcacttaagctgaaaagaacagaagtggccgtctttcagcaagcctcaaagataggcattctatctcagcaatgcaaacctcgaaatcgtgtacctaagcagcaaagccatactgcatgtctttgtcctgattgtgcgatggctgattgtcccaattgtggaaaggagtgcctttatgctggagagctatgatgacttgctgaccacagaggaggcctgcgaagcactgaaggttggaaaaaatgctctatatgcgctcttgcgcagtcagaagctgaatgggtatcgcaatgggcgggtgtggagaattccacgaatcgctgtggaagaatatatccgtaaacagtcaaacctcttgtaactcctccttccttagacatcctatccagaagaaactgcctgcgagcagtagggatttagatgacttgtccaaaagaagattgacttttttaaaaaatatgataaactatactcatcttgtaccacaacaagagacgtcaggttactgcaatcaggcagtatgcctcgaagctccgccccgaccacgttttgtggccggggcgtcttcgttcttatgggggtgtagcatatggagtataccttggggctagatatcggtattgcctcgatcgggtgggctgtcctagcaaatgattccaagggagatccgtttcatattgaggatcttggggttcgcattttcgaagcagcagagcatccccaaaccggggccagcctcgcggaacctcggcgtgaggcaagaagtgccagacgaagaattcgccgcagacgtcaccgaaaagagcggatcaaagcgctccttatcaaatatggagtaatttctcaggagtgccttgataccctgttccttgactccggattcgcaaaagacgtctatacccttcgagctgaggggctggatcgcgggttagagcccgaagaatgggttcgtgtcttgcttcatctggcacagcggcgaggatatcgttccaatagcactgcggaggcggcaaaggatcaggatacaggcgccttgaaagaggcactgtcgggcaacctgtccttgatgaaagaaaaagggtaccgcacggtaggggagatgttctgtcgggacgaaaaatttcagatgagagggccggatggagtatcatggcgcaaaacgcggaactctcccggtgactacagctttaccgttacccgagatatgatccagcgggaagtatccgcattgttccaaacgcagcgcaagtatgggaatctttttgcgggcgaatcccttgaggacacctatacgcagatcctcttctctcagcggccctttgatgaagggccgggcagagacagtccctatcaaaaaggtgatttaagagggcggtgtacctttgagccagaggagaaacgcgccttcaaagccagctatacctttgaatacttcaaacttttgcaggacctgaaccacattcggatcctctcatccactgaacccacgagaagactgtcccaggaagagcgggaaattttaattgcgcttgcattgaagtctcccaatctggactatctgaaacttcgtaaagcattggaacttccatccgaggccagttttaatgtggtccggtacggggaaacaccccaagaagagacggagaagaagagcaagttcgcacaaatgcaaagttatcacaagttacgcagagcgttggatacagtgaagaaaaactatatcttgcagttgagtcatgctcaattggatgagatcggtacggttttaagcctgtacaaagcggacgataaacgtcgggctgcattggaagctattgggctaagtccggaagcaattgccgcccttctgccgctgtctttcagcaaagcgggaaatttatccctgaccgcaatgaaaaagctgattccctatttggaacagggcgagaactacgattccgcctgccgccttgtatacggagaccatcgtggacattctggtgaccggcggtataagacgctgacgctgaaccgggaattaagagagagcggggctttggacgcaatcaccaatcctgtggtgcttcgggccttgtcccagaccaccaaagttttgaacgccattattcgcacctatggttcaccccagcgcattgtaattgaactggcccgcgaaatgcgcaataatttgaaggaacggcagaaaattgacaagaaaaaccaggaaaaccacaggaagaacgagacgctcatggcgcagatcgaagcgataaagggggcgcgccccacgggacaggatttggtcaagttcaaactctatcaagagcaggacgggatctgtctgtactctgggacgcagttggacagcgccagactctttgaggcgggatatgtggatgtagaccacatcatcccctacagcatttcttttgacgacagctatcgaaacaaagtgctggtccgctcggaagaaaaccggcaaaaagggaaccggctgccactggaatatctatctgcagacccggctcgtgctgagcgctttaccactttggttgagcggcatatccgagactaccggaagcggcagaaacttctgaaggcaaagctgaccgaagaggactgtgccggattcaaagaacgaaatctgactgatacacagtacatcacacgggctatttataatctgctcaacgactatctggaattctctccgcatgcatccaagaaaccggttcgtgcggtcaacggggcagtaacagattatataagaaaacgcctgggcctgagaaagaaccggaatgacggcgatctgcatcacgccatggacgctgctgtggtagcggttaccaccgatcacatgattcaacgaatctccaactacgccaaacggcgggagtggggtaaaaaagtgatgggacagtatttggatccagagaccggggagttactcagcagagaggcattcgatgccaaatatgccccgacatttccggaaccctggccagggttccggcaggagttgctggcccggctctccctggatccggatacggaaatccgggcgcttcatcttccccactatgacccccaacaccccgtaaagcctgtttttgtctctcagatgccccagcgaaaggttacgggaccggcccaccaggagacaattcggagcgggaaagttccgggctgttcagtttctaaggtacccttgtccgtactcaagctggacaaggatggagaaatcctgaattactacaaccctcaggatgacaggttgctctatgaggctctaaaagctcggcttcaggcatttggaggagacgggaaaaaggcgttcgttgaaccgttccacaaacccaagaaggatgggacgccgggaccacttgttcagaaagtaaaaattcaggagaaaagcagcctgaacgtggcagtctgcggcggagttgcggataacggaagtatggtgcgcattgatgtgtaccatgtaccggacgatggttactattttatcccggtttatactgctgacgttgtaaagaaaacgcttccacaaaaagcagccgttcaatcctccaaaaatattcaaaaagaatggaaggaaatgtgtgaggataactttgtgttttcgctttatccaggggatttaatacatgtccaggccaaaaaaccgatcaatctcaaagtgagaagcaaagaagcgacaggggagccggagcttttacgaaaagaatggatggtatactatgtaaaggcaagtatatctaccgcctctattaccgttactacacatgaccgaaaatatgaaaaagacagcttgggtataaagacactgttattgcttgaaaaatacgaagtcgatcccttaggtaactatcacaaagtacagcttcccgaaaaaagacaacaattctgaatttcggcagaaagagggattggttatggaatttcgctccgtttttgtttccaatccagcacagctatcggtcagaagaggacaattggtcatccggcagggggaggaaactaccatacccatggaggatatttcttccctcctgctggaatcgagagcgatctctgtcacggcggcggccctacaggagttagcggactgcggtgtgaccgtatatctatgcgatcccacccatctgccagccgccattgtactgcccatcaaccggcacagccggcagttcaaattgctcaagggacagattgctatgaccagacccacccagaaacggatctggcaatccgtcgtatccgctaaaatcgccaatcagagccggtgcctaacgcttctgggacacccggagggggaagaacttcggttcctcgccgctcaggtgcgttccggtgatccggacaatctggaggcgggcgcccgccgcagcgcggtactttcccgtgctgtttggtcccggctttacccgaggtgatgaatgccggatcaacgccgccctcaattatgggtatgccattctccgcggggcggtagccagaaacttggcggtacgcggactggaaccatgcctaggtatttttcaccacagcgaactcaatcaattcaatttggcggatgatctgatggaaccttatcgtcccttggtggacctctatgtagcctcccaggtaccggacgacgacggcccgctgactccggccatcaagcagcagctctttcatctgatcaactatctggtagaacagaagaagaaacgattccggacgatcactgccattggccgcatggtggacagcttcagccggatggtacagggggagacagggcccatggaactgccggttctgctgcccctggaaccctatcactatgagtagactgatgcggatcctggtcttttttgatcttccggtgaaaagcaaggtgcagcggcgtgcggccacccgtttccggaactttctgctgggagatggatatcacatggtgcaatactctgtctatgcccgcatctgcaatgggatggactctgtgacggcccacaagaaccggctgtatcaggcggtgcccgcccggggctccgtccgcgtactggtgattacagaaaaacagtatgctggactggaaatcctgctgggcggtccagctgcatccgatgactcgaagcagcaggaggacctgatggttttttaaaaaatagtgcaagttccttctttatttccgcttcaacagcaaaaaaatcagcgtctcttttcaagagagacgctgatttttgcttctaatttcctcgttgccacacatttttatgctgaaatgtgcgaattttcccttcctccatgacatctattataccacaacaagaaacgtcagggaactacaaccgggtggtgttgcgcttgaccctttcatggattataccacaacaagaaacgtcagggaactacaacaattaaacacaaaggagactgacaatggctattataccacaacaagaaacgtcagggaactacaacccatactctcaccccccgttatagctcacctattataccacaacaagaaacgtcagggaactacaactggcgctttctggccatgtggtgtgcatcaattataccacaacaagaaacgtcagggaactacaacgccgtcaagcgcctcccatacatcgaatacattataccacaacaagaaacgtcagggaactacaacctcccgtccgcatgagggcggcggcggtacattataccacaacaagaaacgtcagggaactacaacccatcagccctcacctcctgtcgcgttataattataccacaacaagaaacgtcagggcgacaaaatcggtttgaagaaaattatctcggacattttgcttaagaaatgtctttttttattttgtcacggacctctataaaacagaaaggcagaaacaacacccaaacagaatagtgaaaaaatatcgcaataacaaaatagtaatctattaaaaaatagaagggctacgcccttctattttttttcgggggaaggggcaaaacggtctcacaggccttcggcctgcgagaccccgccccttcccccgaacccctatccctcttaatcaaacctatatttgtgctcgtgcctttagctgccggactattgatttatgtgctggagacaaattctcaaattccattacaaaaaattctgcgcacttatcgcatacagcgtcaagtatatcgcttggtctttcttccatggtttcttgaagggcaacattcataatctcacacaaaactttactgactgcagtagtcacatattcaataaagtccgcatcatccattttatcttgcaaccgtttatcaatcgcgcgatgtagtatccctttcataatgctcttgtcccgaaaaaaggcagaaaaatatacatgggtatcgtcttgctgttttactttctctttctgctctactttctctttctgctctactgcctttgcagcttcttttaatatcctttgagataattctttagctggtaagccattgcgtttttttctgtagcgatcaagcaagtcatatcctttgcacacatccagtttctgtatcagttcgtcacacaaaacagagatgtatactactttccaccagtgtgtactatctggaatgggttctggttttgccaaactgggggagcgattgatatacaccatcaaagcatccttctgttcttgatttgcagattccagatatctcagcaaattgtccagtagtgcagcatctttgggtagcagattttccaggcgactattaaccgctgtaacatgatcaaaggaaatcggattccaagcagtatttttttcgacagttcctatatcttggatcgtacaatttagccaagagttcaaatcaaaatatcatcgtgcctttggccgcaggacaaatgatcgctcagaccgacaatggggaaaaaatatacttcaaaaaatccttagcgagttggatatgggcattcagattatttccatcggtggaggatggcggatagaacgctcaagtcgtgaaagttttgatgctcaggcagataatatatcaatgtaagtctgcaaataaaaagtcaataggaaattgagtaaatttgcagacgcagga

SEQ ID NO: 1979 - DNA, 9996 bp, synthetic construct
  source 1..9996: mol_type = other DNA
  misc_feature 1..9996: note = Synthetic
ggtgcggggtggacggagttctctcatctgcatacccgtacaaatccggataagcctacgacagacgaccactttgaagtaaatttcgtgaaactgaccggcagaggagtatatgtgggcgatggggtaaccttgttcaactccttggccgactggtggggcgaaggtgatgaaaaagtgtatgtgaacggtgaggaatttccttcgcacttcggcaccggtacggaagactattacggttatgcctggtgcatgcacaatgctttcagccatccgtttattgccgagccggatggaacaggctccactcagtgtgggcacgtctccaatgtgcgctatcgtggtttggatgccattcctttcagcaagtcattgacgtttgacatggagatatggcattggggcagtacggtcatcaactatgctcctactactttctggtatatgctgcccggtggagaatccaaccgcaaggcggaagctgctaaagcatctgcggatattgcaaagcataagaatgatctggtgagcaatgtagccgttgccggaaggaaggtggaaggcgaatatttggatattcggctgaccggaggaattgaaagatcgcaaagtatacctgccatgaactggagtaacggtgcccagttcttttgggctgaagcaaaggaaggcgataaagcttccttaggctttaaagtcgacaagggaggcaattatcggttgaaaatagcttttacggtagcaccggattatggttgtatagatttgtacctgaacaaccataaactgaaagaaaacctgaatctgtatagtaccgggctggcaacgaatgtattggatttggggacagttactttgcaagacggctctaatgaactgctgattatacaaaaaaaagctgatagccgttctgcgaattcattgttgggcatggattatttaataatacaataattaaggataatatgaagaaacaaattctgatgtttgcattatgttgcctgacggcatgctcttcgtcgtcggcgacaaaagaaaacgagccggaagaacagccgaagaatgtctatcgcaatccggtgataaactacagtttgcccgacccttctgtgataaagggcggtgacggctactactatctgtatgccaccgaggacatacgtaatctgccgattcaccgttccaggaatctggtggattgggaatatgtaggtactgcctttaccgaccgtacccgacctgattttgagccgaacggcggtttgtgggcaccggacatcaacaagataggtgataaatacgtactctactattccatgtccgtttggggaggcgagtggaattgcggcatcggttgtgccactgccgataaaccggagggacctttcaaggaccacgggaagatgttccgcagcaatgaaatcaatgtgcagaattccatcgaccctttctacatagaggagggaggaaagaaatatcttttctggggcagcttccgtggaatctatgcgattgaactgtccgataacggcttgtctttgaaggaaggcgccacaccgcagcaagtggcgggaaccgcttacgagggtacttatatccataagaaagacggacattactatttctttgcttccataggaagttgctgtgaggggttgaacagtacctacactaccgttgtagggcgttcggacaatcttttcggcccctacgtcgacaagaaaggcggtagcatgatggacaacaagcacgaagtgctgattcagaaaagcaatacctttgtgggcaccggccataactccgagattgtgacggacaatgccggtaatgactggttcttctatcatgcggtgagcacgaagaatcctgaaggccgcgtattgatgctggataagattagctgggaagacggatggccgacagtagaaggctccgttgcatctacagaatcggagaaacctgaattctgacgagtatgaagaattttattttagtatccttgttggccttgcttatgatgggctgtaaaacatcgaatggaggtgccttggaaatagtggaacctaccgtcgaaatgcgggataatcccgaaggagtagcttcgtttgctccccgtttctcatggcagttggcaaccggcaagcaggatgtgatgcagactgcttatcagattgaagtggcagattcggaaaagagtttgcagaccggggccgggctggtatggaacagtggtcgtgtggagtccgaccagtcggtgctggtgaaatatgcaggggcgcctttggagtcgggacagaaatattattggcgtgtcacggtatggacaaataccggtgacaaagcgcaaagcaatgtccggcactggtcaatgtccttgctggacagttcggactggaaagccggctggattggactgaacgacagtacaaacttggaactggacggtgaacggaccatccttccggcacgttatctgaggaaggagtttgatttgccgtcacagccgaagcgtgcagtcctttatgtttcgggagtaggctcttccgtatgctatatgaatggcgagaggattggaaacgatgtattcggtcctttgcctacctggtacgatgcttctgtatcttatctgacctatgatgtcacccccttgttgaagtccggtaccaatacgataggcgtggctctgggcaacggccgctatctttccatgcgtgccaatgggatggtaggctttggcttacctcgcctcatggcgcagttgaatatagagtacgacaatggtgagacggtgtcggtagtcagcgatgattcctggaaagcgacgaaccacggtcctataactgcgaacaacgaatttgacggtgaacattacgatgcccgcttggaattgggtaaatggacggaaagcggctataatgattccggatggcagttggccgaacggatggaggctcccaaaggaaaacttgtggcacagctctctccgagtctgaaggtgatggaggagataaagccaatatccgttaaatcggtaggtgatggaagatatatcgtggatatggggcagaatatggtaggaatacagcaggtgaaactgcgtggcaagaaggacaagcccattactatgcgttttgccgaagtgctgaaggacaatggtacggaactgtatcttgacaacctgcgcagtgcccttgtcacggatatttatactcctgccgctgacggtgagtttgtttgggaaccgctgtttgtttaccatggtttccgttttatggaaatatccggtttggactatgaaccggcagcggatgatttcatcggtaaggtggtgtatgatgaaatggcaacgaacggtacgttcgagacttccgaggagttgattaacagaattcacaagaatgcctattggggaatccgtggaaactatcgcggtatgcctaccgactgcccccagcgtgatgaacgtcttggatggctgggcgaccgcactaccggtgcctatggtgaaagtttcattttcggcaatgccttgatgtataagaagtggctggtggatatagaagagtccatgaatgaaaatggaagtatctctgtggtatctccccgttactggaccatcttccatgatgacgtaacttggccggctgcctatttttacgtagccgacatgctttaccgccagtttggcgatgatagctccatcaaagagcgctattcgtccatgaagcgctgggtaaaccacatgacggagaccaaaatgaaggactatattctggtgaaggatgaatacggggattggtgcatgcctcccgagtcgccggagctgattcattcggaggaccctgcccgtaagacgaacggtgaagtgttgagtacaacggtgttttacagtattctgcaactgatggagaagttcgcgcaaatgaacggacttccggcagatgctgaagagtatgcagcacttgccattaaggtcaaggacgcttataacaagaaattcttcaatactgagactgcacagtatgacaacaatacggtgacggcaaacctgctttccctcagactgggtctggttcccgatggatatgaagataaagtatttgccaatgtcgtggagaagacggaaaaagactgtaagggacatgtcagtgccggtgttcatcggcggcgcgaccaaggcggcggatttcgccgcagcgcaggacaaggagtacgtcgcgggctttacgctcggctactgcacggacacgcaggacgtgaccggcgagatcgtgcagaccggcgaccggatcgcggcggaatatgcggtgaaacgtgcggtgcgcggctttgtcggaccgcagcagcagattccgccgatgtactcggcggtcaaggtcaacggccagaagctgtacgaccttgcacgcaagggcagggaggtcgaacgcccggcgcgcgacatcatcgtgcatgaaatggagctgctggacttcgacgagaacgcccagaagggtacgctgcgctgtgtggtcagcaagggcacctatgtgcgcacgctcgtgaacgacctcggcgaaaagctcggcacgctcgccgtgctgcacagtctggtgcgcacgcgctcgggcgcgtatccgctcgaccgctgccgcagcttcgaggactgcgagcgggcgatggccgacggcacgatgcagcagctcctgctgccgaccgacagcctgtttaccgactgtccggccgtcgcgctcaccgctgagggcgcggagcgcatcgcgcgcggcgcagtcgtctttccgcggcagacagacagcctgcccgaaaccgcaggcacgctgtgccgtgtgtaccatgagggacgcttcctcatgctcggtcaggtccgcgagcttgacaagggcggtctgggtctgtttgtctataaaaactttcgataatttcagggggatagcccgatgatagaagttacaaaaccccgtgcgatcgcgctcggatactttgacggcgtgcatctgggccatcgggcgctcatgcagcgtgcggtcgagcgtgccaagcaaatcggcggcacgagtgcggttttcacgtttgatgtgcatccggattcggttgtcatgggccgtcaggtgccgctgctgaccgcgaacgcctaccgccgcgaggagatcaagcagctcggcggcgtggacgaggtgatcttcggccattttgatgagcggatgcagcatatggactggcgcgatttcattcacaaactgctcatcgggcagttccatgccggctggatcatctccggtcgcaacaaccgctttggctacaagggtcagggcaacgccgaaggcatggcggtcgaatgcgcgaaggccggtatcggctacgactgcatcgaggacgtcaaggtagacggcatcgtcgtctcctcgacctatatccgccagctgatcgcgcagggcgatatggagggcgcggcgaagttcctcggtcatccatacaccgtgacgggtatcgtagagcatggccgccgcgtcggcacgagcgtgcttggcgtaccgacggtcaatctgcgcctgccggctgaaatggcgctgccgccgtacggcgtgtacgcgacgcgcgtgctcgtggacggaaaaagctatatcgctgcgaccaatatcggcgtcaagccgacgtttctggacggcggcgcgccgaccatcgagccgcatctgctcgacttttcgggcgacctgtacggcaggatgatccatgtcgagctgcataagttcctgcgtccggaaatgcagtttgaatcggtggaggcgctcaagaccgccatcgaggaaaaccgccgctgcatggccgagcacggctaccgcacagtaggcgagatgatgtatcgggatgagcggttctggcagagcaatccggacggcacacgctaccagcagactcgcaacaagacagacgattatcgctttaccgtggagcgttcggctatcgtggacgaagcaaagcagatattcgctgcgcagagaaaactgggtgcagactggtcaagtgaagatttggaggctgcctacctttccattttagagggacaacgaagtttcgacgaggggccgggcggagaaagcccgtttcgcgggggcatcggtgataaggtcggtttttgcacctttgagccggacgagaagagagcggcaaaggcgacctacacatttgagtatttcaagcttttgcaggacttgaaccgcatgcgcttgaccggcatggggatgccgccggagccgttggatgacgagcagcgtgaagtgctgaaaagcgcggcgctccgttcggcatcgctgagctatggacagatccgcaagaagctgaatctggatgacgatgtgttctttaacgacctctattatggtgagaaaacgaaagaggaagcggagaaacgcaagtggccgcagatgcagtcctaccacaaaatgcggacggcgctggacaaggtgggcaaggacacgatcggcaccttgactgaggagcagctcaatgccattgctacgattttaacggagtgcaaaagcgacgcgaagcgcatagcggcactgcggatggcgggtattccggtgcaatttgatgaagcgttgctgccgctctcatttagcaaatacggaagcctttctgttcaggcaatgcagaaacttatcccgttgcttgagcagggaatgcgctacgatgaggcatgtacacagatttacggcgatcatcgcgggctgcattcagaacagcggaagaatcggctttccttaacggatatggatgaaatcacaaatccagtagtccgcagagcagtatcgcagaccatcaaggttatcaatgcgatcgtccgcacctatggcccaccggatgtggtacgcatcgaattggcacgcgagatgagccgaaactttgatgaacgccgcaaggcggaaaaaaggcaggacgagaatcgcgcagcaaacgagcgcgcaaaggagcagatcgcagaatacaagggagaccatgcgaccggcttggatattgtcaaattcaaactctatcaggaacaggatggcgtatgtttgtattccgggaaaaatttagatccttcccgactctttgaaccgggctatgcggacgtggatcacatcgtcccctatagccgttgttttgacgacagctatcaaaataaggttctggttctggccagtgaaaaccggcagaagggaaaccgcctaccctacgaatattttgggtacgatgaagttcgctggcatgaatacgaagtgcgggttgaaaatctgatccgcaactaccgcaagcggcaaaaattgctgaaaaggcagttgagcgaagaggaaagcgcgggatttatcgaccggaatctcaaggatacacaatacattactcgatccatttataacctcattcgaaacaaccttgtctttgcagaatcaaactacaagaagagacctgtccagacggtcaacggtgcggtcacatcaatgctccgcaatcgctggggcgtgcagaagatccgtgaggacggagacctgcaccactgtctggacgctgcggtaattgctgcaaccaccccaggattggtacagcgattgaccgaacacagcaagcggcgtgagactttggaaaaagcgcccgcgggctatgttgatcccgctacaggcgaacttttagaactgtcgcaggaagcgcggcgcgatctgttcccgaagccgtgggaacgcttccgtcaggaactggaggcccggctcgaccccatcgaccctcggcatcagatcgacctgctgaagcttgagacgtacgaaagcgacgaggagatcaagcctgtttttgtatccagaatgccgaaccataaggtgacgggcgcggcccacgcggagaccatccgcagcagcaagggcggcgatggcttcactgtgacgaaaacaccgctgacgaatctgaaactcaacaaattcggtgagatcgaggggtattataatccggcaagtgatacgctgctgtacgacgcgctgctggcgcggctgaaagatttcggcggcgatggcgcaaaggcctttgcccagccgttttataagcccaagaaggacggcacgccggggccgcgggtagacaaggtgaagatctgcgagaaagccacggtgggattgcctgttcgaaacggcatcgcggcaaacggcagcatgatccgcattgatgtgttctatgtagaggacgacggttactattttgttcccatctatgtggcggatacgaagagagagaaactgcccaataaggcggctgtggcaatgaaaccgtataatttatggaaggaaatgaaggacgaaaactttgtcttctctctttatccaggagatttggtacgtatccagagccgcaagggaatcaagttgaatcttgccaagggcggcacgggagaaaaggaaatcgttcggcaggatggaatgtattattaccggagcgcaggcattgcggtagcacagatctttgtggaaacacatgataggcgatatttgcagccgagcttaggcattaagaccctgcaatccatcgaaaaatatcaggtggatgtattaggaaactatcaaaaagtagatctccccgaaaaacggatgacattttccaaggagggttgagatggaatatcggaatatctttttggcgaaccccgcgcggctcagtgtacagcgagagcagctggtcatcgaacaggcggaaaaaatcacggttccgttggaggatatttcgtctgttctcattgagtctccgcaggtcacgctgaccgcttacgcagctgcagcgatggcaaatcatggcatcaccgtcttcctgtgcgacgaaaaacacctgccgagcggtcaaatactgcccatcaaccagttctgccgtcagcgaaagctgctgctatcgcagtgcgagatgggcaagccgctgcaaaagcagctttggcagcagatcgtaagccaaaagatctggaatcagtccgagtgtttgcgtataacgaataaagctggctgggaggatcttcggcaaatggcaggaaaagtgctctctaacgacagcgacaaccgagaagcggtagctgcggccggttattttcccgctttgttcggagttgggttttcccggagttcggacgacccgagaaatgcggcgctgaattacggctatgcggtcatgcgggccggaattgccagaaatcttgttgtgcatggcttggagccctgcatcggactgcaccatcgaagcgagttgaacaacttcaatctggcggacgacctgatcgaaccctttcgccccgttgtcgatctctatgtgacgcagaatttctccaaagacgatgatgtgctgacaccgcggcagaaagcggggcttttcaatctcaccaattatctcgtaaagcaggcgggcagacgatacagggtcatgctgtcgatcgaccgggtgtgtacggctttggccaatagcgttacagcgggggagaatctgctggaattgccggagctgatccccttggagctgcatcagtatgaataggcttatgagaattttggtgatgttcgatttaccggtcaaaacgaaggcggaacgccgcagcgcaacacaattccgcaactttcttacaagagatgggtaccacatggtgcagtattccgtctatgcgcgtatttgcaacggcagagattcggtagaaacacataggcgacggatattatccgcacttccgtcaaagggttctgtacggatgttggtcatcacagaaaagcagtatggtgccattgaactgttggtaggaaaaccaacgccatacgataagccgcagcaatttgagcagctcatgattttttaaaaaaataaagaacggcttcttcgtgaaaccgttctttatttttcgctttttcccctttttttgccagatagcgaagagaaaagtgcttgttttttgttcccaatgcttcgcctattataccactacgagagaaaacagggaactacgac

SEQ ID NO: 1980 - DNA, 9659 bp, synthetic construct
  variation 8226..8252: note = n is a, c, g, or t
  misc_feature 1..9659: note = Synthetic
  source 1..9659: mol_type = other DNA
ctcgccgcagtatagaaattcttccagctcctcgggagaaaagccctcccgtgccagcagatcaatctcctcaggcgtatagccgaaggccggcgcaaccgccttgatcccctccaaataggtaccggaggcggagcatgcctttttccacggctccagccaccagcatggccgccaaaagcgggaggaatagggggctttgaagtagaagtgccccttggcaatcgccccgtcaggggagaggcgcaggatatccccgcagtcaaccgcgatgcgctctgccctccccaaatcggtgcggatgcgccatgtggacttcttcaggatctcctctgtggatgcgtagaggtaaagcctccgttccggaaagtagcacagacagagggggctgtcccccttcaccaggtataggtggtcctccccatccaataccgagaaagaaaaagagccctcgaccttctcagccatgtactgcaggctgtcaaagccgagggtgtttttctgctcgatcagctgaacggcggcatagctgtccgtttcgatgcgtgtctttgggaggtgcaggctctgtcgcagagatttatcgttatacagtacaccgttgtgggccaaggcaaaggccgtgcccccagccatcccaaagaaggggtggttgttccggtttcgagcggggcgtccttgggtggtcatgcgggtatgacccatcacagcagccgtgctgctgcccacccggatcgagagcttatgccccgggacggggcgcttgtaaatacagagctgtccgcccaaattgtaggcgatcccagccgcgtctgtgcccctcgcctcactctcagaagctaaaatgtggagcattttggatttctccttccccgtaaaagaccgctccatatccaccaaaccaaatagtccgcacatctcagatctcctcctccgctttcaccgcgtcgctcacataaagcctgcgctcctttaagtacaaaaccagctccggctgcgtacaccctgccgcaaaggccgaccacggcagggaccttatctcctcgtcggacaaatagattgccatatcacagatccggtccacgagctgcagcgtggcgagaaaggtgttgtatttcagcgtgccgcggaagatgcgaaactctatggtttcgcagggttggaggttgacacaggtgtaccgcccggcttggcagcccttcttggcgtgttccaagatgtccttagggtgctcctgatagccgtatcgggctgcccaccggtccagctgccgctgggtgcggcggctgaacagcagcagttcggaccagtgccgctcaaagaaatacaggacacgggcaatcgccgcgtcctgttcctcctcggtattcccaaaggcctgccggctcacatgtatgtggaaaccgcaggttctcgcccggtggctctcgtatcccatctccacagcgctgtggaggatttcggcccacggcatctcctctgtgtggtacaccaggctcatggggtgtgtgaccagttcaaagccgctgcttaaagagccatcgtgcttacagtagaggcgatccagcccgtttccattggcgatgtccagcagctgtcgggcattcgagccgagctctcccgcctcgtcgatctccagttccactccaaagaagcggggacctttcccgtagaagataggctccggcttgtagtagtaatccttgatggcttggcgtttggcctcgtgggcatagcagtcctcacacaggggatcctcctcgtcttcatcggcgtatctggcatcctccgcccggataaccctcccacagcgctcacaggtggtgtaatagtggtcatagcacctctggcagaggggcgtgcagtcgctcccagcgttgtcctcgttccggatccgctccccacagacctgacagacggtggtttcctccgtcaggcaggaagggcagagcagttcgccgcacgcctcgtttttctgggatacggggtactcttctcggcagcaggcgcagacaaatatggtgtttttcacgtgatattacctcctgaaaagttttgtttccctggtagccccagggtatatccaagaggataatatctaattccgtttccttccttttacggaaaatctgttctaggcaaaggaacatcatagtaatcaagaaggaggtgctatcctgtatggaatcttaccaagaggaattgattgctctgcggaacggcagaaaagctccggaacgttccggagagtattggagcaaagaagatcttgaaacactgcaaaagctcttttgggagggggtaaatctgtcagaaatcgctatccggctggggcgaaacgaggttgccacctaccagcagctggcgaaaagcggcctgctgtccggccagtgcagggcgcgaaagcgcgcaaaacggccggccaaggcggagtgcctctgtccatcctgcggcgttacagactgccgcagctgcggaaaggagggagtcatctatgttggaggggtatgacgatctcctcaccgcagaggaggcctgcgaggtgctgaagatcggcaaaaacaggctctatgccatcttggccgccaaagaactgaaggcgtaccgcaacggtcgtgtctggcgcatcccccgcctcgccgtggaggcgtatatccgagcccaagccaacctataaaaaagtccgtggacgcatcccgtccacggacttctattttaatttctggggtcacatatcgggtgcaaaacaggccgcgaaaaccttatcgcaacaggaaatagatgcattggaaaacatgtagcacagcgggcttgacttttttgtgtaaaaatgatatgtttaaaatgcccttataccacaacgagggaagatagtgttactacgataaggtagtacacctcgaagctctaccccagccttatcggctggggtatcttcgtatctaaagagagaaaggcggggttttggtggcagttgatcattatgcgttgggacttgacataggtattgactctgtcggttgggcaatcctttgcaacaatgcggagggagaaccaatcaaagtggaaaacttgggcgttcgaatttttgataaagcggagcagcccaaaacaggagaaagcttggccgccccccgtagaaatgcaagaagcgcgcgacggcgtttacgtcggcatcgtcacaggctagagcggatccgttttgccatagagcgagcaggcattctgagttgtgatgagatccaagctctctatacgcaaggtgggtttgccatatccccatatcagctgcgggctgaagcgctggaccgtcccctgagccgggaggaaaccgtgcgggttctgattcatttggcccagcgccgtggatacaaatctaacagtacggcagaagctgccaaggatgaaaaggagatcggaaaagtcaaacaggctatcgaagaaaaccggctctgtatgcagcagcacgggtatcgtacggttggtgagatgatgtatcgtgatgaccgcttttggcagaccaatccagacgggtcccggtatcatcagacacgtaacaaagcagacgattaccgttttacaatagagcgttccgctgttgtcgatgaagtgcatcagctctttgaggcgcagcgtcggctacacactccgtggatgacggaggaatttgaggcagagtatctttctatccttgagagccagcgcaattttgatgaaggtcctggtccgggaagtccattccgcggagggatcacagaaaaagtgggtatctgcacttttgaaaaagaaccgccggaacctcgtgctgcaaaggcgacctacacatttgagtactttaaattgctgcaggatctaaatcatatccgtttggcggattcgagaaatttctctgtcccattgactcaggagcaacgagaaattctaaaaaaagcggccatgcagtctgcttctctgacatataagcaaatccgggaaaagctgaatttaggggaagacgtctattttaacggcctttcctatacaaaacaggcaaaagaggaaaccgaaaagaaaaagtggcctcagatgcagtcctaccacaagatccgtgcggcgctgaacaaaatcagcaaaggcgcgatcttatcgctgacgcaggaccagttggacgcaattggaacgattctgactctctacaaaaatgacaagaatcggctgaaggccttggatgaagcggggatccctgccgaacttcaccaggcattgctgccgttgtcgttcagcaagtttgggaatctttctgtgaaagccatgagaaaattaattccttatctggaagatgggtggcgctatgatgaggcttgcaaagctgtgtatggtgaccacagaggactgcaaacagaatcccgcaagtcaaaactctcactgcgtgatatggaggatgagatcacaaatcctgttgtgcggcgggcaattgcacagagcatcaaagtcataaatgcagttgtccggacctatggggcgccagacgtggttcgtatagaactggcgcgggaaatggggcataattatcaagagcgaaaaaagatggaaaagcggcgtgatgaaaaccaagctgcaaatgaacgcgccaaggaacagatctcggagtacaaaggcgaccatgccaccggcctggacattgtaaagttcaagcttttcaaagaacaggatggcgtatgcctgtactcggggaagaatctggatatatcccgtctgtttgagccgggctatgtggacgtggatcatatcatcccatatagccgctgctttgacgatagttatcagaacaaggttttggtcctgtccagtgaaaaccggcagaaaggaaaccgcctgccctatgaatatttcggccaggatgaggaacgctggcatgcatttgaggtgcgggttgaaaatctgattcgcagctaccgcaagcggcagaagttgctcaaacgggaattgacggaggaagagagcgcggattttattcagagaaatctcaacgatactcagtatattacccgcgcagtctataacttggtgaaggacaatctggttttcgcggattctccttaccggaaacggcccgtacaagccgtgaacggggcggtcaccgccatgctccggggaagatggggagtcagaaaggtccgagaagatggtgatttgcaccactgtttagatgctgccgtcgtggctgcgaccagccccggaatgatccaaaaattgacaaactataataagcgccgtgaaaccgcggagcgaatcccgggcggatatgtggatgcatccacaggagaggtcctgacaaaaaaggagtatgaccgcaagttcagtcctgaattccccagtccatggccgttgttccgccaggaattggaggcgcgcctggaccctgtggatccgcgcgcggccattgatcggctgaaactgcctacttatgagagtgatgaggaaatcaggccgatcttcgtttcccggatgccgaatcacaaggtaaccggccctgcccatgccgaaacaatccgcagcggcaaaatgggggatggattcaccgtgaccaagacgtcgcttgcaaacctgaaactaaataagcagggagagattgaggggtactatcaccccgaaagtgaccgcctgctatacgaagcgttacttcaaaggctgaaagaatttggtggggacggcagtaaagcgtttgcggaaccttttcacaagcaaaagcgggatggaactcccggtcctcgcgtggataaggtgaagatttttgaaaagtccaccctgaatctacaggtacatgacggggttgcggccaacggcagcatggtgcgaatcgatgtgttccatgtagaagacgacggctattatttcgtgcccatttatattgccgacacgaagaaagacaggttgccgaacaaagcggtgattgcctataaaccctatcaagaatggaaggaaatggctgctgaggattttatcttctctctttatcccggggacctggttcgcattcaaagccggaaaggcattaagctgaacatatcaaaaggtggaactggcgaaaaggtgattgttcggcgagatggactatattattatcgtacagcaggaattacggtgggctctattcagattgaaacccatgaccggcgatatttccaacccggcgtaggtataaaaacattgcagtctatcgaaaaataccaggtggacgtgctgggcaattaccacaaggtttcgcttccggaaaagcgcatgccctttaacaaggagggatgagatggagtatcgaaatatcttcctggcaaatcccgcgcatatcagtgtccgccgagaacagctggtgatcgaacaggcagaagcatatacgattccgctggaggatatttccacccttctcattgaatcgccccagatcacactgacggccagggccgctgcggccctggccacccacggcgtgaccgtgttcttctgcgatgaaaagcacctgccctgctgccaactgcttcccatcaaccagttctgccggcagcgcaaattgctgtccgcccagtgcgggatcggaaagcccctgcaaaaacagctctggcagcaaatcgtgatacagaagatccggaatcaggcgcgctgtctggaacttgccggcagaagcggcagcgagaatctccggcagatggctggccgcgtactgtccggtgatccggataaccgggaggcagtggcagcagccctgtacttcccggcgctcttcggcgaggacttctcaagaggagcagaggatcccagaaacgcagccttgaactacggatatgccattctccgcggcggtatcgcccggaatctggtaatgcatgggctggaaccctgcatcggaattcatcatcgcagcgcactcaatcaattcaatctggcagatgatttgatcgagccctttcgcccggtggtagatctatttgtggcaaaatatacggaggaatggggtgagaatctctccacagcgcagaaggcccaactgctgaacattacaaattatatggtgaagcagtcagagaagcgataccggattttttcagctatcggccggacctgctcctctctggcaaattgttttctcggggagagccaacggttggaattgccggagcttctccccctgaaagagcatcgctatgagtaggtttatgaggattttagtcatgtttgacctgccggtcaagacaaaagcccagcgccgggctgccacgcagttccgaaacttcctgctgggagacggctaccacatggtacagtactccgtttacgcaagggtctgcgccggccgggattccgtcgaaacccacaagaggcggatcagactggcccttccgacggcgggttctgtgcggatgctgattattaccgagaaacagtatcaagccatcgaactgctggtcggaaagccgaccccccatgacaaaccgcagcagtttgaacagctggtcattttttgaaaaaatacggtcgaattccttaacggaattcgaccgtattttcatgtgatctccgcgattttcccggaataggacgttagaaaatcacatgttttgtcccccgaccttctgcctattataccacaacgagagaagatagggaactacgacgactcctgtgcctgatagggctgtattcaaattataccacaacgagagaagatagggaactacgacgtgaccgtttttgcaattatatgggctacaattataccacaacgagagaagatagggaactacgacgtagttccacggttaagctcagttttaatgattataccacaacgagagaagatagggaactacgactgtctttgatgagaacggtgtgatggatctattataccacaacgagagaagatagggaactacgacacctctgatactcactctgatttcactaaaattataccacaacgagagaagatagggaactacgacacggaggatgaagagaaatgactcttggtgattataccacaacgagagaagatagggaactacgacaagttagaaactgattgtgttgaggtttgtattataccacaacgagagaagatagggaactacgacgacctggataaccaggagtatgaaatggacattataccacaacgagagaagatagggaactacgaccatgccgttgagcttttcatcaagcctggcattataccacaacgagagnnnnnnnnnnnnnnnnnnnnnnnnnnnaagatagggaactacgacagtacagtttcaatctttcgctgaccgtagattataccacaacgagagaagatagggaactacgacacagtgaccgtgtggctgccgtcgcccataattataccacaacgagggaagatagggagaactaccgccaccggcgcaggcaccgcaggaaatacgatgatattatattgcgaatctcagtcgaggttatcacaacaggcctatggccatagtgtgcccatgggttatttaatttcctgctctaagttcaaaaacaggtcagaattaaaaaagtctacgatcgtgaatatttcctcattatttggcatgagcttaggcgaaattgttggtaatacagggggtgtacaggggagtcacgccgaagaaatttatggggtattccatgaggccggatttgacggaattacctgtcgtgtcgagtactgtgattctgatggggcagtctttgaaacggatatgtacacattgacggattatgaaaaggataaaaacgctgaaattcaagaaaaagaagaatctgcgcaaaaaacggcagatatactggaaaactatacgctaattacaagtaacgaattatatccagtgggagagaatacagccaattcagaatacaatggaaaatctattagaatggaaaaccttcaaattatattgtctttcgagaacactgacggctcaatggattgtgacatggcactttggttatatcccggaattggtgccctaattgatatggatcttaatgatccgtatgcagttaaaaggattcgcgaggaaaatattgaatacgtcaatgtttatggggtactaaatattgaaccgaatccttttcatccagaggagagcaatataagcattctaaatggcggcatctatttccttgactaaaaacaatgagcaaactaatgccaacatttttgcttacaaacgcaaaaatacggcctaatctccgcagacagcaaagcagaacagaaaaaagtaaaatccccgcaatcccctgtaaggcaagggattgcggggtgtcgcatttctcacaaaatacgacaggagataccggtcggcgtactcctaagcggtaggccaccagttagagtctggtcgggggtgccaaaagaagggcgtctgctaaaagcagacgcccttcttttggcttccgccacccggagggcggcggaagctcatgtcctgtcagtctcaaagctcttgatggcaaacgaagcgcatcaggatcgcggcggtttcggcccaggtggtggagtcggcgggtaacggggtcactgggcgcgaaggcggcgccgcaggtgctggccctctgaacggcgcatcccgcagcccaccgggttacaggctggatcacagcgtgcccctgcgtcctcaggaggc

SEQ ID NO: 1981 - DNA, 7868 bp, synthetic construct
  source 1..7868: mol_type = other DNA
  misc_feature 1..7868: note = Synthetic
ggataccataaagcagttaaagaaagccaatcagactttgaatattccgaaactccgatatcggaaaaagcaatatgaaaagaagttggcgatttgtaaacaggagaaaatggaattgtatgaacaatatgcagaagaacagatttccctgaaggactacttggcacgaaaacaaacttgtatggaaaagacagcagcttatcagcaaaagatacaggagatagaagcaaaaattttaaagggggaggaggaaaaacaaaaggagaaattgtaaaatggctgtcgtatctatgaagcaactgctggaggccggtgttcactttggccaccagacccgtcgttggaaccccaagatggctccctacatctacaccgagcgcaatgggatttacatcatcgacctgcagaagaccgtaaagaagctggaagaggcttacaacttcgtccgtgacatctccgccaatggcggcaatgtgctgttcgtgggcaccaagaagcaggcccaggacgccatcaaggaagaggctgcccgctgcggcggttactacgtcaacgcccgctggctgggcggtatgctgaccaacttccgcaccatgcgtacccgtatcgaccgtctggctcagctgcgtaagatggaagaggacggcacctttgccatgctgcccaagaaggaagttatcaagcaccaggctgagattgagaagctggagaagtacctgggcggcgtgaaggaaatgaagaagctgcccgctgctctgtttattgttgacccccgcaaggagcgcaacgccattgccgaggcccgcaagctgaatatccccatcgtggctattgtggataccaactgcgaccccgatgagattgactacgtgatccccggcaacgatgacgccatccgtgccatccgcctgattgctgccgccatggccaacgccgccatcgagggccgccagggtgaggacgtggctgccgaagaggctgctcccgctgccgccgaagaagccgctgctgaataaacaatcaaatcaggaggatatcaaaatggcttttactgctcaggatgttaagaagctccgtgaaatgaccaatgtcggtatgatggactgcaagaaggcactccaggctaccgacggcgatatggacaaggccgtggactggctccgggaaaagggcctggccaaggctgccaagaaggctgaccggattgccgccgagggcgtggcctacgctaccgtggtagacggtgtgggcgttgccattgaggtcaactccgagaccgactttgccgctaagaccgatgccttcatggacctggtgaagaacctggccgtggtggtggctcagcagaatcccgccgatgtggaggctctgaaggcctgcacctaccccggcacccagctgaccgtcaccgaaatcatgcaggagaaggttatgtccatcggcgagaatatgcagattcgccgcttcgcccgcttccccgagaacacctccgttgcctacgttcacgcaggcggcacccacggcgttctggtgaacctggctgtggagggcgacatcgacgtcaccgagctgggcaagaacgttgccatgcagattgctgctatgaaccccaagtactgggacaagaccctggttccccaggccgacgtggaccacgagatgcaggttcaggttgccctgatggacaacgaccccaagatggctgccaagcccgctcaggtcaaggagaagattgccgccggtaagattaacgccttctacaaggacaactgcctgctgcagcaggatttcgtccgctccgacctgttccagggcagcgtggagggctacattgccgacgctgccaagaagctgggcggctccgtcaagtttgttgacgccgtccacttcatcaagggcgagggcattgagaagaaggtagacgatttcgccgcagaagtcgccgcccagattgccggcgctgccaagtaatttcaccatcccccaaaactgcctccttgtgaggcagtttttttatgccgacggacagaaaaatctccccagtaagaatgaaagggaacaagtctgaaaaaccgggaattatttttcaaaactccttgacagaatgctataataaaggtggctaatgccactacgagagaaaatggtgtttactacgataaggtagaacacctcggagctctaccccagtcgtaattttgcgactggggtatctacgttctatgggaaaagggggataacacaatgaagaaggaacagaagcattaccactacacgttgggcctggacatcggcattgcatccatcggctgggcggttctgggcaatgacctggacggcacgccaaatcgtatcattgacctgggcgttcgggtgtttgaatccgccgaggttcaaaagacaggcgagagccttgcagcgccccgccgggatgcccgcagcgcacggcgcagacttcgccggcaccgtcaccgcctggagcggatacgctatttgctggtgcagcagggggtgctcacccaggaggaaatgacccatttgtatgataagtgcgacatggtgtcgccctatcagctgcgcacagaggggcttgaccggcttctgaatgcacaggagttttccaaagtgctgattcaccttgcccagcgccggggctaccaatccaacagcaccgccgaagaggccaagaacgagaaggaaaacggcgttatcaagtctgccattttggaaaatcagcagcgcatggagcggggaggctaccgcaccatcggcgaaatgatgtatcgggatgaggctttctgggagacgataaacggaatccgctaccactgcacccgcaataaggccggagattaccgcttcaccgtggaccgtgcctctattctttcagaggtttccctcctctttgaagcccagcgccgtcttggctccccttgggcttccgtggaaatggaagacgcttacactgcaatcctgtccagccagcgcagctttgacgaaggccccggcaacgacagccacggcaacgaaagcccgttccgaaaagccatgtctcacaacgtaggaaattgcaccttgatgccaacagagctgcgtgcggcaagggcggactatactgctgaatatttcaagctcctgcaggacctgaaccatatgcgcctggtggacaacaacggttcccaccccctgacccagcagcagcgtgacgatctggaaacagcagcattccgcacggccaatctgacctatgggcagctgcgcaaaaagctggggctttcggacgagatgcggtttgcgggcctttactatgggacagaccccattgaaaaaagccgaaaagagaaaatgggcgcagatgcagtcctaccacaagatacgcaccgccctggataaggtgagcaaggatgccattcggacgctgacccaagaccagctggatgcaatcggggaaatactggcgggcggtgtgtcagacgcaaagagaatacattcctttggtttggcaggaatcccggaggagtaccataaagcattgttgcctctttccatttcgaaacgtgccaaactttccatagctgcaatgcgcaaactcattccatttttgcagcaggggatgcgctatgacgaggcgtgtaaggcagctggcttggattttcatggagcagacggcaaagtggaaaagctcagcgacttcctcaacgagataaccaacccggttgtccgccgggcagtgtcccagaccatcaaggtggtcaatgcggttgtggatacctatagtaataggaaaaaaatgaagatggatgcagtgcgcattgagcttgcccgagaaatgcaccattccattgtggaacgcaacaaaatgaaaaaacgtcaggaggataatcgggagaaaaacgagcaggcaaaggcgcaaatcctggaaacaaaaccgggaacccgggtgaccggactggatattgtgaaattcaagctgcatcaggaacaaaaaggtttttgcccatattccggtgcggaaataaaaaaagagcgtctttatgagccggggtatgcagaggttgaccacatcattccctattcccgctgctttgacgacagctacagcaataaagttctggtgctggccgaagaaaaccaacaaaagggaaaccgtacaccttacgaatatttcggggcgaatgaacagcgatgggaagaattctctgcccatgtaagggcatctgtccgggatttcaagaagcggcaaaagctcctcaatacctccttcggcgagaagcagaaagaggaatttacccagcggaatttgaacgacacccagcacatcacccgtgtggtatataactatctgcgcaacaatctcgaatttgcggactcggcctacgccaaggcaccggttcaggccgtgaacggtgcggtaacggcaatgctccggggcagatggggcatcgaaaagatgcgtggagacggcgacctgcaccattgcaaggatgcggtagtgattgcggccaccagcccctccatgatacagcgcctgagcaattactataaggaagaagagcggctctttatggggaagacccatttcgttgacccgggaaccggcgaggtgctgaccaggaaagaattccagcagcgctttgctccccagttcccccagccatggcctcggttccgggaggagctggaagcccgactggatcctgtgaaccccaaggaggcgttgatggcgcttaacctgagcacctttgaatttgatccagaggaaaaaatcccccctgtttttgtctcccatatgcccaagcacacagtgaccggggcggcacatgaggaaacgattcgcagcagaacagagacaggaaccgtaaccaaaaccgccctcaccgccttgaagctggataaaaacggagaaattgacggctattacagtccccaaacagacccccggctctatcaggccctggtggagcggcttaagcaattcggcggggagggagcaaaggcatttgcagagccgttctacaagcccaaaaaggacggaacccccggccccagagtggacaaggtgaaaatcgaaaggaaatcctccctgagtgtgcccaccgccaggggcgtggcggataatggaagaatggtgcgcatggatgtgttccgtgtcccggatgacggctattattacgtccccatctatgtgtcggatacaaggaaagccaccctcccatccaaggcggttgtgcaaggaaagtcaccggaagcatggaagcagatgaagccggagcatttcctgttttcactgtttaagggcaacctgatttatgttgagagcaagaagggaatttctcttgcacttgcgaaagaggcagtcggcgaaaagacaatccaggtcaaatccggtctgttctatttctgtggggcagatatttctactggcagcatcggaatggaaacccatgatcgccgttacacaaaaagaggtctgggaattaaaacgctgacattgattgaaaaataccaggtggatgtcctgggcaatgtcagcaaggtaaggcttcctgaaacacggttggaatttcgggggaggaagtaacaatggaatatcggaatatcttcattgcaaacccggccaagctcagcgtccaaaggaatcagcttgtaatccagcaggaacagcagatttgcaaatgatggtgtaggggtcgcctagcagacgaccccagcggcgaagccgccttggctccctctttgagggagctgctgagcgaagcgaagctgagggagtgtagtgtgttgaatggtatcgcccgttggttactgccgtacccggaggggtcgcctaccaggcgacccgccccgaaccgttgaattgcttattggaaagccaaattccagcgatgccacccaggattatgaacagctgatgcttttttagaaaaaacagcaggacaatctcaaaacggattgtcctgctgtaagcaattttctgccgacttttctcataaaagggggcgagaaaattgcctttttgtgtggtatttctgtggctgttataccactacgagagaaaatggggaactacgactatgtccacattccagcaagcgctgaatcagttataccactacgagagaaaatggggaactacgacctaccaggagcggcgaggaacggcccaggagttataccactacgagagaaaatgaggaacaatggtttttgccccccaatgccctagaatgatctcctacatattatatccccattttccgtctgcgtcaatccccaaacggaaggggccgggggtgccggttgcccggggggctttggcatatacttgacaaaaggggaaaccatgggtaaactggaactacacaaaacataggaggcttgtcccatgacaccaaaggtatatttcacaaatttctgcacctccggcggggagaccattccccagaagctggcccggctgctgctgtcggcggggatggataccattgattttaaggataagtatgtagccattaaaatccactttggcgagctgggcaatatggcctatctgcgccccggatatgcccgggtggtggtggatttaatcaaggatttggggggcaagcccttcctgaccgatgccaataccatgtatgtgggctcccggaaaaacgccctggaccatttggagacggcctatctcaatggcttcaccccctattccaccggctgccacgtaatcattgccgatggcctgaagggcaccgacgaggtggccgtgccggtgcggggcggcgaatatgtgcagaacgccatgattggccgggccatcatggatgcggacattgttatttccctgaaccatttcaagggccatgaggaggccggcttcggcggggccattaagaatctgggcatgggctgcggctccaatcagggcaagcgggatatgcacagcgatggccgcccctcggtggatgaggagaagtgcgtggcctgcggtgcctgtgccaatatctgcgcccacgacggcccccagctggatgccgccaccgggaagatgcacatcaattgggtcaactgcatgggctgcggccggtgtgtggatgtgtgccccatgggggctatttaccatagccacgaaaacgttgtgcggatgctgaacaataaaatggccgagtacgccaaggccgtggtggacggcagacccaattttcacatcagcctggtgcgggatgtcagcccctactgcgactgccatccggaaaatgatgtgcccattgtgccggacgtgggtatgtttgcctccttcgacccggtggccctggatctggcctgcgccgaggctatcaaccgtcagccggttcttccaaacagcgccatcaccgatctgaagcatgagcacgactgtgaccgcttccatgctgcgcatgacaatacgcactggcaggatctgatcgagcacggcaaaaaactcggcattgggcaggatacctacgaacttgtgaccatccgctgaatcacgcaccaacccccgggaaggcatctgccatcccgggggttcaacatgtcaagcctgcccctgccaagctttcggcgaatccgtactactttgcaagttttgagtacaaggctaatttgccacaaccattcaaaggcaactgccatcaaatttgttgtttcgtgacaggcggcgcgtaccatggcgcccgtagggtgagtatgtgggttcgtagagactcaataaattgatgcttgctaaaatggtacccgcagaacgcaccaaccgcgtccaagcgcccttttctcccctatcttttcccgcgcaagggaaaagatagggccgccggaggcgcgtcagaaacgaccacgacggaacgaatcct

SEQ ID NO: 1982 - DNA, 5739 bp, synthetic construct
  misc_feature 1..5739: note = Synthetic
  source 1..5739: mol_type = other DNA
aggtggaagcctggcacagccggatgaaagatgtggatgactacctggcaaagctggaacagaaataaagaacagggtatccgaaaattccccctacatgaacacaagcagaggtgttcacaaccggtgttatttataggtttatctaccggattcaggttgacaaacgagtgatattgagctataatatatgcatcttgtaccacaacaagagacattaggttactgcaatcaggcagtatgcctcagagctccaccccaaccacatttttgtggttggggtgtctttgttatagctgcaaatatgggaggttcactatggagtacactttagggctagatattggtatcgcctctataggatgggcagtattgcgaaatgatgcccatggcgagccttatagaattgaaaatctaggtgttcgtgtttttgaaaaagcagaacaccctaaaaccggtgcaagtctggcgcttcctcggcggcaagcccgtggtatgcgacgctgtgtccgtcggaaacgacatcgaaaagaaagaatcaaaaacctgattgaaagtatcggtctaatgtccaacgaagacatggcacacctgtttgaacaatccagctttgcaaaagatgtgtatactctgcgtgcggaggcattggataggaaattgcaatccgatgaatgggtacgtgtattgattcatatggcccagcgccggggctatcgctccaacagcaaggcagaagaagcaaaagaaaaagacaatggcatacttaaaaatgcaatttctgccaatcagcagttgatgcgcgaaaaaggatatcgtaccgtcggtgaaatgttctgtaaggatgcaaaatttcaggcaattggtgctgacggtaaaagctggcgtactacacgaaacaccgccggtgactataaattcaccgttacccgacatatggttgccgaagaagttgaactgctgtttgctgcacagaggacttacgggaacccatacgccacgagagaatttcagcagaaatactcagaaattctcttttcacagcggaactatgacgaaggtcctggcggtgatagtccctaccagcaaatggacctccggggatactgcctgtttgagccaagtgaacatcgcgcattcaaagcttgcttcacttttgaatactttaagctgcttcaagatttgaaccacatccgaattcgttcccgcgataatcaaaggccattgcagcctgatgagcgtcagaaaataatatccctggtcatgaaatctgacaaccttaacttttcccgcctgcgaaaagaactgcagctgccggatgataatacctttaaccttgtccgttatgagcaagaaacaatagaacaggctgagaaacattcgcagtttttacaaatgcagtcctatcacaagctgagaaaagcactggatcatattgtcaagggatatatcaccaccctgaatcacgacaccctggacgacattggcaccattctcagcctatataaagcggatactaagcgaatttccgctctaaaagagctgaatttagaggacagcgttattgcacagttactccctctgtctttcagtaaaaccgcaaacctttctctcactgcaatgaaaaagatgattcccctgttggaaaccggtgtaaattacaacgaagcctgttccaagatctatggagacttccggggacataaagaggatgtgcgatacaaaactctgtctttgaatcctgattttttgcaagatacgcagcttttagaaaatattacaaatcctgtggttctgcgtgcagtttctcaaacctgtaaggtagtcaatgccatcgtccgtaagtatggttctcctcaggtaatacggttagagcttgccagggaaatgagtaaaaacttcgatgaacgtagaaaagcagaaaaaagcatggatgaaaaccgtaaaaagaacgagcaagcaatggaacacatccgtgaaatcaaaggcgaccatgtaaccggattggatttggtaaaatggaaactatatcaagagcaggatggtgtctgtctgtattccggtacacctttagatgcaaatcggctgtttgaacccggctatgtagatattgaccatattatcccatatagtatttctttcgacgacagctaccgtaataaggtacttgtactctcctctgaaaaccgacagaaaggaaatcggctgccccttgaatatatggacggaaaacctgaaaaagcggcagcgtttgaattgctcgtacaaactcggattcgagactatcgaaagcggcagaaattacttaaaaagcagctgacggacgaggatctatctgggttccgtagtcgaaatctaacagatacacaatatatcactcgaacggtctataatctttttaacgattatctggaatttgctgcctctgaaaaatacacaaagaagcccgtacaggctgtcaacggttccgtgacagactatatgcgcaaacgccttggcttgcagaaaaacagagccgacggagatttgcaccacgctatggacgcagttgtaattgcaacaacttccgacggaatgattcagcggatttccaactatgctaaacgtcgcgagtgggggaaaaaattcatgggctcctacgtcgatccggaaaccggtgaacttctcagtcaggcagcttttgacgaaaaatatgcgcccaccttcccagagccctggctgcacttccgaaaagagttggaagcccgaatgggaccaaccccttatgaagatatcatggaaatgcacctgacaaattatgagccggatgaagaaattcttcctatctttgtctctcaaatgccccgacggaaggtaaccggtgcagcacatctggaaaccatatggagtggaaaagagcagggtactttgataaagaaagtaccattaacctcattaaagctggataaaaacggggaaattaaagattattatcatccaaacgacgaccgtctgctgtattcagcattaaaagaacagttaaatgtttaccagggaaatggtgaaaaagcctttgctgagcctttctttaagcccaaaaaggacggaagccccgggccgctggtcaataaagtgaagattcaggaaaaaacaactaagtccgtacccgcaaacaaaggaatcgcaggcaatggcggcatgattcggattgacgtattccaggtagaggacgatggatattactttgtgcccatctataccgccgataccgtgaaaaaaaatcttcccaatcgagcagctacatccggaaagcaagcggactcctggaaagtgatggatgatgcagattttatcttttctctatatcctggagatttggttcgaatcgcttcccccagtatgctcaaattgaaaaaatgcaattcggatgcgtccggggaacctgtccttttacggaaagaagcattcctatactatgtgggagccgatatcagcacagtcagctggaccctggcaacccatgaccgaaagtatcaatgcagaggactgggcattaaacgtcttcaaacaatcgaaaagtacgaagtagatttattgggagattatcataaagtctcacttccggaaatacggcagtcctttcgctgaataaaggaggcagcatggagtttcgttctatttttgtggcaaacccggcacagttatctgtgcgccgaaaccagctggtgattcgacaagaaaaagaagttaccgtacccatggaagatatctccagcctgctaatcgaatctcgggccgttacaataaccgcagcagcattgcaggagttagcaaatcacggggtgaccgtttacatctgtgacaatgcacatatgcctgccgctttaacactgcccatgaatcagaattgtcgtcaactgaagctgttgaaatctcagattgccatgactctgccaactaaaaaacgcacctggcagacaattgtatcatctaagatctataatcaagccaaatgtctggaaattctcaacaaagacggagctaacgatcttcgatatttatctcaaatggtccgtcctggagatccagaaaattacgaggcagttgccgccgcccaatattttcctcttctatttggcggcaattttacaagaaacgataatacactcacaaatgcctgtctgaattatggatacgctattttaaggggcgctgtagcgcgaaatctggtaatccgtggaattgaaccttgcctgggaattttccatcataatgaactgaatcaatttaaccttgctgatgatctcatggagccctatcgccctttggtggacctgttcgttgcatcttctgtgcaggaggatggcgaactgaccccacgcataaaacagcaattattcaacctctctaactatcttatccggcagaatgaaaaagaatacaaggcaatctccgctgttggtcgaataaccgacagtttttgtcgtattctgcgtcgagaagacaaaatgctggaagtacctgaactgatccccctaagggaataccgctatgagtagacttatgaggataattgtcttttttgatctgcctgtcaaaacaaaacagcagcgtatggctgcaacccgtttccggaatttcttactggcagacggctactatatggttcaatactctgtttacaccagaatttgcagtggaatggactctgttctggcccataaacgcaggattcagcgcgcactccctcccagaggcgcaattcggcttctggtaattactgagcggcagtatgaaagcattgatattcttcttggtgcccagcccgcagaggaagaagtagaacaaatggaacagcttatgctgttttagcaacgaaaaaggcagatacgtttcacttggaaagtatctgccttttttcatttttctacgatttcccgcaataattttgcatttttgtttcgtttgtttcttagttcccatgtctattataccacaacaagaaacattagggaactacaacaaccgatcggcaagcttccgctaactatgtattataccacaacaagaaacattagggaactacaaccattacatacgggggtatctattgacatagattataccacaacaagaaacattagggaactacaactcggatatatcggggttgcatggtttgaggattataccacaacaagaaacattagggaactacaaccaaatccaaatccgggtcatcttccagtttattataccacaacaagaaacattagggaactacaacagtacgcagccagaatcccgttcaggaaggattataccacaacaagaaacattagggaactacaacggaatgtaccaactgttcatgcactgcgagattataccacaacaagaaacattagggaactacaacaagtgatcccgcacaatgtagagatccgaaattataccacaacaagaaacattagggaactacaaccaggatgttgagcttgttgcttgggattctattataccacaacaagaaacattagggaactacaactgatcacgcccggagaaatgtgtgacttacattataccacaacaagaaacattagggaactacaacgatggttttcctgctgtcatcctctgtgaattataccacaacaagaaattttaaggtacttaatctttggtgacgttctcgaagcgggcgcctaccaccgtctccaggcatctggggtcaagctccatttgcaggccgattttgcc

SEQ ID NO: 1983 - DNA, 4424 bp, synthetic construct
  source 1..4424: mol_type = other DNA
  misc_feature 1..4424: note = Synthetic
ggcgagagtgtatgatttcagcggtcaagctgtctgacctgtgcggtcaaagtgtccgtcggagggcggcgtattcatttcagaatctaaacgattatttggatactcaactgattcaaattgaagtattacggcatcggcgcggtgacggttacagcgatcccaagtatgtaattgaacttcttgaagaatatattgatgtgcgtcaaggcgatcttattccaaaagaattgccgaaagcgtttactgaaaaatactctaaagactttattcaagagtatatcgccggtgacagtagattaaccaagaaagagcgaaagcaattcagtgaagacctgataaaaatcggaattgatatcaagtatcgccaatatttacaagcatttaggaaggatgaggattattttgcgatagttcttgaccgagaccgcgggtcccatagcaagcagcttatgcaagaatgcttggataaatgcaatcaagagggttatgggtgttttgttacaaatccctgctttgaattctggcttttattgcatttgtgtgatgtaaaatccgagttctcacctgaagaattggaggagctgtattcaaatcaaacgaactctaatagacacacaaaggtcagctgtgaagtttcaaagcgcgctcatcacgcaaaaacaattacttcagataaattcagaaaactctactatcccggtattccgcaagcaataaaaaacgcagagagtttttctggcagctttcccgaattgttcgatcatttgggaactaacttacctaaactgcttgacattcttgaattccatgtttaaccaaggggaaccgattttcgtggatcctgcgtttacggtcattggaacaggcagagatcatctgccatttacatagggctctttccggttttcgttgaatttttcgtaaagaaaaagctttgcccgcgatgcagggctgtttcgattacgcgtgcggccggatgtagatgactttttctgtaagcccggcgctggcggatctgtccctgctgaaatatataaaaatgttgacattttttaggaaaaagcgtacactttaaatacccttataccactacgagggaaaatcgtgttactacgataaggtagaacacctcgaagccctaccccggccttatcggccggggtatcttcgtattttaggaaaggagccctctcagatgtcggaatttcattatgcgcttggattggacataggcattggttctgtcggctgggcagtcctccgaaatcagccaaacggagagcctgaccggatccaggacttgggcgtgcgtatttttgacaaggcggagcagccaaaaaccggcgccagccttgcggccccccggcgggacgcaagaagcgcccggcgccgcctgcgccgccatcggcaccgtttggaacgcatccgttacctgatggagcagcgcggcatcatgccggttgcggatattcaggccatgtatgccgccggcggcttccaaaaatcgccctaccagctgcgcgctgaggcactggaccgcccgctcaccaaggaggaagcggttcgggtgctgatccatcttgcccagcggcgcggctacaagtccaacagcaccgcggaggcggcgaaggacgaaaaggagacagggaaggtcaagactgccatcgaagaaaatcgccgctgcatggccgagcacggctaccgcacggtaggcgagatgatgtatcgggatgagcggttctggcagaaacatccggacggcacgcgctatcaccagacccgcaataaggcggaggattaccggttcaccgtggagcgcgcggccatcgtggacgaggtgcggcagatcttcgccgcccagagaaggctgggcacggcctggatggacgagtatatggagactgcctatctctccattctggaaagccagcgcagctttgacgaaggccccggcggagacagtcccttttccggcggcatcggggaaagggtgggtgcctgcaccttcgagccggatgagaagagagcggcaaaggcgacctacacatttgagtatttcaagcttttgcaggacttgagccgcatgcgcttgaccggtatgggcatgccgccggagccgctggatgccgcgcagcgtgaagtgctgaaaagcgcggcgctccgctcggcatcgctgagttatggacagatccgcaagaagctgaatctggatgatgatgtgttctttcacggtctctattacggcgagaaaacgaaagaggaagcggagaaacgcaagtggccgcagatgcagtcctaccacaagatgcggacggcgctggacaaggtgggcaagggcgcgatcggcaccttgaccgaggagcagctcaatgccgttgccaccatcctgacggagtgtaaaagcgacgcgaagcgcatagcggcgctgagggaggccggtattccgccgcagtttgacgaggcgctgctgccgctgtccttcagcaaatacggaagcctttccgttcaggcgatgcagaagctcattccgctgctggaagaaggactgcgctacgatgaagcgtgcacgcgggtctacggcgaccatcggggcctgcacccggaacagcggaagaatcggctttccctaacggatatggatgagattacgaacccggtggtccgcagagcggtatcccagaccatcaaggtcatcaacgcggtagtccgcacctacggcccgccggatgtggtgcgcatcgagctggcccttctccttggcggcgttgacacaccgctgatgacggcatacaaataccggcaggaggttccctatgtgttcgacatcgtttccgaggaagacggcccggagctgctctatgagatctatgaggtgaagctggactgtctctacgagccggtgaagcagtccttcttcacggacacggtttacaatatccccggtaggttcaaattcgcggtttcccaaagctggacgccggtggacgccgccccctggggcgctttggacgcttaccggttcatccgggaggacaacacgcccatcgggaatttcctgctctgctacgccgaccgcttcgtggagatccggtttgacccctggtatgacggagccgcacccactgaaaagcaaatggcgctggtgggaacggtattgggcagcgggccgctgtcctgacgaaaatttgatatataaaaccaatacccggagcgatctgctccgggtattggttttcgttacgcttattgatcgtccagcttttccagcgcggccttggcggccatctgctcggattccttcttgctgtgaccgctgccctcgccgatggcagcgccgttgagctgcacctcagtgacgaaggtcttggcgtggtcagggccttcctcccgcaccatgcagtaggtcagctcctgaccggccttccgctggatgtgctcctggagcagggtcttgtagtcccggcggcgctcctccaccacctcttccctctccacgtccagcagaacgcggtggatcagctccgacgcggcggtaatgccgccgtccagatacacggcggcgaacacagcctcggtcgcatccgccagaatggaggcccgatggcggccgccgccggcttcctcgcccttgcccagcttcagatagctgcccagattcagcttctgggccacctcgtgaaggctctgctcgcacaccagcgctgcccggatccgggtcagatccccctccggcaggtccgggtgccgggcgaagagatactccgccgtcacaaagcccagcacgctgtcgcccaaaaactccagccgttcgttgctgccaagcccctgggagcgatgctcattcgcgtaggagctgtgattcagcgcctcccgcagcaattcttggttccggaaggtataatttaattttttctccagttcctgcatccctgttcacctcataaggaagccccgcgcatggcggggccactcttttttacttcagcttggaagcgacaaaattcaccgcgtcgcccacggtcttgagtccggccagctcgtcctcgttggcctcacccatatcaaattcctcttccatggccatgaccagctccaccaggtccacggaatcagcgcccagatcctcctcgaaggaagtatccatggtcacctccgcaggctccattgcaaactgctcggacaccagatcccgcatggtctgaaagatttcatcaactgacataccaaattcactcctatgaaatatttcaaaattcatttgctgcttagcatgaagcaatcatacggcaatcccatagccctgtcaagagggcaaccctcttttatccgttcttttccaccttctggtggcatgtcccaatggaggttcgcctgtttcggttggcaggaacttagctacttcgggaagttcaagcggcaat

SEQ ID NO: 1984 - DNA, 3264 bp, synthetic construct
  misc_feature 1..3264: note = Synthetic
  source 1..3264: mol_type = other DNA
actgattcattttgcacagcgtcggggctacaaatcaaacagtaaagctgaagaagccaaagataacgaaaatggtgttatcaagcaagctatctcacagaataagcaagtcatgaaagcgcatggataccgcacgtttggtgagatgctgctcatggatgaccggttttattacacacagccggatggtgcaaggatttttattcctcataacaaagcatccgactacaaagtaactgcagagcgcggtatgcttgcagacgaacttcatatgatttttgcggcgcagcgctcgctgggaagtctgtggttttctgatccatttgaaatcgcgtatatggatatttggtccagccagcgcagttttgataaaggtccaggcggcgatagtccatacagtgggaatcaggtcgaaaaaaactggggaaaatgcacctttgagaaagacaaactccgcgccccaaaagcaagctattctgccgagtattttcgacttcttcaagacgtaaatcacctgagaattgtatcgcttgatggtgcatcgttcccgcttaatcaggaacagcgggataccaatatacgttgccgctacgccgccccagtcaatggtatctttcaggaacgcttcgtagttctggccctattcacatctccgtaaaaagctcaaattgtcggatgatcagtatttcaacgccctctattatggagacaagacaacggctgaagtggagaagaaaaagttcggacatctccagttttatcgtcagctacgcactgcactggataaggtagaaaaaggggcagcggatactttgacatgggagcagagagatgagatcgctcgtatcttgactgtgtataaagccgatgaccggaggactgacgaactacagaaggcaggcattcctgaaaaatacatagatgcgttgcttccgctttctcctacaaaggcaatgcatttatccgtaactgcaatcaagaaaatcattccatatctcgaggctggaatgccttacagcgatgcactctctaaagcgtatggcaatcaaactaatgcaagcacttcttccaaaaagcacaagctatctttgaacgacatcgaggagattacaaatcccgtggttcgtcgggctgtgtcgcagagtatcaaggtcatcaatgcaattgtacgccaatacggtgcgccggaacgtgttagaattgagcttgctcgggaaatgggtaagaacttcaaagacagaaggatgattgagacacgccagacggacaatgcagcgaaaaacgaacgtatcaaggcgcagatttctgaatataaaagtgaccacataaccggacaggatatcgtaaaattcaagctatttaaagagcaggacggaatatgcctctactcggggaaaagcttggacattgcaagactgttcgaacccggatatgtagatattgaccacattattccatatagtatttcttttgatgacagctacaacaacaaggtgctggtactgtcgtccgaaaaccgtcagaagggtaatcgtattccatatgcgtatttcggtcaaaactccgatcgatggaaaaaatacgaaacactggtcagcaacacggtaagaagctaccgcaagcgtaagaacctcctgctaaagtttctgtcagaggcacagattgatggattcaagcaacgcaatttacaggatacgcaatacctttccaaggtgatttttcgactgatcgagaaccacttgcagtttgccgaaacggcgcccgggaaaaaacatacccaaccggtaaatggcgcaatcactgctcaggttcggaagcgcctgggaattgagaaaatccgggaggacggggatctccaccacgctatggatgcagccgtcattgcttgtattacccccggaatgatccagagaatcacgaaatatgcgcaaaatcatgagcgattctatgcaaccgcgaaaggctatgtggatataaaaactggtgaggtgctgacaagagcacaatatgaggcaatggatgatatccgctttccagaaccgtgggctggcttccgcttggagctggaggcccgtgtttctgatcaccctcaggaagcaatcgcccagctaaagctgccgcactatgaaaacagtgaggagattcgtccaatctttgtttccagaatgccaaatcacaaagtgactggggcggcgcatttggaaactatccggagtaaaaaaggtggggccggttcgactgttaccaaaacggcgttgactgagttaaaactaggaaaagatggagaaatcgcaggatattgccgaaaagaagatgatccgctgctttacgaagcattaaaggcacgtctgaaagcatttggcggcgatgggaagaaggcattcgcagagccgttccataagccaaagcacaacggggaacccgggccgattgtaaataaagtgaagattcaggaaagtgctacgcttacagttcctgtgaatcatggcgttgcagccaatggaagcatggtacggctagatgttttctacgtggacggtgatgggtactattttgtgccgatttataccgcagatattgtaaagccgaagctgccaaatcgcgctgttgttgccggaaagaaagcatcggaatggaaaatgatagacgacaaccactttgtattttcgttgtatcctaaggacctacttcgcattaggagcaataaaggcattaagctaaaggcggtaaacaagcacgctgatctacaagagtattctgcaaatgattgtctgtgctattacgtcggttttgatattgcgactggtgcatttacagtcgaaagtcatgacaggcgattgaatcgacgggggttaggtggcaagacacttctcagcattgaaaaatatcaggtggatgtgctgggcaactacttcccggtagcgctgcctgagaagagaatgaagttcaggtgatttgatggaatttagaaatatcgtgatagccaacgcagccaagctcagcattcaaaacgaccagctgtgtattgcacagaagcaggaagttacgatccccttcgatgatatctccgcattgatgatcgaatccaggcaagtgctggttacttctgcggtaatggagcgtcttacgtcagaaggcattactgtgttcttctgcgacgaaaagcatcttccttcggcgcagctgctggcctaccacccgtttcgtaggaagaagaaaatgttgtttgcgcagttttctttacccaagcccgttcaaaaacag

SEQ ID NO: 1985 - DNA, 16045 bp, synthetic construct
  misc_feature 1..16045: note = Synthetic
  source 1..16045: mol_type = other DNA
gccgacccagttcattgatgaagtgttcgcggtgatggccttgtgcacacagcatacgtttcagattttgaccaagcgaccggagcggatgctgcgctacttggcttataccgatcctaaggctcgtattgatgcagttataaatgagaaccggtttgacaagtactgtcggcgcgatggttgggtggaaggcatggaccggtttatcggccagtggccactgaagaatgtggcgctgggtatctctgccgaggatcaacccacattcaatcgtcggattttaccgctcatggaaacacccgccgcgattcggtggatatccattgagcccatgctcggtcttatcgacttacactttggttttttccttgatgatgtgctgtggcgtcgtcgtcatcatggccattgccttgataagccgatgatcgactgggtcgttgtcggtggggaatctggccccaaggcccgcccgatgcatccggattgggcgcggtcggtgcgggaccaatgtgtgagcgttgaggtgcctttccactttaagcagtggggtgaatgggctccccgtgatgttgccatgcaaatatatggcaaagattatgatcccaacaacgatgtagagatggcgagggttggcaagaaaaaatcaggccgtgaactcgacggccgcacttggaatgagtgcccagcatgactgccgcccgtaagcactcaccacagaaccggctctataccctgctggctgttggcaagaaagacctgggatgggatgaagatacctaccgcgattttctggccgaccacggcgcgtcactcaagggtgacaagtactcggcaacgaccatgtccgtgtcacagttggaagtggccctgcatgacatgaagaaactcggctttaagcctcgacgcaagaacaagcccgtgcacatcagcgactggcgcaaaccccgcatcgccatgctcaacggtatctggatcactatggcggacgctggcgtggtgcatgatcgaagtgaggcggccctgacaaaattttgttttaaattcacccaggtcgccaatctcagttgggccagttcgataggactcaaccaggcgatcgaggctttgaaaagttgggcacacagagaaggagtcaagttacgtggaaagcgtaatcgataaagacaatagattaccgcctcaagtccgccagttaatcaagattatcggtgtggcggagacctgtatattgcttaggcaactcggtgggacaagcatcacgattcccaatcgactacaccccttgatgtgcatccggcagccgcttaagcgtgaatcccttgaggccctgcggcgtgagtttgatgatcagcgtgttgacttgccgaaatacgacaaaattatgatggcgattcgcgactctaaaattagagaagatctagataaaggtgtatcggtcgaagatttatccgccaaacataatttaagtgaacgacagattaggaacattcgcataggcactcgcggctggtaggtggaagtgtttccccctgataatcacgtcccgaatcattcaaaatacccaacatgacaattcccagtctaatagttctgcatagttcagacagcccgaacggccgtgctgatacggtcgatgatattcggcgctggcacaccaatccaaaaataattggcagtggtacccaggcgcaatgtcctaaatgcttggcgtctgtcgatgaaaatgcgtggcgttgcaatacttgtggccagcattttggtaggggatggaaaaaggcaggctaccatcacgttatcgagatcgacggtgccgctatgccgttggttgagttgaatgatgatgagattctggagccgtgggaaatcgccaatggtgcctatggctacaatagacgttcggtccatatctgcatgattggcagggatgcattttcatacgcgcaatggttgagcctcacagatttgagttttcaataccaagatcaatttcccagagcgcaaatcgtgggccaccgcgatcttaaccccaacaaaatctgtcctggcttcgacgtggccacctggttggcgcaggggcgggaggtcttggaggggcacgttctatgagtgcctcccagacgccttccgatccgccgcctaccagtctgtgggcgagccgcaagacttgggcgttttttgtcacgctctttatcgtgacagttttgttggttaccgatcaactggataaactggactatgtacagatcattaaatatttggtgccctcgtacattgcaggcaacgtgggcgaacacgccactcgcgcctggcgcggtcgtggtttgtccaggatggattcttacgaataacttaatgaggtgtgatatgaaaaagctttttattgtaatgatgacagcgatggtggttgtgctatcgggatgcggatcagtgggtaagtcgaaagtgatcagctacaaggtgggtgatgatggcaagcccagtaatgtggtggagtctttcaaaaccaatacgctggcacgggccgaaggcgcagccaagacatgtggcgctgaggataaagataaagcgcattctggtggatggttggttgccgagattccacaggcaaacaatgccgcgcctataaaactctacactgttaaagattccgctgtggtggcgcaggagagacaggcgctggtgggctgcgtgacggcattcatggagaccacgggtaaggttattgccaaccgcctgggcgacatgggtgaacgtgcggtgagccaatttccgcttctgtgcttggtatttagaggctcctgcggtggtggtggcagtggcacaactattaagacaggtgacaagagtcaggtcacatacaccaacaagagtcccaccagcaccctaagcggtggatctaagcaattcaacatcggcgaaaaatcaaaaggcaacttcgcggatgagggcagtcagtctcagcaagatgtgcggtcgaacaaggcggcgtcgacaacgcaggacaagaacgagtctgacaactctgtctcggaagccacaccagcgccgtgatccaatggctgaaagcacaactggcatcgagggtggcaatgtaccttgccatcgccctcgcgctgtcagttgctgcccatccgttaacgtttaagctgggaaaatggcaggggattgagcttggcaaggttgagacggtggctaagctgaatgatcagtacatcaagtatcaggcagattttaaaaagcgtgaattggctgctgtgcatgaacaatatcggcgtcaattgtctcggggtaaacgcagcgacaaactgctgaaggagttgcaagatggtaagaattgttcgagtcgtccttatgatccttgtttgcggaagtttatggagttgcgagaccgcgccgagactaacggcgaactttaatcaagagctaccgcctgagatgacgcaaccccaaccacgcccttctatcgctccgcctccaagtggatcacccagtgacaatatgggtcatgccgtagagttgatagagagtcggttgcagtggggggacgatcaagccgaacggctgtgcgccgcgcacaaggccactcacggtggtgagtgtaaggttaaaacccagggcgtgaagtagtcgctgtctaccatgacacgagccaggagacacggaatatgaaacgcgatgagatgatgctgatgctaggcgggatacagagcgacctgaaggcgatcaagaaatcacagtctggctcaacccgaagactgaacagtattgatggccgtttgcgggggctcgaaataaaatctgccagaatcggcggtataagcggcggcgtgagtggtggcgtgatcagtgtcggcattgccttaatattagagtcgatgaaaagtttggccaagggtggtacgtaaatggcgcacccttctgaggtccgggacgaggtccggggtaattatgtttacaagcgcttgcctctagcggaggcagcaaatcttgctgacgtctcctataacacggcgcgtgagtggaagaaaaaagccaagacgcaaggtgacgactgggaccgtgcccgtagcgcggcccgcatggcatccgggccattgggcgatatcaccgcccaggtgatggaagattttgtgttgttgtttcaggccactgtgtcggccctgaaaaatgataaaaccctcgatccgattaaatgtacagaggccctgtctcgtttggccgatgcgtacactaaagtcgtgcgggccgcaggcggtagtgatcccaagatggccgaactcgcaatagcgatccgagtgacggacgaactggccaaatttattcgtgatcggtttcctgacaagttgccgatctttgcccagatactcgagccgtttggcggccaccttagtgaggtttttggctgatgacgtgggaccaccgacttactgacgtgggtaaacgccagttcctggatgagatcgctatacaagccgattctctgcgcaaagaaatggaggcgcagagtttagggctcgacccatcggctgatgcggtgcgtgcgcgccgcaagcgtgtgctgtcgggtgattttaagtttttcgcctacacctactttcctcatcatattcacggtgagccgtctgagtttcaagcgcatttttgcgatcgctttcctagactattatttcataatggtggggcgcgggagtggtgggtagcgccgcgtggtgaggccaagtcgtcactgttgtgtaaggtaggtccggtgtatgtgtcggtcatcgcattgctgcaacgcccggatatccgcaaggccatcggttggcgtggtgatccaccgccgttgattgattacgtggtgttcctgggcgcagaaacccggcaacctacaaagctgatggaagtgtcgaagattgagttgatgtttaatgcagcattggcaatcgattttcccgaggtcgtgggcaagagtgataagtggaaggtgggtgagtacatctcgcgcaccggggtgaagtttgaaccctttggtgccgagcaagccatacggggcacctccagtttttcgtcacgtcctggtctggcactggccgacgatatcattacggataaagaggccaagagccccactgagcgttccaatcgctggaactggttggagaacgcggccaagtatctgggtccgcccgatggcagtcttaagcttctcggtgtgggcacattcctgaacaaagacgatcccatatctcgagccaagaaagccattggccatatcgtgcatacgttcaaggcgatcattgatatgccagggcgtatggacctgtgggaaaaatgtgaagaactgatgcgcaatttcgatccgggggtagctcttgagtatgcagagcgtggtgatgtcgcgccgcttgaggtcctgccttcgtttaaatattacatgcgcaacaagaaacggatgcatcaggctgcaaccgtgtcatggccatctgttcgatctttatactcactgatgcgtgaacgtgccgataaccggcgagcatttgattctgaaatgcagggtgagccccgtagtgacgaagaccaggtgtttaccgagtggcatttctgggtgcagcggttgaaccattggatattttatggtgcttgtgatccctcgatgggcaaaggccaaacctccgatccgtcagcaatcacaatcggtgggtatgacaccaagatcaataagcttcatgtgatcgaggcatccagtaaacgccgggtgcccagtaagttgcaatatgatttgattgtctaccaacaggaatatagctgtgctgcctggggatttgaaaataacaatgcctatgaggccatgcgtcaatcatttattgatgcggcaatgcgggagaaggtgtcgctgccactggtcggtatgacagcgagtgtcgcgccggagattcgcattgattcactggaacccttcatcgtaggcatggaacccaaaatgctatttcatgcatcactgcgattactgttcgagcagatgagtgagtggccagacaaacaatcgcaccaccactttgaccttttggtggcgttgcatcttctttgggtcaccgcagtatcacgagccggtggcatgccgaagatacgcactcggcgcaatgaaaacagaactgatatgcggggatacgactgatggacgaacgttttctcaggcggctaaaaaataagggcacgctctcaaatgagattgccacgcgttccactgatcccggtttctatggggcgctgaactatctacctaacccggataaggttctcaggaagcttggcaaatcacaggatgtgtatgatgacatcattgctgatgcccacgtgatcggtgatattcggtcggtgcgatccggactcctttcctacgaatggcgtctacagccgggcggtgaatctgatgctgaccttcgcgcccatgagttgtgtcagaaggtttttagtcgcactccctacaaagggatgacttggtctgatcttatttggacgtttggcgtggccgtgttcagaggttacaccgtgcatgaggtggtgtggcaacgtgaagatcaatatttattgccgtacaagatcgttgatcggcctcaagatcgatttatattcgatgccgacaacaacattcgcatcaagacccgtagtaacttactgcaaggcgaggaactcggtgactataaatggttgttgacccggcacatggccgagttccgcaatccctatggcgtggcgttgttgtcctcatgtttctggccgtacacctttaaacattctgggttcaagtatttcgttaaattctgcgagaaatatggcttgccctgggcggtgggtaagtatccctccggaacggagaagaaagatcaggatgcgctggctgatagcctggctacgatggtcgaggatgcagttgccgccattccaaacgatgcgagcattgagttgatccaggccagcggtggcggtaaagggtctcatcatgaaacgctgatcaatatctgtaatcgtgaaatgtccaaggcactcacgtcgcaaaccctggcgaccgagattcagggcaacggatcgcgagcagcgtctgagacacaccgggggcgtgaacagtccgtcaacgaatctgaccgcgagatgatcgccgcctcgctcgatacgctttgtcactggatcacagaactcaacattcccggcgcactgccgccgaagtttgaatttttcgaagaggcaaaagtccgacaggactgggccggccttatggagaaggcgcggaaatatattgatataccgcgtcaatttgcccatgaaaaattgggtatcccaatacctgaagagggtgctgacgttatttcatcatcttccaatcaaccaggtgggggtgagttcccattcaccaggtgtaaccactgtggtggcacacatcactttgcaactggagagcaaggcgatgtgattgatgcgctgaccgaacaggccgctacccaggcagacgctttattccagcaattcggaaagcctgtagtcgatctattggagagcgttgattcgttagaagccttccgagacggccttgatgacctgtatccgaagattgacgcagaccaattcgcggagttggtgacactggccaccatgaccagtcgattaaaaggtatgtcggatgcggaggatgggaaatgagttacgcagccgaacaaggaatacttaacgaacaatggaatgctgctcacatggcagcaaacgtggaagagcaacgtattagaccattcatgcttttgaggccgcgtatattcctcgatggaaataaatggtgtgctttatatggtgacaacctgcaagaaggcgtaactggctttggtgatacaccctatgaggcggcaaaacaattcgatgcagcatggttcggtacgagttgcgcctaaccaatgcctgaaccccaactcggtgcggttccatttaatgaagcgattgaatttttccgccgcaagctaaacatacctactgatgtctggcaggacatgctcagaggcgagcatgccaaggcgttcactgtcgccggtgcaaccaaggctgatctcctatcagatctgcgtggtgagatcgatcaagccataatgagcgtcaccaccctgggtgatttccgtaaaaacttcgatcagatcgttgcaaaacatggctgggattttaaaggtagtcccgcctggcggactcgtaccatattcaataccaacctccgtaccgctgctatggccggtcggtgggaacaaatccagagggtcaaaaagactcgcccctaccttatatatgaaacggtgggggacctccgtgttcgcccagagcatgccgcctgggatcaaatagtattacccgtagacgatccctggtgggacacacactaccccccgaatggttggggatgccggtgtcacgtcaggtccgccaacaagcgccaacttaagcaagaggggataaagcttggcaaggctccaaagactacgatggtaaaccaacttgatcggtcaaccggtgaattggtaccaacgcccaacggtattgatcttggatgggactacaatattgggaaggcatacctgggacctgatgcggccttcggtagacgtgttatgcagcttccagccaagactcgtgatgctgctctggcatcgactactactgtaacgccttatttactgtcgccgtttcgtcgttgggccaagcaagcgctggcgagcaacatagcgcgaggtgaaacccgtaccgtaggctggctgtcacccaaaacagtgaatttcctagatcgccgcccaggcgctccaacacctgaaacggcactcattacaatcactgatgcccggctcaaacgcatgcagcgtgaattgaagcgccgactatcaaaagacctacccactgctgatctgatcaatatgccgttgcacattgcgaaccgaagggcggtgctctacgacatcaagaagccagctctgctgtatgtgtttggtgctggagtggaaggcaaattggggaaattcgtggtccgggtcaacttccaccacaaaggcgaaatatcgaattcaattcgatcaggcgatctcacgcctacgatcaacctagcggacaaatcacaatttgttttgatagaaggtgaactgtaaaggagaccgctcaggcgggacgccacccaggtcttaacctggcactcccgcatagatcgtcactactgccagggtaggatcgaacgactggcccggcgattttccagccctctgagcggcctaagcaggcccgtctccggttctgctacccctatattataggcttggcctttcctcttttcgacatatatcacagcccaagcgtcgcttgaaccacaattaaagccattttaatggcgatttaaagcagctttttaccaccattaagtgggttttttgccggtaatttctggtaatctgtcgcaaaatgactgttaattgtttttggggtggaatcggcggatagccacgtggctgttaggtttcccgcgttttttctttctttctgtttatctcattatcatcatcaccccacacaaatggtgcccattctgtgcccagcggctagagtactggtcgaccagtaaaatgggtattttgatcactagcctcgattgattcatggcttaatgtgggcgccctgttccatgacacattttcaattataggacaaacgcattatgctaagttttgttggtttaatgctaactccaattctaacagattggtgccagtcaagaactgaaagccaaggctgtgtttcgattggatcaataaatccgcaccaataataaccggagcaaataccgacgctggcggcctcaatcaaaaaaaacggtcgccgaagcgaccgttttgtatcggtgcaataatgcttgttaccgatagtccccaccatcggaatgcttgatacacggcaaaagtagcactatcttgtaacaatatcaagaacaagtagagaggaggaaggaatggcttaccggatgggcatcgaccttggaacggcatcaattgggctggtatgcttgcagcttgatggcaaaaatcaacccgaatctcttccctatcactgcgcacatatatttcaggagcctgtagagcccgctaaggggggtggcgttggtgcaaccaaagcatcaacgaggggttctgccaggcgtacacggcgactcgttgatcgtcgtgccagacgcctgagagatttagctgaaattttccgattgttgcaggtagagccggaaacgatctcaccggataatggcataaagctgcacgatgcgcgaagccaagcggcaacagaaccgatagagctacccgatctggcgcgcatattcttccgtatgtcaaaacgccggggctactccggtggatttcaggtaaagaaagagggcgaagaaggccaggtgcagggtggcataaatcacttaaaagaattgatgaccgaggccaaatgcgaatggttaggacaatacctgctgcaccgttttaataatggagaaacgctgaagctgaaagaagcaggactctatgcagatcgcggcatagttgaatctgaatttgatcaaatatggagaacccaggcaaaagcgcacaacatattgaacaaactgcataatggtattccgctaaaacaactcttccacaaaaccttgttctatcaacgtccattgaagtctgttacggcgatggtaggcaattgctcgttagaacccaacctgccgcgcgcacccttgtgtcaaccagctgcgcagggattccgtatcgaaaaacagatcgccgatctgcggtggggcatgggccgccggtcacaaccactatcccttgatcaaagaaccgtcattcgagaattgttgaatcaaaaagacaaagcaaccttcctgcaaatctatacggcgctggataaagccgggtacccaaagccggaacacagggcgctcaattttgaccgtcccagtcgaccggagcttaaaggtaatgtaacgcttaaggctatgaacaaactggggctgtccgaagattggttacaatgtagtgaaggcacacaaatcagcattctaaattttctggctgatattggctcacctcaggaagtagatcgtcctaactggcatttacaatacaaaggaaagaatggaaagcaacggatattttccgaaaagatgatcacgtttattaaccagatggtccacagcagtaaatttgaccgacttacaaagatggggtttgatggcggacgcagcgcctattccatcaaggcactgaaagccctgtctaaggaaatgcgggaggggctagacgaatatgacgctatagaaaaactttatccacagtctgatgaaaaacctgacttgcaacctcaccttgccatacacaaaccaacaggcaatattgtcgtcgatgttgcgcttcgtcaactacgttatgcggttaatcaagcgatagacgccatgggcggggaagcgccgatagaaactatcatcgaactcagtcgtgatatgggtttgggtctgaaacgccggggtgagattgaaaaaggcatcgacaaaaaccggcgtgaacgaaaaaaggccaaagatgatctggaggcaaacgaccataccgcgacttcgaccaatatcttccgctggcggttatggcaagaacaggataccaactgcccctactgtgagagaaaaatggggttaggcgatgctgctaacggcaacatcaccaatttggagcatatagtccccaaaagcctgactcgcgttggccgccagcaggaccacatcatgttagcgcatcgaaagtgcaacgatgaaaaaggtgaccgtacgccatggcaggcctggggccatgatagagataaatggaaaatcatcacagaacgcgccaaggcattggagaaaaaacgacgctttgccaaggcgcgtttgctcaccgtgcaggactggaaggccgaggttatcaacagcgatattatcgaagactttaccaatcgtcagtaccatgaaacctcgtggatttccaaactagccgcacagtggatgcaaacggtttgtgcggatgtatctgtcagccgtggcagaatgacggcacacctgcgccgtatctggggactgaatacagtaatcccagaggttcgctttgaaacgggcatgcccgttttcgataatgacaaacaacttatctcaaaagaagactttgaccgttacaaaccttactgggagggacacaataataatcatagtggtgtacagcgaacagaccagatgatcgaaaagcgcattgaccaccgtcatcatgttattgatgctttggtcatcgcactaacgacgcgcagcctctaccaaaagatggcgcttgactacaagaaactggctgaaagagtcagaagtggtgaaaacgtaagaatgtcacttgccgtgagacctgctttgaaaaacatgcgccagcaggcgcttgaaatgatccgctatcaccgaatttcacacaaacctgatcgttatatcggcggccctctattcaaagatactgcctacggcgtcacctgggtagaggatgaaaatgactctaatgcctatgctagacagcaattgacactgcgagtcaggctggctggtctggccttaacaaaaggcaaattggataaaccagaaacggtccgaaaaaagcttatggctattgctagccctgagacacgcaaactggttttgggcgcattcgatgctaatataagcgcaggcaaaagccctgataaagcgctggccgatatacagcatccacagtatagaacgcccattaaaaaggtgaagctactaagttattctgttgatacagcttcacgtattgaattcaccagtcgcaatcattctacagataatccgctctacaaatatttgcagaatagtggttattcctttcttgaactaacgcagccccctggtgaaaagccagtaccacgtttagttacacaacacgaagccctccaacaaaaggagcagcctataccatctaatgctatacgctttttcagaggtgacacagtagaagacacaaagaatggccagagatttattatcaaatcttttagagaacaagggttactggtgtttctcatacccgttacggaggcacgagaaattgctgatatggattcaactatgaaacaacataagctctcacagaaacaacaaggccgtcgctctgtcagtgggctaggtattgctcgtcttaaacttgtggactaatgtccgatcatcgtattttgctgattgagagtcctgcctatctctctgtggatctggggcgcatcaaaattgcaagagaaaaccagccagatagctttgttcttccaaaagacattgcgatattatgcctgcatcaccacacggttagcctgtctgttgccgtattgcggacgattgcagaagacggcgcagctataatgatcactgatgaacaacatcatcccgtaggattacaactgccacttgttggcaatcaatcactacctcaacgtctgcaccaacaaatcagcatcatgcaagcagacaagcttggcagggcatggcaacatctggtacatgccagaattactacccaggcaacgaatcttcgccacctgcgactcaagggcgcgttgtatctagaacgcctgacgaataaaatacgccccggtgatccacaaaatgcagaggcacaagccgccaaatactactggaagcatttgtttgatgctgatttcaagcgtgaaaaacgaggggcaatgggcggcattaacagccggttaaattttggttacgctgtattacgcgccatgattgcccgacaattggtcatgagtggccttaacccggcattaggtattggccaccacagccagcaaaacccctttaatctagctgatgattttatcgagccatatcggtttttggtagaacgccatgttagacaaatggacatctcatcagatgattttggcagtaaggacaaatcggagttacttgagtttgttgagaattcagttcttattgatggacaggactatcgcttgccaagcgggatagctgaaagcataaccagctattgtcgactactggaaaatggtaatgaacggctgcgcctaccggaaaacacaggaagcaaggagtaatccgtggctgtcaacgggtggcgcataatgtgggtgttggctgtttttgactttcccactacgactgctgaggccaggaaagcctatacgatttacagaaaagaattgctaagagagaattttaatcaactgcaattctccgtttatctacgccactgtcctaccttggccattgcagaatccattatttcaagattacgtaccgtcatccctgaagacggacatgtggtatattttcttatcaccgacaagcaatatggcatgactcgtgagttttttggatttcagaaagcaaagaaaaagcccgatttaccgaagcaaattgagcttttttaagaagatttcttgcagaatcaaccacttgcaatccatctagtctatcaaacattccgatggtggggtatcggaacacaggaagcccttgccttgttggagcgtgtagtctatcaaacattccgatggtggggtatcggaacaatacaacaaagcgtctgcatcggttaaagagtctatcaaacattccgatggtggggtatcggaactgccaacgatggactaacagaggcaacggaagtctatcaaacattccgatggtggggtatcggaacgagcacattgccggccgtgtcggcagcataagtctatcaaacattccgatggtggggtatcggaactctgtaacgttactttcattcgcaaaaattagtctatcaaacattccgatggtggggtatcggaacttcacgtaggtaggaccacgccaacccggtagtctatcaaacattccgatggtggggtatcggaactacaatataagtcattgttactactactctagtctatcaaacattccgatggtggggtatcggaactgttcgacacccattgattagtatctctttgagtctatcaaacattccgatggtggggtatcggaacaggttccatcgtgccctcctcgtctaggtgagtctatcaaacattccgatggtggggtatcggaactgggaagctgtagcccatggcctaacgggcagtctatcaaacattccgatggtggggtatcggaactttttttggactgctcaatagcatcatttgagtctatcaaacattccgatggtggggtatcggaacacatcccccttgggaaaaaccaaccagaagagtctatcaaacattccgatggtggggtatcggaacgatcgtaacgacgtagaagcgttgattgagagtctatcaaacattccgatggtggggtatcggaactaaagatgccccagtaaatacgaacgctggagtctatcaaacattccgatggtggggtatcggaacatcgttcgggcccatcagcagaaggatttgagtctatcaaacattccgatggtggggtatcggaaccgtggagatcgcctcgaatccttttcatggagtctatcaaacattccgatggtggggtatcggaacagtgatagcttgcatatgagcgaataccacagtctatcaaacattccgatggtggggtatcggaaccccgggatgaccgcaaagaatagtgccatgagtctatcaaacattccgatggtggggtatcggaacaccacacaacatccctgcattaaccaacccagtctatcaaacattccgatggtggggtatcggaacttgaatttataacccctgtttggaaagtaaagtctatcaaacattccgatggtggggtatcggaacttgccgacgttgtagtcccatccaagatcaagtctatcaaacattccgatggtggggtatcggaacgtcattaatgcagggggcaatcgtaccagtagtctatcaaacattccgatggtggggtatcggaacgatcgtaacgacgtagaag

SEQ ID NO: 1986 - DNA, 14775 bp, synthetic construct
  source 1..14775: mol_type = other DNA
  misc_feature 1..14775: note = Synthetic
gaccctcatcgcccgcgcgctcgcccagcaggcgggggtcgtcgtcatggacgagccgaccgccaacctcgatttcggcaaccaactgcgcatcctgtcgacggccaaggagttggccggccgggagcacaccgtcatcctctccacgcacaaccccgaccacgtcttctggttcgccgaccgcgtcctggccctgagcggcgggcgggtggtggccgacggcccgccacgatccgtcctgacgcccgatctgatcgagaccctctacggcgtgcgcgtgcgcctgatcgaaaccgaggaaggacgcgtcagttgtcaaccaacattgacttagcctggacctgcgaccatcggcggatccaggccgagacgcgggacgcgcaccgtgcccgcgtgcgcgactctcacagaaaggacaccgcgcgccatgactagatcacacacatcgaagacaatcatcgccctcgtcctggggctcggcctgacgctcctgtcgtcgtgtacgaccagccccacggatcccccctcgccgaccgccacaacgccggtgtcattcaccgacgacgcggggcgcaccgtcgaggtccccgccccctccaccctcacccgcgtctcaccatcgggggccctgtcccagatgttcctgatggccatcgccccggacctgatggtcagtctcgggtccgcgtactccgcgtccgacgccgcgtacatcccgcctgacgtggcggccctgccagccgtcggggaactctacgggtcggccaccttgaactacgagacggtcgccgccctccacccccaactggtcgtcgacgtgggcgagcccaagggcacgatcgtcgaggacatggacacgatcaccgcgaacctcgccgtgcccgccgtccacatcaccgcgaccctgacgtcgacccccgacgcgttccgcgagttgggacgcctgctgggacgtgaggacagggcggagcagttggcctcgttctgcgagcagatcctcgcccagagcgacgacgtcatggcgaaggtcggcgacgccaagctctctgccgtgtacttgctgggcagcgacggcctcaacgtcatcccgaagggctcctaccacgccgaggtgctcgacgaggtgacgaccaacatagcagtcgtccccagcccctcctcgtccgggatgggcaaccagaccgacctggagcagatcaacgtgtggaaccccgacgtcatcctcttcgcccccgccagcgcctatcccgcggtgacgtcggatccggcgtggagcagcctgtcggcgatcaaggacgggcagtactacgagacccccgaaggcccgtacaactggttcggccagcccccgtccatcaaccgctacctgtccttgatgtggctgaccaagctcctgtacccccagtacgccaccttcgacctgcgcgccgaggtcacctcgtactactcgctgttctacgggcacaccctgacgccggccgagtacgcgacgctgaccgaaaggtcccttccgcagtgacccgtcccgcggcgacccgtcccgcccatcaagactcgggacgacaatgcagtgagcggcttgtacagtaggcgacagccggtcataggtgacgcgcatcgacgatgatcgagggggtcgcgccaaccacaagggaggagaccggcacgaaccgaaaggaacgagcgtgacaacactcaccaggaaggctttcgcctcactgaccgcagtggctctcggattgacggggttgaccctgtccgcgcccaccggcgtggcggcgcccaccgagcagcccgtgcacatcttcaccttcaacgacttccatggccgcatcaagacctcgggcgtcgcatgggcgtacaccctcgagcaagccgtgctggctgactccgccaactcgatggtggtcagcgccggcgacaacatcggcgcgtccgagttcgagtccgccatcgcgaaggacgacccgacgatccagttgctcaacgacatcgccaccacaccgggcatcaacttcaaggcgtcggcggtgggcaaccacgagttcgaccaggggctctccgacttgcagaaccgcgtcatcggtggcgtgaaccccgatggcagcgccgcgccggtcaaggccgcgtggacctacctgggcgcgaacgtcgtctcgaaggccaccggcgacccggtgctcgacccgtactacatctacaccctcgacaacgggatcaccgtcggcgtcatcggtgcggtcacccgcgaagccgcgaccctggtcagccccgttgggatctccaccatcgagttcaccgatccggtcgccgccgtcaacacgtacgccgaccagctgaaggcgtccggggacgccgacgtcgtcgtcgccgtgtaccacgacggcgcgtcggtggcgacctcgctggacgacgccacggcagcgtcctcgaccttcgccgccatcgtcaacggcaccgacgcgaacgtcgacgccatcgtcaacggccacacccacctgacgtacagttggatcgacgcgaagggccgcccgatcgtcgaggcgggcttctacggctcggccgtgggccgcatcgacctcaccgtcgacaccgacacgatgacggtcacctcggccaccgcgtccaccatccccaccgtgagcgccgaccaggtcgacctcagcctcgggtcgatgcagacgatctcggaccacatcgccctcgccctggccgacgcggaccatctgtccacccagatcgtgggccagatctccatggacgcgaccaccgcccacaccctgggcgcctggcagaacggcaccttcgcctcccagcccgctctgacctatcagaacacgggcacggcggtgcgggacgaccgggctgacgagtcgagcctcggcaccatggtggccgacgcctatctggacgcggcccagtccaacccccagatcggcgccgacatcggcatcgtgaacgccggcggcggactgcgcgccgagttgctgtacggcaccgacggctcgatcacctacgcggcggccaactccgtccagcccttcgcgaacaacttgtggaccatcgaactgaccggcgcccaattcaaggagttcctggaggagcagtggcagaccgacgcgaccggcgcgaggccctcgcgtcccttcctggcgacggcggtgtcctccaacgtcacctacaccgtcgacaccgaccagccgctggccgatccgtgcacactcgaggacggatgctcctggaacgacccccgtagccacatcacctcggtggccatcaacgggttccccctggaccccgatcagatctacaagatcatgaccgtctccttcctcaccgccggcggtgacaactaccgcgtgatgacccaggggacgaacgcgcaggacaccggcctgctcgaccgcgacgcctggatcgcgtacctccagaagcagtcggacgcggggcccatcgccccgagcttcgcccgcccctcggtggtcgtgagcaacctcactccggcgacggcgcccatggacatcatgacggtgaccgctggctccccggtgacggcgtccctgtcccgcctggacctgacgtccttgggaagccccgcgaacacgacgctggtcaccatgctggcgccggccgacgcgaccgatccgtctcaggtgactgtgctggcgacgagccccatcacggcgcccggtgacgcggccggttgcgcggcggcaggagtccccacggatctgaatcccgcgtcggacgggtgcgcccgcgtggatgtcaccatccccgccgacaccccggccggtgactacttcctggtgagccaggcgttcccgagcgagacctgggtctggacggccatgacggtcgaggcggccgccaccactggtgacgactccggaacgcccgagggaactgtgaccccgccgcagaccgtcccctccggcggtcaggccgcatcggccccctggctgccgatcagcgccatgctggtgctcatcggcgtgggagtcgtcctcggttctcgtcgagcgatcctcacccggtgacgctcatctgatcatcagggcgaatgccctgggcgcctggtgcgtccagggcatttccttgagtcttgagtcttgagtcgtgggggccctcaggcgtccggggtcggcgacggtatggccgaatcctccgcctcgttggtcagggcggcaagctcgcgatgggcggcttcggcggcctcgggggtgaccccgggcttctgcaccttggcggtcagcttgcggatacgcttggccctggcgagcaggttggacaaccgcatggggtcctggtcggacgtggtgggattggacgcgatgaacgcgttgagccagcgcgcgtgggggtcgatgtcgatgaagagcgtcttcatcagcaaggtcgcggggatggcgaggatggcgccgaggggaccgaggatgtacgcccagatcagcagggacagcaccgccatcgtcggggtgatgcccacggcgtcgccagcgaccttgggttggatgaacgtctggatcaccgtgttgaacacgaagtacccgaccacgacccacagagcggtcagggggtcgttggacaacaacgccatgatcaccggcgggaccagaccgatgatgaagccgatgttcgggatgtaattcgtcacgaaggagaagaccgcccagatgagggccatgggcacgtcgagggccgccaggaggatccagttgcacaccgccacgatcaggccgaagacggtggtcacgacccagtacttcctcgtgccgcgcgcgaacgaggacagtgcccacgctaaggtcgggttgtgtcgctcccccagccgttgcatacgctcggagaagccgacggagtcgatgaccatgaagatcaggatcatcaagatcatgaagatcagcccgatgatgctcgtcagcgaggaggtgatcccgaccagagtcgacacgatggtggtgacggagatcccgcgcaactggtcgagcgcgccctggaccacggcgttggtgtcgatgttgttccgggtggcgaagtcggtgattctggagacgagggagtagaactgcgaggagtacttcggcagttcttggacgagccgtgcgatggtccagcccatcgaccagatgagcgcgccgagcaggccgatggcgacgatgccggcggcgatggaggccaggaagcgggggatgatcttcgccagggcccgttggatcggccacacgacgatgacgaggttgagcgccatgaacgcggacgccagagtcgagcggatcggctggactccctgcgccgcgatgaagacggccgccagccccagcaagagcaccaacgcgcgcggcatgagcgcttgaggtgtggcaggggtcggctcgtcttgcggggtcttgtccggttctacgatcgacatggcttcagtttgccatacccataccgtcccctgaggtcacaccacgagcgatccggggataaaccagggtaggaacacacaggtcgtcttttgacagaccccgccgtgagataccatgatgatgttccaccagatcatcagtgaatgtgggagaattggcgtagttaccgacgaccatgcgatatcccatccccccgaggcgcccgaaaggaaggccatgccccaattctcgtacaccgatatgctgccgactaccgccgatatcacggtctaccgcaagctcacaggcgagggcgtgcgcctgatccaagaggccaacggacggagcttcctcgaggtggatcccgccgccctgaccctgctggccgagaccgccttccacgacatcgccttctatctgcgcaccgcccacctggcccaggtacgggccatcatcgaagaccctgaggcgtcgaacaacgacaagttcgtcgccttggatctgctcaagaacgcggcgatctcagcgggcggggtgctgccgatgtgccaggacaccggcacggccatcatcatgggcaagcgcgggtcgcgcatcctcaccaccggccccgaccccgatgagcgcagcctgtcgatgggcgtctacaacgcgtacaccaccctcaacctgcgctactcccagaacgctcccctgacgatgttcgacgaagtcaacaccgggaacaacctgccggcacagatcgagctctacgccgacaccgagcccagccacgccctgtcgtacaaattcctgttcatggccaagggcggcggctcggccaacaagagctacctctaccaggagaccaaggccatcctgaacgaggacgcgctgctgaggttcctccaggagaaggtggccgccctcggcacagccgcctgcccgccgtaccacctggccatcgtcatcggcggcacgtcggccgagttcgcgctcaagacggccaagtacgcctccacgaagtacctggacaccctgcccaccgccggttcggtggccgggcacgggttccgtgacctggacatggagcagaaggtgctggacatgacccgcaggctcgggatcggcgcccagttcggtgggaagtacttctgccatgacgtacgggtgatccgcctgccgcgccacggcgcctccctgcccgtggccatcgccgtctcctgctcggcggaccgccagtgcatgggcaagatcacgcccgagggcgtcttcatcgaggaactggacaccgatccgggtcggttcctgcccgaggtcaccgacgcggacctcgacgccgacgtggtgaagatcgacttgaacaagccgatgcccgagatcctcgcggagttgaccaagtaccctgtgcgcacccggctgtccttgtccggacccatgatcgtggcccgcgacatcgcccatgccaagatcaaggagcgtctggatctgggcgagtcgatgcccgagtacctccaggaccaccccgtgtactacgccggtccggcgaaaacccctgaggggatggcgtcggggtccttcgggccgaccacggccgggcgcatggactcctacgtcgaccagttccaggccgctggcgggtcgatgatcatggtggccaagggcaaccggtccaaggccgtgaccgacgcgtgcaagaagcacggcgggttctacctcggctccatcggcggtcccgccgcccgtctggcccaggactgcatcaagaaggtcgaggtcctggagtacgccgaactgggcatggaggccatctggaagatcgaggtcgaagacttccccgccttcatcgtcgtggacgacaagggctcggacttcttcgccacgatcaagcccgtgacctacacgatcggcaaacgccccggcgcgtgaggcggagggtcgctgctctcctgtcgcagatatgtgtggcgcaggcctgactgtcaggcgcccagcaaggcgagggggacgacggcgacgccgtcagggcggcgatacgcctgcggacctgtgttcacaatcagacggtcgacgactctgccaggcaattgatcctgcaaccacgcgagatgcttgacgtccgtgggacgtacagtgtttgccaacttgacctcgatggccaacacacgatgatctggtcgctggacgatgatgtcgatctcgtgatcgcctcctcgcgtgcgcagatgagacgtctgggcgccagccaagtcggcgagcacccgaatggtctggacggccagagactcgaacagcgcgcccaggaacgtcccgtcacgggcgaagaacggatcgtccccctggatgagcgactcacgggtggcgccgaccagtcgggccgcgagcgccggatccaccaggtgatgcttcggggagagacccagtctcttcaggtgggcgaaccccggctcccacgccgggagaggatcgagtacccatatccgttgcagcagttcacggtaggacgacgccgtcggctgactcaggggtgggacgtcgccaggactggccgctttggcgatcaccgcgtgggaggctgacgtgccggtggctgcggcgtatgcggccagccaggtacgcaaagcagcaggtcggcgcacagaacctccagcctcgggtatgtcatggtcgacgatgcggtcgagatagctgtccagcaggtagtcccgaccggcttggccacggatgccggggaatccggactcgaggatctcatcgacatagtccgccgttgtgaccgatgtcatgcccgcgacctcccctgcgccacccgagagcaactgggcgaacgacacggatggctcggccatgccccgctccgggatcgtcatcggccgcaagagcgtccggacgatccgaccagcgcccgagtgaagacgcacgcccggtggagtcgtcgcagatccagccagaaggaagctgccaggggccgccccgtcgtccaccgcgcggcgaaccacatcccacaccggagggacgagttgccattcgtcgatgaacgtgaggggagcgcccgccagaacaaggtcaggattcaacgagagattctgggcggtggcgatgttgtccaggagaaagacagtggaagccctgcggcgggccaaagccgtcttgcccactcctttcgcgccttcgaccgcgatggctggcaagacagctatcatgtcatctagcttgtcgtctaggagtcggcgagtgtatgccatactccaattttagcatatgcgggacttctacttgtgcatatgcggatgttctacttatgcaaatgcggcacttttgcttatgtaaatgcggttattctcctgaggcgtgggaatccttgagcagcatggacctggctgacacggtgagggacacgtgatcgccccccaagcggatgggcccgatcagaggcgaccccacacaccggggcccacgctcccgtcaggggatgatgtgtcctgcgacgcggaacaactcgtaccactcgctcctggtgagcgggatctcggatccggcggcggcttcggccacccgggcgggcttggtggtccccatgacgacctggatgttggcgggatggcgggtgatccacgcggtggcgatgccagtggccgtgacggcgtacttcgccgcgagccgatcgaggacccggttgaggtcgccgaactgcgggtcgcccaggaaggccccagtgaagaacccgctctggaagggcgaccacgcctggcaggtgatgccgttgaggcggcagaagtccagcaggcccatgtcccggctgaccgactggtcttggtcggccatgttcatggcgatcccctgggcgatcagaggagcatgggtgatcgacaactgcacctggttcaccacgatggtctgggtgacgcaggtggacagcagcatgatctggccaggggtgtggttggagacgccgaagtggcgtaccttccccgcctgctccagttcgtcgaaggcctgggcgacctcctccggctccacgagggcgtccggtcgatgaagcaggagcacatcgatgtactcggtgcgcagggcccgcagagacgcgtccaccgaagcgacgatgtggtcgcggctgaagtcgaagtacgcgccggccgcgtcacggacgatcccgcacttggtctggaggcacacctgctcgcgttggctgctgctccaatcgcaggcggccgcgaacctctcctcgcagcggtggtacgcgccgccatagatgtcggcgtggtcgaagaccgtgacgccctgctccagggcgcagtccacgagggcgcggatctcatggtcgcccatgtcggcgatcctcatcattcctgcgacaacggcagacacggccatggacgtatgcggcaaggtgaaagtcttcatcggtcctcctccaggatctcaaactggttattctgatagtcagtctaggccaggatgaggacgtttccactcgaccgcaacgggcagacagaggtgtgtcgagcaatccgggtggggtcgccattccatgccccggcgagagctgagcgtgtgtcttgattgaaataccattcgaactacagttctatatcgtggtcgaatatgtctctagcatcacttaggatatgaccatgaaaacttcgccctcgcctcggcggtacagaatcggcattgacgtcggtctgaactcggttggtttggctgccatcgaaattgctgatgatgactcgccaatatcggtcctcaacatggaaacgatcatccatgacggtggtgttgatcccactgccaataagaccgcgggaacacgcaaggcggtctcgggtgttgcgcgaaggatgagacgtctctaccggcagcggcgtcaccgcctcgccaatctggacaataccattcgagacctcggatggccgatcgtcgacctggagacgatggaagacccgtggtacccgtgggtggcgcgatctcggctgtcgacccagagagtcgacaatcaagaacacctccacgaattgctctctgtcgcgatccgtcacatggcgcgccatcgcggttggcggaacccctatatgtcagtccacaccctcatggcggccactgggccgagcaagcacttcatggagctggtcgcgtctattgcgaagaccctcaaccttgatgtccacgatctggccgagaggacccttgccgagatcgtctgtatggtgcgaggcatgcctgtgcgtgaacgcgtgaaagagagtgtcaataagaagactggcgagatcaaacggatggtcttcgtggatgacccacgaaaactccggggaccagccagacttgggaaaaacgatggacgcagtcgcgttggcctcctcacgtccaaggtgcatcagtcagatcttatccgagagcttcgaaggatcttcgagatgcaagggttgtcgaatgaactcttgcatatcatcatcaccaaggtgttccaggcgaagtcccctaagggttcagccaaggagcgtgtggcccgggatgatctggataagacccagtatcgggcagaaaaggcaagcttagcctttcagcggtatcggattgtcacgattctttgcaacctgcgtgttcaagagcagtcggggcagcgtgcgctcacttcgcatgagcgcatggcctgcctggagtttctctggaacccagtggatgatcgtggccagacgatggtcgacgtgggatgggcggatgtcgctcagcgcctgggtgtcacccgggcttccctgaaggggacggctggacagactgaggatggagagcgagccagcgcacgcccacctgtgaatgtgacgggagcgtgtgttcgcgcctgtggggtcaaggacctgatccttgagtgggattcggcggacgaggcctatcaggaagctctggttgagatgctgggaaacggctctgggtcgggtgccaaccgtgacgaagtgagtcgcgccgaggagttcatcgctgacctcccggaagaccagctcgccaaactcgatgcgatcagtgtcccggagggtcgagccgcctattcagtgaagacgctgaggcgattgacgcaacgcatgctgaccaccgaggatgatcttcatgccgcgcggaaggccatcttcgatgtgcctgatgattggaaaccgactccgccagacatgggcgaacctgtcgggaatcctgctgtggaccgtgtgctgaagatcgttcaacgataccttctcgcatgtcaacgcgagtggggtgtcccgctcagtgtgaatgtcgagcacactcgcgatgggctgatgagcgcgaagcaagcacgggatgtcgatcgagagaacaatgcgagatatgaccgaaatcgtgagctcgaggcagacattgccgcatacctgaatcagaacggggtgagcgtcagatcgggggatgatgattcattcgaggagaatcccgacacgccgttgactggtcaggctatcgggcggagaaaagcggacattgatcgcatgagggccctgtctcgacaagagggcaggtgtctctactgcgggtcggtcttggatttcctgacgatggagatggatcacatccttccgcgggcgggagcgggggcgacgaacacgcaagtgaatctggcggcagtgtgtcgtccgtgcaatcattccaagggaaagcagcctttcgccgtctgggcgctcagtgggatacgccccgaggtcagtcttgaggacgcattggaccgtgtggatggcttcaggttcttcgggattgatggcgatgaccggcgttaccaagcgcggttcaagaaagaagtgaaggatcggctccgacggtccgactgtgacgaggccatcgacaatcgctctatggagtcagtgggatggatggccaatgagctgcaccatcgcattgaggcctacttcgcgaaggagaatgagcggacggaccgagtgacaacggtggccgtgttccggggctggatcacgtctgaagcacggcgtgctgctggaatcgaggacaagatcatgctcattggcggcaaagctggcaagaatcgtctcgatagacgtcaccacgccatcgatgctgcgactatcgccatgctgcgccaaggcgcggcccagagcctcgtcacacaacagaaagcccgagaggacgggttcggggatttcgacatcgcacagatcttgacggaacgtgacagtatgcatcgcgcgtacgagttgacgaccagcgactacatgctggataaggatgaccgtccacggcctgcctggactctgtacaagggcagcaatcctgaactgtttaatgcctggcagtcgcagatgcggacaatggcggacttggtccaggagcgtctgacagaggatggcgtccccgtcttcgaattcctcaggctgaaagtgggaagctcgtcagggcatgaggacacgatgaagagtacgatccgtgctcgcgtgggtgacgaaatgtcggtcgctatgatcgaccgatctgccactcctcaacagtgggtcgcgttgacgaggaaccccgacttcgaccgtgtacagggtttgccagccgacccagctcggaccgttcgtgtgggttcacagtggctcaacgcaaacgatgatcttgagttcttccccacaggcgcaggttgtgtcgcggttcgaggtggatacgctgagcttggcgccagtttccatcacgctcggatttatcggtgcgtgaagacactgtcctcggggaaagcaaagcccttctatgccatgatgcgggtgtacacgctcgatctcctgccattccgcgataagggcgtcgacgtgttctctgttccgctgcccccacagtgcatgagccatcggactgcggagcccaagcttcgggatgcgcttgcagatgggtgtgcggagtatgttgggtggattgtccccggggacgagttattactggacatgagcacacagaccacgggcgcagtggggacgttccttcagcagttcccgggaacatgttcatgggtggtacagggcttctttgctcctggcagacttcatctccggccgcggtacttggcgggggagggcgccgtctcggaagcggagaacaagaaggtaagtgagacgcgtgtggttgttcctcccagcactgaaaagattgtcagtggacaagggtatctgcctgccgtgaatgtgctcttctccgaatgcaatccccggatcatcagacgcgacatcttgggacgagtccgtgcgcggtctgcggcgcacctgcccgcgtcatggggtgttggtgctgtctctgcggagtccagcgtgtaagtgcatgaagggtgggacatggataactggcgagttctggatttcacgtcgttcgtcgggcaactcggataccagagggggcaactggtcgttcgtccgcaggaaggagcggagacatctctgcctttggcggatgtcggcacagttctcatcgggctccacacggccatggcgcctgcggtgttacaccaactggcagccttcgatgtgatcactctcatctgcgactggaacggcgtgccttctgccgctatgacagcctgggccgatcacggacgagtcggcgcccggcacagagctcagttcgagatgagcatcccccggcggaagagcgcgtgggggcaggtcatcaaggcgaaaatcctcggtcaggccgcgaacctacgggtgttgggtcatcctgactgggatcacttggcacagatggccaaactcgttcgttcgggcgatccgcagaacgtcgaaggcacggccgctggttactactggcgccgcctctttgaggggaggttctcacggaaacctcaggagggggacgctcgtaactccatgctcgactacgggtacgcagtgctgagggggtatgggatccgggccgtgatgtcggctgggctagcagccagtatcggggtgtttcatcgcggtcgagggaacgcgttcaatctcgtcgacgatttgatcgaaccattccggccagctatcgactatgtcgttgccacgactcctcacgacatgacaatcgcccatcccagcgtcaagcatcgtttggtggcagcgtccactcaggcgttcggcagtgatggatcagcagtctcctcctgcttgactgatgtggctcagcacttcggaatgtacgcggaaggagggctggaacgcttcactgttccagcatggagggggccgagcgcagattctcccatggagggatcagccctgtgagcaaaggggatgaagcagtgtggtcgctcgtcatgttcgatctggtcaagtcccgtcatgtggtgtagtttcaggcggcgatggggagtggtgtggtgatcggctgggcgggctgggtggtgtcggtggtgagggtgtggatgagtcggcgcatggagatttct

SEQ ID NO: 1987 - DNA, 4252 bp, synthetic construct
  misc_feature 1..4252: note = Synthetic
  source 1..4252: mol_type = other DNA
ccggagggcccggggaagagcgcagcgacggggtggggcggcggcaccgaatgttcgtcgccccactcccgaccgacaccgacgacacgagcggatgtgaagagcgttccgtccgcccctttcggctaggcgcgtgatagcctcagtcttgcgcgattgtgataacatggcgacgaactgatcctcagtaaccatcgcctcgttagcgatggagaatgctccagccggattcccgtcctcggacggggtccggctcttttctcgcctcttgcttggtggctgtgctactcccgttcttcgccgtcgatgcgtatccgtccgctcccggtcctctctagtccgactcgcgtcgtaatattgtgtcaatgagtcgatggagggggcggcacatgaacacgagatcaccaagggattacctcgtcgggatcgatgtaggtctcaactcggttggtcttgccgccatagaggtcgacgattccggcatgcccatggacatcctgtccatcgaaaccgtagtccacgacggcggtgtcgaccccacggcgaacaagacggcgggcactcggaaggcggtgtccggcgcggcacgacgcatgcggcgcttggttcgcaggcgcaaacagcgactgctgaaactggacgagacgatcgcgtccctcgggtggccgctggtcaacctggaggaggtctcagatccctactacccatggaaggctcgtcgagacctgctcacagcaagaatcgacgatccggaggagctgcgaaagaagctctcggtcgccgtgcgtcacatcgctcgacatcgcggttggcgcaacccgtacagctccgttgagtcgctgaaggcggctacagagccttcgcctgagttccatgccctgatcgaacagctcaacaagcgcgtgggggcagatcggttcgatacgaggaccccagtggccagtattgtctgcgcgacactggaatccgaccccagcctgcgggtacgtggcacgcgcgtccgcaaagacgggacgtcggtggctccgttgctggaaggcaagatccaccagtccgacaacgtgcgtgagctgcgccgcatctgggagctgcaggacctcccaatcgaccagttcaacacgatcgtcgctgccgtttttgcgcagcgttcacccaaaggctcagccgcagccagaatcggcaaggaccccctgcctggaatgcacagccagccgcgggccgagaaggccagtctggcgttccagcgtttccggattgtcgacaaggtggctaatctgcgtatccgcgacgagttcaatagagacggccgcgtgctcactgaagaggagcgtcgcgctgccatcgagttcttgtggacgtccgacgacgtcacctgggacgacgtcgctttgttgcttggcgtctcgcgtcgcgccctcgcgggcaccgccaaaccgaccgaactgggtgagcgtggcggaggccggcccccagtgaacgtcaccgacgcgcgtatccgtcagtccagaatcaaggagctggtgcagtactgggactcaattgacgaggtcgagaaggaagcccttctggtggtcatctccaacggctcgggctcaggcgaccaggacgatcgcgcccgcgacgcggaggctagagcagcggagtttctcgagcgtctctccgagaaggctctcagccaactggacgggcttaagctcccggagggaagagccgcttactccgcgaaaagcatgcggctcctctctcgccgcatggaggagtccggcgatgacttgcacgccgcccgcaagtattgcttccccaccattgacgaccactggaaaccgccggccgatcctatcggccagccggttggcaacccggctgtcgatcgcgtgaccaagatcgttgcgcgttatctggcggccactgagcgcatgtgggggccgccgaaggccgtcaatgtcgagcatacgcgcgagggacttgtgagcgaggtgcaagcgcgcctgcaggcgcgcgaacgcaacaggaacgcggcggagaacgccaaagcgcgggaggacatcccactggagttcctggccgccggcggtcagacgactgacgatgctctcggggagccaagcggtccgccacgttacggcgcccgccagtcagatgtctaccgctggcgggccgtccaacgccagaagggccgttgtctgtattgcggcgccacactccgttggggcgccttcgagatggatcacatcgtgcctcgctccggacaaggggccaccaacacccaaaccaacctcgcagctgtgtgccgtgaatgcaatcacgccaaaggcaagctgccgttcgcagtctgggctcggagtgagtccgccgtgtcacgtggagtgagtctcgaagctgcagtagcgcgagtagaggactacttcgacatagctgccaagaaggactcgaatcgtcgcaaaccgcacacgcgggaaggccgcatcatcaagggagctcgcgatcgccttcggcgtacggaggcggatgaggagatcgacaaccgctcgatcgaatcggtcggctggatggccaacgagctgcaccgtcgcattgaagcgcattaccgcgacgaactcggtgtctccacgacagtccgggtctatcgcggctggctcacatcagaggcgcgcaaagcggcgggcattgaacgacgtgtgactctgatcggcgatgaagaccggaaccgagccggtaagaaccggctcgaccgccgccatcacgcaatagatgccgcgactattgccttgctgtcgccgggaattgcccaggcgttggccgtgcgtgacaatctgcgggcgactgcccagatcctaggcccgtctgctgacatcgattggaagcactaccgtggtgccaatcctgatctgttcgagacatggcaggctcggatggagcgactggcacgcctgctgcaggtgaagctcgacgcggatgcagtgccggtcttcgagttcttgcgcctcagactcggcagctctgtcgggcacgaagacaccatccgccagctcaagaaggccaaaatcgaagatgcgtggacgctggaacggatcgaccgctctgcgactcctgcacaatgggtcgctttgatgcggcaaccggatgtcgacgctcgggccgggctcccggcagaccccacgcgaagactccgcatacacggcacctggttcgacccagaggacgaactcgcgtacttcccgacaggagctgggtgtgtcgccattcgtggcggctacgcggagctcggttcatccttccatcacgcgcgtatctatcggtgcacacaaccacagagagcgggcaggacgagatcgttctacgccatgctgcgtgtgtatcaggtggatctgctgcggcatgccaaggaagacctgttctccatcgagattccgccacaagcaataagccgccgcgccgctgaggggcggctccgcgaggccctggaccacggcatggccgagtatgtcggctggctcgtcctcggcgacgaactgctgcttgacatgagcagtcagctgggcagagggcaggtaggcgaggtactcgctgcgtatcccggcactgttcgctgggtctgtgacggtttcttcagcgaaagcaagatccgcctccgacctcgcgggctgtctggcgagggcttgtcggcatctgcggcggacggcgtgcggacaatcgttgcaggcgtggggtggcggccgtcagtggatgtcgtcttcggcgcgtgcaaggcgcgagtcatccgcagggacatcctgggccgcccccgcttaagctcttcgtacggcttgccgacatgttgggcgggggatatgccgtagctgaatgaggagtccaccatcgacagctggcggatcatcgatctctccgctttctccggtgaggttcgctacaagcgtgggcagatcgtcgtgtcttccgacagtggagaccgttccactatcccgctagcggatgtggcgactgttctgctcggcctcaaggtcagactcggcgcagctgttctgcatcaactcgcggagttcgatgtagtcacactcatctgtgggtggaccgggacgcccaatgcgggcatgtacgcgtggtcagaccacacgcgagcgggggctcgacaaagggcgcagacgatgatgacgcttccgcggcgcaagaacgcgtggggtcagttagttcgagccaagatccgcggccaggtgtccgtgaccacccaataatgtcgctccatgaccatcga

SEQ ID NO: 1988 - DNA, 7008 bp, synthetic construct
  misc_feature 1..7008: note = Synthetic
  source 1..7008: mol_type = other DNA
acatttttataataacattaatactaaagcagtacttgattgttttacaattgatgataaagatcaagattactacaaagatatggaactaaaagattctggttatgtttcatatgataatgaaaaccatttaagtaaagaagctaaagaaaacattatttatgcttctgatattagtgtagaaataactaatgtagatgatcaaggtgtacattttaaagtaaataattctagtaagtatgattttgaattagagagttttaatactaaaataatggctatagatagtaatgatcctaatgtaggtgaggtagaatatggtttagaagttcaagatataaatagtaaggattcatcagataaatttaatataccaaaagaaggtagtagagagttaatttttgctccatcttatgatggttatgaatttgaccctaaactagattataaaattatcatgctattttgtggaaaacaggtgtcttaatttggtataattataatatgaaaaacaaagaaattaaagtctttttagatactctaaaaaagcctaatatatatactaaattaggcttttttaatgataaattaaatatttagtagtaaggatagacaaagtctatcctttttctagttttaaaggatggttatgagtaataaggggtttagttttgaaagtaatttagaacatcaacaaaaagcagtagatagtgttattgatgttcagatggaaacaggtacaggtaaaacatatagacagcggagtgagtccaatatccaaatttatgttgggtaaactctagatattaaaaaagattggataatcatagaaagaatttagaaaaacaagatagaaattttagtaagtttaaaattatatattcagatacattaataagtctggtatatatttaattgaaactatgtaaatgagatttataaccgcggatagaaatcttaaattagttaataagaaaacaaatcaaaaacgtataatttctatcagaaagaataatacgaagctcttcttccaaatatatggaaggtattaaaggaactttcatatatttggaaaatgataatttaagaggacattttaagaaatgaattaataattaggagaagtatatgagtgagaagaaagaagttttaagaaaagaatttgataaatctaaatatgtactaggtttggacttaggagtaactagtgttggttgggcgttattagacccagctaataatcaaccgattgatcaaggggtttatctttttgatcaagcaaataaagcagaagatagaagagctgctagaagtactagaagaagatataatcgtactagatatagaaagttaagacttaaaaagttattagctgataatgggatagatttatcttctaaacctaataatgaattattagaattaagaaataaaggtttagaagataaattaagtgaacaagaaatagttgatattttatatttctttgttaagaatagaggttatattccttttgaagaaggtaaagatggtgttgaaaaacacaaaattgctaatagagaagaaaacaagaataaatatccttgtcaaattcaaaagataatcttggaagaagaaggtaagtatagaagtactgaaaacaaattcttatggggagattataaaaaagaaattagagcaatcttagaaaatcaatataaacaaggtcataaattcttaacagaggattttattaataaatactttgaaatttatgaatctaaacgtaaattctgggaaggtccaggatcgtataaaaatgttcatagtttatcgccttatggtagatatagaactaaggaagatattgaagagtataagaaagataataattatagaaagtttttatttgaagaattattaggtgagtgtaaaatatatactggcgaaaaagtagctcctaaaaataatgtatatgctgaatacttcaatttacttaatgatttatttaacttaagagttgaagaagatagaataaatgaagatgctaaacattattttacaaaaggtactttaaatatggaaggtgttgatttaatagttgatagtattttatctagtggatctactaattattcatctatatttaaaaagaactttggtcttgatttagaaaaagatgtatcaggatataagaaagatgctgatggaaaacctgaaatagcaaaattagaaacttttgcttcatttattagaatgaagaatgttaaagctaaaaaaactggcgaaattattgctgaagtaagtgaagaaactttaaataaatttaaagaacttattttagagaatccagagtattataatgatttagtaaatattcttgaaatatatccaaaaggtgatgagtgtttagatgctatagtaaatctagatggatttaaagatatgtttggtgatgaaagttatgatttagctaaaattattgatggaaaatataaaaaaaacaaatatcatagtttaagtgaaaaagcattattaacttatattaaactaatgcaagaagagtgtaaaaacagttcttgggttagcaagaaatgtgataaagtaattaaaccaacatatcataaagatttaattgataattatcctaaaaatggaaaagtatcaactcatttaattaaagggttaatagctaaccctcaggttaagaaaagtttaagcaaagctatttatattattaatactttaatggaaaaatatccgaataaaattggtactattgctatagagtctaataaagaaagtatgagtcctcaagatcaaaaagattggcataactattgtttagaaggtaacaaacaaagacaattagctaaaaagaaactaaaagatgattatggaattgaaaatccaactagaaatgatattaatagatatttattattagaagaatgtgattttaaatgtgcgttttgtaacaaacctatttcattagactcattccaaattgaacatattctacctttatctaaatctgcagatgatagttttaataacaaaacttgtagttgtaatgattgtaataacaaaaagaacaatagaactccattagaatggttaagtcaaccagaagaatttataaaaagagtaaaagctaataaaaaatttagtcaagagaaaaagaataacttattattctctggtgatttaagtaaatatgagaagaagtttattaatagaaacttaagagatacagcttatgttacgagtgaacttaaaaaacaattaatgttatttgctgaagcaaataacttagaaattggagttatgtcagttcccccggtatttacttctcaagtaagaactcaattctcaattaataaaaatcgtgatgagaatgtataccaccatgctcaagatgctatgatagtagcaatgtttcctttaactgtagttggtagattatcttataaaattcaaaataatgctgatatgttctggtctacaccttatatagataactttactaataaagatggtagagggtttagtgttaagttggatggtaaactaataaaacatgttaaagatagtaattatgataatactagaattaaaaaggataatagtattagaaaaaatgcatcattaagtaatgctaatttaaatacatatattgagaaagatggtaaatataatcaaattcgttttatcaataatatttatgagtgtgaaaataaaaacattgaagatattttaattaaaaaaccacaagatttattaatgtataaacaagataaagaaactattgactatttaataagtatctatgaagagtacaaagataaaaagattgtttatactgataaagatggaaaagaagcaacaaaagcaattaatccgtttaaacattattgtttagaaaaacattcaattgaagaaaaagattttaaaccaaatatgcatgggattagaatgcaaagaaaaggaaacaaacaacaacctgttattgttaaattaaaatatgtggtcaaagatgtttcaactccatggataattaataagtgtgatgatataaaacaaaacaaacatgtaggttatgattcagttaaacaaaaatacatcgaagtatacaaaggtaaagatgttaaaggaaaagaaaaatacttcttcttaccgatatcttttaatatgtttaagactaataaagaaggcaaacaagtacttgatagagaatcttcgtattataaagcaatgtttgatacatatataattggaaaaaatgcagatgtatcatcgttggttaaacagtttgatttatcgtctaatgatataattaaatgtgaaactaaagatggagtattattcggtcttgtgaattattttcataaatcgaaaaatggaataatattaaaagatctacacaacaaaggattaaataaatattttactcaaaatagtaaaaatgctattaagatagggtatggtaaattaggaaaatatggattgaactttataaatatttagaggaaattaaataatgagttggagaacaattattatagatgatgctctaaaactaaaattagttttagataatatgattattaaaacagaaaccgatgaggtttctgttaatttaaatgagataaagaatattattttaacagaccataaaactactataacagttagactactacaacaaattgcacacaaaggtattgatttagttgtttgtgatgattctaagatgccaaaaggtaattatttacctttaactaataattctagaacaactaagtatcgtaaaatatcttatgaatatctaaaagaaaataaagaggtattatggcaaaaaataataagatctaaaatatataatcaaatgcttaatttaaaactaataggtgaagattataatgctatatataagtattataataatgtaaaactttatgatagagataaccaagaaggaatagctgctagatgttattttgttagattttttggtgaagattttaaacgatttgatgatgatttaataaatgcttgtttagattatacgtatcaaataattagatctagaattagtcaacaattactagctaaaggtttagatccgtgtattggtatatttcatagaagtgaatataattcattttgtttaagtgatgatttaattgagccttatcgacctattattgattggtatattagagaagttttaagagaagatgattataaatatctgtcagctaaactaaagtttagactaacagatatagttaattatcaaataacttttaatggtaaaaagcatacagttgatacaagtataagtccatatatagattgtgctctaaataatgaaatagagtatcaatttcctaagttagatgtataagtcagattaccgtaagatgagaatattattaatgtatgatttaccaatgaaagagtatgagcaaactaaagaatatactaagtttagaaaattattgattagtttaggattttataaagtacaatattctgtatatactaaggttgtagctaataagaaaaatgctcctgctataattaatcgattaaaaagagatataccaagtggaggggaaattagagtattttatataactgaaaaacaatatcaacaaatggatttcttaagaggagaaaaaagtaaacaagaaactatagttggtgataatagaatagtagttattggagatttagatgaataaattaaaaataaagaagttatttaatgataatgagatacatttagataaatgtaactcattaattatatctgattataataaatatttaaaattttattatactctatattcaattaataatacttcatcagtaaaagaactaactttttctgatgaagttatactaaacaataatgagttaaaaaaatctaactttatacttttagatttaagaaatccaagtgagattattaatcaattagagtttaaaaaggatacactacttactaaatggttacttgataaaatcgataaagagattgatattgatcaacctttaacactaatagaaaatggtttatctcattttaataatgaatatgttgaatttgatatgaaatctatagaaattaataaattattagatatattatctacaattaacttcgttaattatagatttgatgatgttatcagtttatttaagaagatagttagtgaatatttatcgaatcatccagaaataacaatgtttgtttttgttgatgaatatatagatgtagatgatataaaactagataacatctatatattctctaataacttaaactatgataatttcattttgtttgaaaatgaaattatcaatcttaatgtagattcattagtagaagtggtttatgatgaatttcctgatattcttgataaagaaaatattaggttattaataaatagtaatattaataatattattaatgataataatatcaatttagtagaagaagatttagtggttatttcggttattattaaagagaagttaggtttagattataatttaaactttgatatagaaaaaatcagtaaaaaaacgtattatcactacctaaaaatggtaaaataaatatgtattaataattaaatataatttataccaatgggtgctaatttgggtactcgtaaaacaaaagtaatctatgtcaatgaaatgaaagcgttttaagatggtgctaaattaggtatgcataaaaggcaaatgttaactaaaagttttacagatttgttttaagatggtgctaaattaggtatgcataaaagacaattagcattgattaataagacaaacgagttttaagatggtgctaaattaggtatgcataaaaggtataaaatatattattaatgctgcatacctaatttagcacggttcttattataagacaatatgtcgtaattttaaggtctataaggtcttttttttattatactacattacgattatatgtagtttgaaaggcaa

SEQ ID NO: 1989 - DNA, 7146 bp, synthetic construct
  misc_feature 1..7146: note = Synthetic
  source 1..7146: mol_type = other DNA
gcttcggcgctacatctccggcgaacacttcagcgtggatggaaccctgctggaggcctgggcgtcacacaagagtttccggcccaaggacgaaggcggcccccccattcctcccggcaccgaggccatggcgtgaaaatcgtcagattttcatcgccctgctagtgtttgaacccgccgtttgtaatgtttctgggcagctatttgtaaaacgccaagcggccccatgccccggtcatggtcgagagaatcatgctgctatcgcgcaaaacctggaattgcaatgccattatctgacataatcttgtgatatggccgagattatgcgcgatagcgatgaactggtcttctccgccggacagtacgacgcagtctaccgggcagtgcgtcgtggagaactggttggcattggtccaggcgtctacacgacacacgtcgttgagccgcctgaggtggtggtacgccgtaacctccatgaaatcgccggccggctgttacccggagccgtcgtttcagaccgatcggcttaccttggcggcatacccgagcagagtcagcttttcgttgaacatccgactcgtactcgcgatctggtgctatcgggcgtaaccgtccggccacggcgcggacctggccaccatccatccgacatccgcctggcggaagggttgtggatgagcgccaccccacgcgccctgcttgaaaatctcaagccttctcgtgcgcgcagggggcttgcccggaccctgcctccggctgcaatcgagctttggctggaccggattgtgcgtactcagggcgaagaacgtctgtgcgcgtatcgcctacaggctcgcgaaatagccactgaactcggtctggaacaagaactggccaagctggacccattaatcggggcagccctgggaacgcggcgggtaaaggcatatacacccgtgcttagaagccggcaggtcggagttccgtatgatcccgatcgcatagttctcttcgagcgtttggtgcaccatctcgctgggattgcgcctgtagccagacctctcacgagcgaaaacccgtccgccggctttttgccgttcttcgaggcctacttctccaatttcatcgaaggtacggagttcacggtcgaggaagcggctcgcattgcgatcgagggagtgattcccggcaaccggccagaggacgcgcacgacatcaccggcacctatgcgatcgtgtcagatgaggaggaaatgcggcgcgtcccggctgcttttgatgagcttgtcgatttgctgcgtacgcgacaccgtacgctgctggaaggacggcacaattccagacccggcgaattcaaggcacgagagaatcaagctggaggcacgatttttgttgcgccagaactggccccaggcacgttacgagaggggtttgcaagggccaccgttctcaacgatccattcgcgcgcgcggtattcatgctgtttctcatcagcgaagtccatccattcgacgacggcaacgggcgagtcgcgagaatcatgatgaatgcggaacttgccgctgccggccagtcccgcatagtgatcccaactggttatcgcgacaactacatcgatgctctgcgagcgctaacccggacccgcaagccagaaccattggtacgggtgctggattacgcgcaactatttacctatgggatggactggtcatcgatcgaaaccgccgttgcgttgctcacgcagaccaacgcacttctcgatcctgcagtgggagatcagtcagggaggcgtctgatcctgccgagccggctcttccatgttgactaaaccgatttagtactcgcgctgctatccgtgccgtcaggtggcgtgatccttactaaggtgtaactcttccgcacggaaaaatggcggtaccgaaccgatgatctccgctttgggtaggcggaaccccggcggttatgacacgcaatcagcctcatcggggcgtgtcaaagacccgctcctcccccccgcttgtggagcaaacccaccgattcaaccgtcatccagcgatcggccgctttggccatgtctatcacggtgagcgcggccacggtgaccgccgtcagtgcctccatctccacgccggtgcgacccacacatcgcacctctgcccggatgcgaacacccggtagcgccgggtccggttccaggttcacgtcgatatgggtgagcggcaatggatggcagagcgggatgagcgacgcggtccgcttggcggccatgattcctgccagtcgtgcggttgcgaacacgtcccccttgctcaagtcaccgccaactgaatggcttcataccagccaacctctgccacgccaactcaaccgccaaagtagtcgcctcgttgctaggcttggcaaggtggtgggtgacccccggtgtccgccaacgccaagggtcatccaaccctttctacaaaaagaatgggcaccccactgggaggcgccctgggattcccgcaggaataaccctacgcagacgaagtgtccacttattggagaaagccgacaatcgccgcctaactacacctaaagtatatacgggacgggcaggcaatcgcgtcaaggaggccatcgtgatcgtatccactgaaccgggttcaccttcccccgaatacatcctcggcatagatctcggaaccaactcggtgggatgggccgccattggacttgactccacacgcaagccggtgggcatcctcgatgcgggggtccgcatcttcgccgccggaaccaacggcgacatcgctagcggccgggacgaatcccgaaatctgaagcgtcgggaccagcggcagcttcggcgacagacttggcgccaagcccggcgcaggacaacggtattcagaatcctccagagagcgggcctcttgccgctcggagaatcggtccacgaggtcatcaccgctctggatcaggatctgatctctcgcctggagcagcagggtgtgatggaccggaccggcctgtcatcgaagttgccgtatgtcctgcgcgcccgggccctcgactacacgctcaccgcccatgagttgggaagagccctgtatcaccttgctgaacgccgtggtttccagagcaatcgcaaggcctcgcccaagagggatgaggaggaggggaaggtcaagcaggcgatctccgaactcaacaaaaccatggtcgaggagggcgcacggacgctcggggaacactttgcccgtctgaatccacaccaagatcggatccggcggcagtggacgagccgcacaatgtacgaggcggagttcgaggcaatctgggcggcccaagccgcatgcaacccgtcggtcctcacgaagacactgcatgacaagctgaggaaggcgatcttcttccaacgccccctcaagtctcaatccgggttggtggggacatgcgaactggaacccggacgccgccgcgccccgaaggctctgctggaggcgcagcgtttccggatcctgcagacggtcaataacatggctatcttgaacaagagcacgatcgaagagcgccgcctcttcgctgccgaacgccaagacctatttggagaactcgatcgctttggtgactgcacgttcgcgcaggcgcggaaacgcctgcatctgggcaaagagtggacattcaacttcgaagcgaccaagaaggacacgattggaggcaacacgacctcggcgcagctacgcaaggtcttcggagaccgctgggaccaactctctgaagatgacaagcatctcatcgttgacgacgtcagatcgatggtcaacgacaaggcgctctgtgcccgaggtcagagtgcatggaaacttgatgaggcgtcggcccagcgacttgcgaaaacgcaccttgaggcgggatacctgaatctctcgcgtcaggcgatctccaaggtgatgccgtacatggaagagggcctgaccttcccagaggcccgcaagcgcgcttaccccgacgctgattcatccggagagccacacaacgaacttccgcaactcacgagtgcccccatcccggcagtggcttcggttcggaaccctgtggtagcgcgcagccttactgaactgcgccgggtcgtgaatgcagtcacccaggcgagaggaaagcccacgaccgttcgcgtcgaattggctcgtgatttgaaacggtcacgtaatgaccgggagaaaatcacaaagcagaataccgagcgcgagcgaacccgtcgggacgcggccgcgaaggctcgcgatgccggggtcgaggacccaacgcgggcagatgaggagaagtggctcctgggggaagagtgcggatggatctgtccatatacggggcggtcgatctcggcgagagatctcttcggcggagcgatcgacgtcgagcacatcatcccctacgcccagtcgttcgatgactccttcgccaacaagaccctctgctggcgcgatgagaacgaccgcaagggtcggcgctcacctcacaccgcctatgcccacacaccgcagtgggaggagattcttgaccgtgtgcgccgctttccagggctccccgggtatcgcaagtggcaacggttccagtgggacgacgcggagatcacagagcgtttttcgaacttctcggaccggcaactcaacgacacacgctacgcctcccggctggccgccgactatctcggcctcctgtatggtggacagatcgacgcgggtcgcacgcgccgagtgcaggtaggcgccggccaggtgacggcccggctgcgcgatgcctggaacctcaacggcattctccacgatggaggcgtcaagacccgagacgaccaccgccaccacgccgtggacgcagtcgtgatcgcgctgtcagctccagccaccatccaagcgctctcgcgtgctgcggcgaccgccacaagacgtttagggggcgggatttccatcgacctcaccccgccgtggccagcactcaaagatgatgtgcaggcagccgtcgagcgaatagtgccgtcacaccgagtgtcgcgtcgagtgcgcggcccgctccatgcggagacgctgtatggaaaggctgtagcctgccaggcgaccactggcagctacgagaccgttcgccacgtacggaagtcggtgaccgcgccgttgacgtgcggcgaggtcgagcgcatcgtggatccggctgtccggcatgctgtccaggccaagattgaggcggtcgggggcgaccccaggaagctcaccgataacgatccccccacgctcgctacgctcgatgggcgtttcattccgatccggcgcgtgcggatctctgatccagcccacagcgtggtcaccatcggagtggggagcgccgagcgatttgtcaagcccgggggcaatcaccacgttgagattttcaaaaccatcgacagcaagggcgatcccaagtggtgcggacgggtggtcacgctgctagaggcgacacgccgacgttcgaggaaggagccgatcgtgtcgcggcgatgggacggtgacagcaacgcgcagttcctcttctcgctcgtcaaaggagacacgatccgcaatgaaaagggtgtcttcatggtccgtaagttctcgggcctgactgctggggctggagtccagttcggtctcgtggggatatccgacgctcgcggcgatacggatgtcaaagcagcgaatgctctctggcggccgcacttgggaccgctgctggccacgggctgcgagaagatcgacgtcgaccccttgggacgaattcggcgcgcgaatgactagaaatcgcatcatcgacgtcgccgaaacaagcgcacacctacatctccaattcgataacctcgtcctcgacctcgcgacgggcgaacaggctcgtgttcctctggaagacattgcagccgtatcggtgtctcacccctcagcgtcgatctcgaagtcggcgatggcggggctggctggacaaggggtcgctctggtcgtctgcgacgaacaccatcttccggtgggaatgctgctgccactcggtgcccactacgctcagaccgagcggtttgccgcccaggcggcggctgctccccctaccaagaagcgcctctggcagcaggttgtgcgagccaagatcagggcccaggggcgcctgctcgaacgcctacgtggcgacgatgccggcctgaattcacttgctggccaggtccgttcgggggattccaccaacatcgaagccaccgcggcccgccagtactggacgctcctggtcggggaccaggatttctaccgggatcgatacggcccctggccgaacccgcttctcaactacggctacgccatccttcgtgctctggtggcccgggcggtatgcacttcgggtctccatccgtcccttggcctgcatcaccacaaccgctacgaccccttctgcttggcggacgacctcatggagccgcttcgtccagttgtggatcgcgtagttatggaacgactcggcgctttagcggggattccgggcgagttgggccgcgcggacaagcaggcgattctcgaaaccctgtacggacggttcgcggccgaagatggttctcgtacgatcttcgacctgatctcccggatgacatcttcactggccgacgtcttcgctggtggtgccaagacgctgtacgtcccggtggtctgaaacggcagatcgagacacgcctgcgtcagcgtatcgtgccgtgtggctcttcgcgatgtttgacctccccgtcgccgactggcgctcccgcaaggagtacaccagtttccgcaagacattgctgcggcagggattcggcatgctccagtattcagtctacgcccgctactgccccaacgaggattccgccgcgacttaccgacgccggatacgtcgtgccttgccgccccagggccaggtccgcctcctctctgttacagacaggcagttcgcaaagatggagatccactgctcgagaacccgcgtcagatcagagcagccaccccctcaaatgctgcttttctgacgagtgatcctggtttgcggcgcaacgaaacccgagaaggcacacgcgttcctcgggtcttggccgagggatctagtgtagctaggcggcgatcctcagcaagccccaaccactcccgcaaagcccgggaccacttgcggagtgtagc

SEQ ID NO: 1990 - DNA, 23213 bp, synthetic construct
  misc_feature 1..23213: note = Synthetic
  source 1..23213: mol_type = other DNA
gttctatttcatcttcaatgctgtggttgcattcgcaatggaacgcattgaaaagaaactgagctattaccattaagaaaggagggcatacaatgaataaggtattggaaattaagcactgcaataaaagcttcggggaaaacgaagtgctgaaggatatttctctgtctgtaacagaaggacaggttgtgtctatcattgggccttccggctctgggaaatcaacccttctgcgctgtgcaaccatgctggaaaccatggatggcggcgatttgatttatttgggagactatgccgcaaaggcggacgcacagggcaaggcggtttatgccgcaaaggaaaccctgcagggcatcaaaaagcatttcggtctggtgttccagaattttaatctgtttccccattattccgtcatgaaaaatatcaccgaaccgccgattctgatcggcaagcgcaaaaaagaggaaatttatgccgaggcaagggagctgctgaaaaaaatgggactggcggacaaggaaaacgcttacccctgtgagctttcgggcggacagcagcagcgtgtttctatcgcgcgtgcattggcaatgaagccgaaaattcttttctttgacgaaccgacctccgcgcttgaccctgagctgacgggcgaaattctgaaggttatcaaggacttggcggcggaacacatgacaatggtaatcgtgacacatgaaatgtcctttgcaagggatgtttccgataatattatttttatggatggcggcgtgattgtggaggagggcgaacccgaacaggtcatcaatcatcctcggcaggaacgtaccaaagccttcctgagccgtttccagcagtaaggaagtggtcggatggaagtgaaattcatcaaagcaagccctacggaaaatatgacgctgctcatcgaaacgcctgtagcaagagagaagcagcttgctgtggcagaaaggctgattgcctatggtagtgtatatgccgagcaggcaggctatatcgaggaagcggaaaatcccacggcagaaaaacgtctgcaaatgatggcaggggaattttgcggcaatgccagtctttctctggcggcatggctggcgaagaagaaaaatctgccgattggcgaaaaaacggaaattacgcttgaggtttccggtgcggaggagcttgttcgctgcgaaatagaacgagaaacggagcaccgctttcttggcagggtggcaatgcccctgccgcagtgcatcgaaatgagagcatttacgctggacgacgaaagaatcgagctgaccgcagttgttttcgcaggcattacgcatatccttgtccctgtgtctctttggggcgagaatgcggcaaaaaaggcagaacgcgcggcaagggtctgggcgaaggaactgccgcctgtgtttgggcttctgctgtttgatgagaaggagaaaagtctgaaaccgctggttgcggtggaggatgtcagtctcatttgggaaagaggctgcggcagcggaacctctgctgtcggggcatatctggcggcaagggagaaaaaggatattaccgtttccctcaagcagcccggcggcgtgatgcacgcaacggtttcttatcagaatggagcggttacgaaaattgaaattacgggcagtgttgctatcgtggcagagggtacggcatatttataaaaaaagcgcagatgaaaattctgcgtttttttgttatgtgagggagaaaccgtgtaaaataagtattttcctgtgtttttttggcagatagcttgacagaaagaagggatttcctctatactttgccaataagaacagcgaaaaggagtgaaatcctatggttgcaaatattccgagagtcggtatgcgcatggtgaaaacagcattggcggttgccatctgcttttttctttatgttctgcgcggagaggaaggcgtaccgattttttctacgattgccgcgattatctgtatgcagccctatgcggaaaacagcatacaggtttccataaaccgtattatcggcacactgcttggggcggtctttgctcttctggtgctgtatctgatccaatatattccctatcaggtgcgtatcctgcgatatctggtgatttcctttgcggtcattcctgtgatgtatgtgacggttttattgaagcgcacgggtgcttctgcgctggcagggattgtactgctgagtgtctgtctctctaatgtggggtatacaccgctggagggggcaatcaatcgttctgttgaaacgattatcgggattctggtttctctgggggtcaataatctgcatctgccacggaaaaggacagagaactatctttttgtgacgggctttgacggggcattatacgatgagaaaaacggtatttcgccctatgtctcctttgagctgaaccagcttttgcaggatggtctgccgtttaccattgcgacagagcgtacacccgcttcgctgatggcggatttaaaggggcttgatttgcgcctgcctgttatcgcgatggatggggcggtgctgtatgatgtgaaggataagcgataccgtgcaacaagcggactgccgaaggaatgggtggacagaatctgcaccctcgtgaaggagaaggagtatcattatttcctgaacgtagtttggcaaaatgtgcttctgatttattttggcgaatttaaaaatgaggtggaacgagaattgtatctttctaaccgccgatcgccttaccgcaattatatttatggtgaaatgccggaggatggtgttgtggtgtatatcctgctggtgctgcaggatacggatgcggatgcactggaggcagagctgagagaaatggacacagagaaggagctgcttttcctgcgggataaatcggaaacgccggagacatactgtcatttgaagatttatcataaaaatgcaacgaagaaatatatgctggagcggctgatggaggaaattccgcaaaagaaatgtgttgcctttggcagcaaccgaaacgatctttccatgctgacctctgcacagctttcctatgcaaccgcggatgccgaagcggaagcaaaggcggcggcgaagcggcagttaaaggggcatggcggcgacagcattgtgcgaaagattttccgtttgtatgagcggctgccttgggaaaagctgcccaaggagatgagagaatcaaaggaatgagaggaatgctatgagcgaattgaatgaattttccagagcggagctgcttctgggaaaggaaggcatagaaaaactgagaaaggcgcgcgtggcagtgtttggcattggtggtgtcggctcctttgcggcagaggcactggcaagaggtggcgtgggacaccttgcccttgtggatggagatgtggtaagcctgacaaatatcaaccgtcagctgattgcaacgcagaaaacgattggcagaaggaaaacgtctgccatggcagagcgaattcatgagattctgccggagaccgaggtggtggaatatcctgtggtttacggtgcggaaaacaggaatttgctggattttgcttcgtatgattatattgtggatgcgattgatacggtgacctccaagctgattctgatagaagaagcgaaaaaagcaggcacagaggttatcagctccatggggacaggaaataaatttgacccgacccgttttgaggtagcggatatttccaaaacaagcgtctgtccgctggcgaaggtgatgcggaaggaattgaaggtgcgtggcattcgtggcgtgaaggtggtctattccaaggagctgccccaaaagccggcagaatcgcaggagacgggcaaacgacagattcccggaagtctttcctttgtgccgcctgtggcagggatgattttggcaggagaggtcatccggcatattgccggcgtggatttggcataagaaaggggattgacagcacctttatttctgttacaatagtcatcatcaaataaaatatatcttcatcggagaacttgtagtcgcaattacaaagttgaaaagatgtcgagtgcgctcggttatgcaaataaccgggctgtttttttgaattgaaaaggagagaagacgtatgaatatccaattatcggatcattttacctatcgcaggctgattcggtttgtcatcccttctgttgccatgatgattctgacctcgatttatggcgtggtcgatgggctgtttgtttccaatttcgttgggaaaacaccctttgcggcagtcaatctggtgattcccttcaccatgattctgggggcgttcggctttatgctggggacaggcggtactgcccttgtggcgaaaacattgggggaaggcaggcaggaggaggcaaatcggattttttccatgctgatttattttgcactgggcttaggtgtccttctgacgattttcggcattgcagtgctgaaagggattgtgataaaaatgggcgcggatgatgccatgctgcgccactgtatgatttatggacgcattgtgctgctggggattcccttctatatgctccagaatatgttccagaactttctgattgcagcggaaaagccgcagcttggcttaattgtaacgattgccgcaggggttacgaatatggttctggatgcgctgttcattgcggtgcttggctggggcgtggcaggtgctgcggcagcaacggcattggggcagtgtgtcggcggtctggttccctttgtttattttgcaaggaaaaacagcagcaagctttctctggtgaaaacaaggctgatgggcggcgcattatttcatgcctgtacgaatggctcctccgagttggtgtcgaatgtttctatgtctcttgtggggatgctgtataatctgcagcttatgaaatttgcaggggaaaacggcgttgcggcgtatggcgtgattatgtatgtcaactttattttcattgcaatcttccttggctatgcctatggttctgcacctattgttgccttcaactacggcgcgagacggacggaggaattgcagaatgtgctgaaaaagagcctgaagctgattctgggaacggggatttcgctgttcctgattgcaacggtatttgccggcgtgctttccgggctgtttgtcggctatgatgcggagctgtaccggctgacggtgcgcggcttccatctgtatgcgatttccttcctgctgtgcggctttaatatttacggttcgtccttctttactgcgctgaataacggcgtggtttccgcggcaatttccttcctgcggacagtggtatttgaggtggcggcaattctgattctgcctgttttctttggcgtggatggcatctggtgcgccatcacggtggcggagcttgcctccatcctgattaccataggtgctttctccgccctgcgaaggagatatcagtacctgtgaagtggagaattatccctcaattcttacaattttcttagaattttatgaagaaaaggggaacttacttgcaatgagtggagatttacgctacaatcggattgagaaaagcggtgttctgttgccttttgtcgggctgcggcgcgaaggcatgaaggaggaatccctatgaagaaacaaagaaaaagcagaggattgggtatgacttttattattgtctgtctggttttatccggctgtggcgcaggtacgcaggaggcggcgctcggctctgcggaggaatatgtgcaggcggcaaaaacggcacttgcaggacaggacagctttacggcaaattttgatgccacgattgcaatgaacaacgcaggaaggggcagcatgactacgaagggaaccgtaaccttcgtgaaggagccgctttatatgaaagtggatacggatatgggctttgataatggcagccagaggtacattctttacctgcaaaagggcgaagcggaaaagaacaaggatggcgtgaatcaatatatgaattatgatggacaatggacggaaatgaccttgcagaaaaccgatgccatgaatagcgtgcagatttacaacgcggcggagaacatggaaaccctgcttgcggcggcggaaaactgcaccatgcaggagaacggcggcaaggctgtcatttccgcggatatccctgcggaaaagctgtatgatgtggaggcggcaggacgtttcttccagattgcaggcatgagcagcctttctgaggtttatttcaagggtacaggggatgtgcctgttacctttgtgctggacaaaaaaacaggcgcgccgatttcctatgaaatagatctggcgcaggccttggaaaaggtcacgaataatgtgctttcggagctgagcagtgataatgaaagcagtggtatcaccgtgcaaacctaccgcatttcctccgagctgacacagttgggcaatgtgaaggcgggagagattccggatgaggtcaagagcagtgctatcaattatgaaagagagatttccatgctggaatccgatgaataagaaataagagacaacaaaaacccgttttgcatggcgcagggcgggtttttctttgatttcagtggattttatgggaaatagggcttttattttgcacgacattcatgttataatcaaatttagtttgttttttgaacatggcggcgaaagtgccgtagcgtaataaaaaatggaatgagaaaaaggagagaaaaacatgatcgctgcacagggtgtcagcctccaatatggcggcagagtacttttcaacgatgtgaatatcaatttcacaaagggcaactgttatggattgattggtgccaacggtgctggtaagtccacatttctgaaaattcttgcaggggagctggaacccaacaagggctctgtattcatcacccccggggaaagaatggcagttctgaagcaggaccatttcctgtttgatgagtttgatgtggtagagtgcgtattatatgggcataaaagactgtatgatatccgtaaagagaaggatgcgctctatatgaaggaggacttcacagacgaggacggcattaaggcggcagagctggagggcgaatttgcggagctggacggctgggctgcggaatccaatgcggaaatgctgctgaacggtctgggggttacaaatgaattccattatgcgaagatgaaggagctgacaggcggacagaaggtgaaggtgcttctggcacaggctttgttcggtaatcccgatattctgcttctggacgagcctaccaaccatctggatatccatgcgattaaatggctggaggatttcctgatgaactttgaaaatacggttatcgtagtttcccatgaccgtcatttcctgaataaggtctgcacaaatatcgcggatatcgattatggcaagattaccatgtttgtcggcaactatgatttctggtacagctatacccagatgacacagcgtcagctgaaggatcagaataagcgcgtggagcagaagattaaggaactgcaggacttcatccagcgctttagtgcgaatgcctccaaggcgaagcaggcaacctccagaaagaagttgctggataacctgcagatggataccattaagccttccagccgcagatatcccttctgtagctttaagcaggacagagaggtcggcaacgatgtgcttttggtggatgggatttccaaaaccattgacggcaagaaggtgctgaatgatgttagctttatgattcgcccgcatgaaaaggttgcctttgtcggcaaggatgaaatcgcaagaaccacgctgttccagattctgatgggcgagctggagccggatgagggcagctttaaatggggaattaccacaaaaaccgcatattttccgaaggataacacagaatattttgagggcaacaaggacagcctgattgaatggctgcgtccctttgcaaaggaaggcgagcaatacgattccgatattcgcggctggttgggcagaatgctgttcagcggcgaggaagcgctgaaggaggccggtgtgctttccggtggtgagaaggtaagatgtatgctttgcaagatgatgatgagcggcgcaaatgtgatgattctggatgagcctaccaaccatttggatctggaatccattacagcactgaatgaggggctgacggagtataaggggacactgctgtttgattcccacgaccatcagtttgtgcagaccattgcagacagaattattgaaattctgcccggcggcatcatcgacagacagatgacctatgatgaatatatcgaggatgaaagcattgacgcaatccgcgaaaaattatcctaaacgggatatgctaaaaaaataagttctgtaagcttactgcctctgcgctttgcgtaggggcagcttttggagggatggaaatatgagagatatctttctggcaatcggattgggggttttgattggctataagggctggatacgagagaggggaatccgttggaatagcagattgcagacggtttggctgctgcttttgattttctgcatgggcgtgagtatcggcagaaatggcgaggtggtcagaagcctgccgattttgggcggcaaggcactgctgtttgctgtgatgacggcaatcggcagtattgctgtggtttatattctttccacgctgtttttggaaaaggaggggaagaaatgagccttgtgattttgattgttctggtgcttggcgttggggcaggatacctgatgcctgcggatgtaagcggctttctggatagcatctccacctatatgctgctgctccttttgttttccgttgggattgatacggggctgaataaggccgttttcacacgcatcagggaattgggctttcggattttgctgattccgttcggggttgcgctcggctccctttgcggcggcgcggtgaccgcctttttgctttccctgcctgcaaaggagggcttggcgatttccgcaggcttgggctggtatagcctttcgggcgtgctgattacggaggcaggcaaccccgtcggcggcacgattgcgtttttggcaaatgtgcttcgtgaaatgctgacgtttgtcattgtgccatttgtggcaagccacttgaattattattgcgccattgcgccggcaggggcaacctctatggataccaccttgggcattatcagcaagaacacgaatggcacgattgccgtgcttgcctttgtgaacggcattgtgtgtacgcttctggtgccgatcttagtgccgctgtttctgtaaaagagaaaaatgaaaaaaatataaaaaatgtgttgacaaaagtgtttcggtgcggtattataatcaagcgcactgagatgtgcggatgtggcggaactggcagacgcgctagattcaggttctagtgggcattgcgcccgtgcaggttcaagtcctgtcatccgcagtaattgcggaaaagaccattgtggagcacagtggtcttttttatttccaaagaagaagttgtatttctgtagataaaagaaagatttgaaaaaaagaaaaaattttatcgaaaaatgcttgacatttttctcctgatgcagtattatagtcgagcacactaagttgtgcggatgtggcggaactggcagacgcgctagattcaggttctagtgggcattgcgcccgtgcaggttcaagtcctgtcatccgcagtattgcggaggagaccatcgagaaaatcggtggtctttttttgttttccggggggagtccctatctgagagagtggattgtattttttgagaacaaaatttgaaaacgaggatgtagccgattgacaaggagagcttgacagccaagaaggaacatgttagtatgagaatacttatactataccaaaagtaaataggttactgcaataaagcccttgtgaaaacatggtgctgtaacccgaaagtgccgcgcttgtcgcggcacttttgttttataatagattatataatatttttgtgatatatgagggggtgcttttgtgtacagattaggtttagatattggtactacatcggtaggggctgcgatactaaatatagaccattatggagagccgaatagaatcattgatatgcatgtgaggacttttgaagcggcagagaatccgaatgatgggtcttctcttgcagcacctcgcagagaggcgaggggggctcgcaggcgaaatagaaggcataagcatagattggacagaatcaaagcacttatacagagcgaaggtatctacacaaaagaaaaattggattctctatatcatgcaaaaggtaatattctaatggatatttaccaaattagatatgaatcattggagagaaagttaaataatgaggagctgacaaggcttttgattcattttgcgcaaagaagaggctttaaatcgaatcgcaaaaatgaaaaaaagggttctgatgaaggaaagctgcttgctgcaactgccgataatgaaaaatatttgaaggaaaaaggatatcgtacagttggtgagatgctgtggaaagatgaacggtttgcagaaaacaaaaggaacaaaggcggggattattccaatacatttctgcgcagtcaattgagagaagaaattggaatcatttttgagaagcagaaggcattcggcagtttatatgttacggatgcattttctgaaaaatatttggagattctttttagtcaaagagcatttgaagaaggtccgggggaagaaagcccttatgccggaaatcagattgaaaaaatggttggaaaatgtacctttgagaaagaggaaaaacgtgcatcaaaggctacttatacatttgaactatttaatttgtggcagaaaataaatagtatcggtattttacaagacggcgtgaaaagacgattgacggatgatgaaagaaataaattgtttgctttatgccataaaacggagaagattgattacaagcggatacgcaaggaattggagctggggcaagatgcgctgttttctaatttaacctatggtcaaaaagaagtggaagaggtagaggctgcaaaattccagtatttgcctgtataccatgagatgcgaaaagcatttgataagataagtaaaaaccatgttttacagattagcaatacgcaaagagacttaatcggtactgcaattacatattataaaacggatgacaaaattcaacaagcacttttagaaggtaaattttcaaaagaggaaatcaatgcgattttgggaatgaaaaatttttcaaaatttggtagtttgtctgtaaaagcaatgcagaaggtgattccttatttagaaaaagggttgacttatgataaggcttgcgaacaggccggttatgattttcgggcacacaatgttgcggaaaagaaaaaatatttgccgaagcttccgcaaaatacatatgatattacaagtcctgtggtaaaaagagcaatcaatcagacaatcaaggttgtaaatgagattattaaaagacatggctctccggctgcagttaatatcgagcttgcaagagagatgtctaagtcctttaaggataggaaacgaattgagaaagagcagaatgataatgctgcacagaaccaaagaatttatgatgagattaaggataccttccatgttgcacaaccttccggtcaggatattgtgaagtataagctttggcaggagcaggattgcaaatgtgtttataccggccaaccaatcaaggcggagaatttgtttgtacccggttattatgaggttgaccatattattccgtatagtatttcttttgatgatagctataccaacaaggtgcttgttctgacaaaagcaaacagggataaaggaaatcggattccgatgcaatatgttgcggataaggaagaatatgaaattcgtgtaaacacgctgataaaaaacagagcaaaaagagaaaagctgctgaagcctatacttacagaggaagatatgggagagatgaagcagagaagcttacaggatacacagtttattacgagatttatgatgaactacatcagggattaccttttgtttgatgaagcatatgatagaaaacagcgtgttaccgctgtaaatggtcgcgtaactgcatatatgagaaagcgctgggggatcaacaaagtcagagaagatggtgatttgcaccacagtgttgatgcggttgtagttgcatgtattacgccgggtattgttcagacggtaacagaatatgcgaagcgggaagaaaatcgatatttgaataaagatgatgttgcgatgagggaaagatttcctatgccatggccggaattttcaacagaattggatattcgtacctgtaaggagccaaaagagatgttgcggaaagtgtctcttgcaaattatcaggatgtggatattgatagtatcaaaccgatttttgtttccagaatgacaaagaaaaaggtaacaggacaggcgcataaagagacgattcgcgcctaccgtgaagtagatggcaaaatgagaactgtaacaaagacatctattcaggagctgaagctggataaggacggcgaaattgaggggtattataatccttccagtgatattctgttatatgagctgttacggagccgcctgaaagaagccggcggaaacgggaaaaaggcattccctgaaggctttgtgtataaaccgacaccaaatgggggcgttgctccaaaagtgaaaaaggttaagatttgcgctgtttctaatttgaatatacccgtcaatcatggtgttgccgcaaatggcgatatggtaaggattgatttgtattatgtagagggggaaggatattattttattccgatttatatttccgatttaatgaaagaggaactgcctaaaaaagcctgtgtgtctaataaggagtatcatgattggaagaacatgaaggatgaagatttcctgtattcgatttatccaaatgacttactgcatattaagtcttctactcctaagaagtttacaaagaatattcaaaaaggcaaggaaaatgattcttttgaggcggaagaagcgtttgtttattacattaaggcaggaattggaacgggctctattacagttgtgacgcatgataacaactatacgattaagagcttgggtattaaaacattaaactgtattgaaaaatatcatgtggatgtattaggcaataaatacaaggcggcggtggaagaaagaaagtaaagaggtggtcttatggcataccgaaatatttttatatcatcaccttctaaaatcaatataaggaatagacaattggttgtaaaaacaacggaagaatattcgtttcctatggaggatatttctactgtcatgatagaaaacaatcaaagcaatatttccgttgctgctctttcggagtgtgcaagaaatggcattttggttttcttttgtgatgaaaagcatttgccttgtggaatagtcaatggatttcatacacatagcagaaaatataaactgttgcaggcacagatacagacgaaagagacattgaagaaacatttgtggtcaaaaatagttattgagaagattaggaatcaagcgaaggttctggaattagcatcgttatccggatatgaccaaattatgtcatttgcgcaaaaggtaaaactgaatgataaggataacatggaagcggttgcggctgcacaatacttcaaatatttgtttggaagcgtattttcaagagggcaagatactgtgacgaatgccagattgaattatggatatgctattatcagaggcttagtttgtcgcagcttaacagtatatgggctggagccggcccttggtattcatcaccatagccaattaaatgcatttaatcttgcggatgacatcatggaggtgtttcgtcccatggtagatttatgtgtgtatcagatgcaggagaaagaacgggattttctaacaacggaagataaacagattttataccatttaataagctgtgatgttttgtttggcacacagaagcatcctttgttttatggagtggaaaaaacagtgcagacctttcaatcgagtattgttgcgggagaagatcaattaaaattatgtgcagttttgcccttgaggcagcatgaatatgagtaagtatatgcggatgcttgtattttttgacctccctgtaacaaagaaggaagaacgaaaggcagcagcaaggtttagaagctttttgctaaaagaaggatactatatggttcaattttctgtttattctcgtgtttgcaatggaaatgacgcagtagaaaagcatacaaaaagattaaaagcaagcttaccgccgaatggctcggttagattattggtaattacggagaagcaatatcaaaatatggctgttcttcttggagtgatgtcaaaaaatgaaaaatctttttccggagaacagcttacactactataaaaagggaaaaaacaaaatgataaaaccccttggaatctttagatttcaaggggttttatcagcctattataccataccaaaaataaatagggaactacaactccccgtgtccgctccttccgcccactgcgattataccataccaaaaataaatagggaactacaactaaggctctgccctgtatgccaatggcgcagattataccataccaaaaataaatagggaactacaacttccgctcccgcagccactgcgttgtctccattataccataccaaaaataaatagggaactacaacaaggtttacaatagatattgggcggcgagaattataccataccaaaaataaatagggaactacaacaaactgttcaccatacaaaatcatccctagattataccataccaaaaataaatagggaactacaacaatatgcgtagcaccgttgccgtatgtactattataccataccaaaaataaatagggaactacaaccgttcatccggtgtcaaggtggtaaggaaggattgaatttcgatttgaaaaagaatgtatttttgggggaacaaatttttaaaaaggtgttgacaaactctttttgatacggtattatagtcaagcacactaagttgtgcggatgtggcggaactggcagacgcgctagattcaggttctagtgggcattgcgcccgtgcaggttcaagtcctgtcatccgcagtaattgcggaaaagaccatcgagaaatcgatggtcttttttttatgccggcagaataagacacacctttaacggctgcctgaaataggaatgcagtgcatatcaccgatttatcggtgtctatgatttgtcagctgttacagccgtttttctgcatgaaaaaataatgctgctgcttcagataatctctggcgtagtccagagcttccccgaaacgctggaaatgcacgatttctcgttctcgcaggaagcgcagtggcgcgagcacatcggggtcatccgtcaggtcaatgagatattcgtaggtgctgcgcgctttttgctctgttgcgatggcgtaagtgcaaagaaaaaggcaggggaatcaaaggattcccttgtctttttgaattttgcgattattcggtggtaggattcccggtgttatcggaatccccgcctgccgtattgccgacagttatgctatcccctaccttgacccacgtatccgtgtcatcaacctgaacccaaacagcataggtacctgttgtgacattgtcgaatgttgccgtatagcacctaatgggtatacggtactcgtacttttggctgccggatagggcgaagtagtaatgctgctctttactttccgtattgcgcatatctgtgccggaaattgcattattgtctatgccgtcgtaggatgttgtgctcgtcggtacaagagccacattcagagtcttaccctcattcagaaacagaacttggagcggcactgtcactgttgtatccgcaacgctagctttttcggcaagaaccttgggttggtacacccgcacatcctccgctgtcagcttcaagccaccctgcgggatataccagccggctgtttttctctcattcgtgagggaaactttgtcggacgggatggtaaatgtcactgaggttgttttgtgggggttcttttcctctctatcgaagctattcaccgcaaccgcaggaagctgctccgatgtgactgtcatgcctaaaaatacaacaaaatttggtggagtggtatctgtttccgtagtggctgatcccacggagatagaatcttgaaacaatccggaattgctagaattgacggtctcttccgcgcttatgtctgcttcatcggacactgtaatcacagaagcggttcccgtgcctttcaggcgaatatagacattagctttatctttgccggaggtaagcagtgtgggtaattcgtctgctttgctgaccggcgcaccgactgtgcaggtgtaagtcacaacctcttggccaaagttcaccgtgctaccgttggaatccgtataatttagtgctgtaacggtcagctgtacgctttcctgcacatattttatcccttgagaaacattcctttcgtcgtcgtttgtcggcagcagatagattttgtccggattcgccagtgcctcggcttccgaatttatggttctatccaactgcacccatgccgcattaagtgctgtctgcttttatttccttgtcaatttcagtgtacgactctattctggcgtccgttgtcagttgtttcttcgttgcattgtttgccacaaccgtaatggtggcttttgcggtcagtgtgccgttgctgtaggcatagccgtcggggatttttatcgtcccgacaaaggtatagctgcccgcggtatttccatcgaaggcaccatttttgattttccaatcgccgattttcgccgtaacatccttgatttccttgttatccaccaacagcgttaccatgctcggcagggattttttcgcctctgtctcgtccttgaggtcgccgacattcatctgaatctcaccgatggggttcttcaaaccgttgattgcaatcttcggtgtggatgctgtgccgccgccgccaccactactgccgcctgtgatggtgggcgcttttacccctgtggcggttaccgtctttttcacgcttaggctgctatccagcattacgccgcttgccgccacgttcggctgattgattttgcctgcgcctgtcagtgttacttttgctttcggcagtcaagccctttgcgttgttcagcagagtgataaattccgcacgggtaatgctgttgtttggcttgagggagccgtcgctgtagcccttcatcaagcccttttcctgccactcagctatgaccttctccgcccaatgccccgaaatatcattggttgccgccattgcaggcacagcgggcacagccattgccgccgccagcgccagaggcaggaatttttgggtaaaagtgtgtcttcccatctcgttcctccttttccgtgaaaatcataaaattctaattgtgatttcacattcgttatagcgggaaaaattctttttgtatatcctactaaagtaggattggaaaaaatttgtatattattttaacaggcggattcctgcttcggtttgtgtataatctccatttgttgggaaacactagcttgcaaaaggaaaagaagggacggttgatttatgagcaacaatatggatttaggctatgaaatgttttgctatcaatgcgagcagacggcaaacggcaagggctgtacgaagctgggcgtttgcggaaaaacggcggaggttgccaatttgcaggatttgctgatttttcaaattaagggtatcagttgttacggcaaggcgttgcttgcgcaggggaaggagattgacaaaagcgtgattcgctttatcgaaaatgtgctgtttaccacgctgacgaatgtaaactttgatgcggcggttcatgtggagctgctgaaggaatcgcaggaaatcaaggatacgctgaaaggcatgacaggggagattgacaatcatacggcacacgttacctataccctccccgaaaccaaaaccgaaatgctcaaggatgcacccatggcaggcattatgtatgaggatttagatcccgatatccgctccttgcggcagacggtgctgtatggcttgaagggcatcagtgcctacgggcatcaggcgagggagctggggtattacagtgacgaggtggacaatttctatatcgaggcattggaggcaattacggatgataccctgacggtagaggagctgattcgcttgacgatgcgcacaggcgagatggcgattgccgttatgcagaagctggacgaggcaaacaccgaggtttacggcaatccttctccgcataccgttgatgttcacatgaagaaaggtccgtttatcgtggtttccgggcatgatttgaaggacttggaaatgcttttggagcagacgaagggcaagggcatcaatatttatacgcatggggaaatgctgccctgccatggctacgagggtttgaaaaaatatccgcacttggtcgggaatttcggcggtgcgtggcaggatcagcaaaagcagttcgacaatctgccggggtgtattttgatgacaaccaactgcctgatgcgcccgagagaaagctacaaggaccgtatttacagcacgaatgtggtcggctgggagggtgtgaaatatatcggcaagaaggaaaacggcgagaaggatttcagcgaaatcattgcgcaggcgttggaattgggcggctatcccgaggatgaggaggcacatgaaattttggtcggcttcgggcatcatgccacattaggctatgccgataaaatcgtggaggcggtcaagagcggaaagctcagacatttctttttgattggcggctgtgacggcgcaaggccggggcgaaattattatacggaatttgcgaaaaaggtgccgcaggattgtatcattttaaccttggcgtgcggcaaatacagatttaataagctggagttcggcgaggtggcaggtctgccgagattgcttgatgtggggcagtgcaacgatgcctattccgccatccgcattgcaacggctttggcagatgcctttgggacggatgtgaacggcttgccgctgtccatgattctttcgtggtatgagcagaaggcggtggcggttttgctggcactcttgagccttggcgtgaagggcatttatctggggccgacactgcctgcatttttaagcccgaatgtgctgcagtatctggtggatacctttgatttgcgtgctgtcagcaaccccgaggatgatatcaaaacctgcttgaagcagaatatgtaagaagaaaaatcggtttcggcggaagccgatttttttattacaaaaggaagggattttatgaagaaaaagctaatcagccagttggtgtgcgtgacaatggcgctttctcttacgtctgtgtcggcgcttgccgaggaatcaaacgcagcggcggaggtaaatgagggtgctgcagagggcaaggaagaaggaaaaacagagccgcaggaagcacccaaggaagaagtagatgtatctcagggtggcatctatgctgatgcgcttttgtgaaacattcgtaaaataaaattgatttgttaaatggaggataccctctttgccaaatggcagggagggtatttttttattgcagtgccaaaatgagaacacttatcaagaaggaaaaaagcggttgcaaatgaaaaagaggcaaattataatggaatttagttagtcgcagctaacaatataaaaatcactagagaagggtggaggaaaatgaaaacaatttacagcagcatcagtaaaagagtattcagtctgcttgttgcacttattatggcaatttcgacagttccttttgcggcagcttcgacatttgcgcaggaacagggaatttccatcacaacaagcaccattacaccgaatacaaaatcggttgaggttacacttgcacaaggcattacagccggctttgcaaaggtcatacagcttgacagcggagaagagtatgacacgactaaacttttcagctatacggacttgagcggtgtgattggatttgcagctttgaacaaaggaagcaatacgattacgcttacaacagcaccaacggaaggcaaagaggtaatagcggtactgcgtgatacatcaagcggtaaaatgcaggaatatacttctgcaccgattacggtcactgcctccggcacttcttccggcggagaaacagccaaaccgacacaggcggaaattttggcaggctgcgaggtaacaatagatggttttgcagagggaaaaattacagaggatgcaacatcccttacggcaaatgtgaacctgcacagcagtgtgaaaagctgctacatgattgttgcggtatatcccgcaaatacagtctttgatcccgacagcaccgccacaaagcagctttattcggtacgggtggaaaacggaaaaagctatacctgtaatttcgcagagtcccttctccctttgaaggtggggcagaaggtatgcgcttatctgaatgtgcctgttgcagaaacggagaatgatgttttttacaagcaaaagcaatcccgtgagcttacggttgtggacaaaaacggcgagggctttcgggattacacatggcccgaagtaagcattgcggataaggatttaaaagcaggcgataccaagctgcacatcaatttttccgcagatgggagattgcttgcatatgcaaaggatgaaaatgtagatttcaatatgacagtttccatccagcaatatccgcaggataaaacattcgactttgaaggcaactatatgcgcagattgacgattcccctgcagtttacggaaaatctgacaaactatgaaatcaaactggcggaaccgcttctggcaggctatcgtgtgcgtgccgttgtatattggaaccagaatacggcgctgtatatccccaaaggcaatgactatgaggcggcaggcatccctgatgattccgttttgattcctgctgtgcctgttgcgccgacagtgaaaatcaacgcagataaaattaaggcaggtgcgagcgcagtaagcgttgtggttgccggtgatgtggaagaaggctctaaccttatcatcagacaatatgcgtctgcggatgcggtacagggggccgattgggaatttttcggcagcaagagtgtttccgaagcaggaatggtttcggtagagaaaaattcctacgggaaggaattggaaggaggcaaatatgttgcggcagtgctgatgaagggggcagatgctgttgcatattccaatgcggttcccattgtttcggagacagagatagaaaagcccgtactgacggtgaacgggaatgtatatgaaggggataccaaggtaagccttgcggtgagcaaaacagatttgattccttccggcaagggaacaataaacttgtataaagcggatgcagaaggaaaggttgaggtatggggggaattggaatctgttggtagcaaaagtcctgttgtcagtggggatgctgtagaaatcgcccttacaaagactttaacagcaggggatatccttgttccttatatctattactatgatggagatgcagacagacagtattattaccccggcacagcctttacggtaaaagcgaaagcagaaggggacagcatcagcgtttcccccgaagcactcacagcagatacggaaagcattacggtttccgtaaacggatatgacagctataagggcggctatgtgtttgtaaggcttgcagacagaaacgatacagatccggatggtgcggcacccctcaagagtcagagttttacgggaagcggcagctatacctttgatgtaaagggaaagcttacgcctgaaaaatatgtattggtatatctttacaaatgggattctgacactgacagaacccattacagcgataaggtttatattccgattggcggcaaggtggtaaaagagccttctgttgaaattacctcctccaaaattctttctacggataagaatctttatgtaaaggcggatttcgacaatgcgcttacaggcaatttgaagctgtatacctaccgctatggtggtgcatttgacagtgcaaatgcaggaaatgttttgctgtattccggtgcggtaacgccttccgcatacggcagtaaaattacatttaccaatgatttgacggcaggagataaaatcgttgcggtgcttacgctgacaggcggcgcaagcgaagtggtaaaaatctccgatgcaaaaaccattcaggcaccccctcagattatagaaccctctgcttatatcagagaggagcatgtatccgaaggcgatacaaagatggaaacctatctgaactttgaaagaaattattatgattctgtaagctatgtactgtataactacacaggcgaggaattggatgaaagcacagcaaaaattgcggcagaaagcagaatttacagccccggcgtaacaaacatgggctttggaaaaagcgtaaagccgctgaaagcaggctccaagctgatgattaagctgacgcttgtgaaaaacggcgtaagcaaagtggtatattccaatgtgaaaaccgttgaggcggcacccgattgggcaacacctaccgtttctattgatgttgccgcagtcaaagtgacagatactaccattcctgtaacagtgacatacgatgcaggctatacggaaatgagcgactattattgcaacgtaacagcatatcagttcccctccgactatacagatgatgactttgagaagaaggagctgcatgaaagccagattacacagcgtatcggtcagcgtgatgcgaataaagcaagcaaggagcatttcacaaccatcaatattcccgttaaggcgaatacgcttgaggcaggaaaacgattgattgtaaagcttagactgcctcatcctgaatgggcaggagaggaagcggattatctttcctattccgttcccattattggtgcggaggaagaaatccccgcagcaaaggtactgctgttcaacctcggtgcggataccgtaaagggcagcaaaatcagagcaattctggaggaaatgggaattgcggcagttacggttgaaaaaagccagattaaccagtccgttggatatcttgcagggtacaaaggctttgtagggaatgcag

SEQ ID NO: 1991 - DNA, 5512 bp, synthetic construct
  source 1..5512: mol_type = other DNA
  misc_feature 1..5512: note = Synthetic
catacttagtaatcctcttgagcttgctcaatgaaactaagtcttttgcgcatcgaaagatgcgttttttttacaaatgtagtaaatttaattaaggataataatagaatgaaaaataatttttttattccaagtttttaatttagttttgcatactcaacttgattctattaagggaaaataatagaatggttgcagtttgaatgatttttcctggttgtttttacgcaaccaggaaatttaaaagtaaataatttaatgagattttaaaaataagctgataaaacaaaaaagccggaaagaaatggaacttcttaccgactattattttaggaaaaatatttggcttcgcaacctcatgagaagggtttatcccccttccattttccttttacaaaggtaactctttacttgagttatccataagttcttggctaaaagtctgccaatctttaaaatgactttacaaactcattaaaactatgagtaaaatgcatttaagtaaagctacgcatacaagtagcacatgttataacttaaacaaaaataataatgaaatataataaaacggtgagcggttattcatttaacctgagcaccattaatttagtgtgggaaaaagcccaaccaatggctggagacgatgaggatatttggcgaaaggatacctgcggtgctatcataaaaaggagtgaatatggcaatacaaattcgtcttatggttgggagattgatcacattaaaccaaaaagtaaaggtggttttgatacttcgaataatctacagcccttgcaatgggcaaacaaccgctataaaggggataattttccagaatggttttgtaatttaagagattaggcctatttcaaataagtgagtaagcaaaattactcacttatttttgttgatatattatgcattacgtacatttatcatttaaataattaataaaactatttttcatgctcacttacggcttcgatttaggcaccaactctattggttgggtagttattgaccaaagcaaaaaagaaaaaattttaggtgcaggggtaaacatttttcctgaaggcgttaatagggataccaaaggcgcagaaatatctaaaaacgaaaaacgcagattgaaacgacaaacccggcggcaattttttcgtaaaaaattacgcaaagccaaattagttgaactcttagttcgccaccaaatgtttcctgatgtggaggctttatatgaaactacttttgacaagcctgttccaaaatttaaagtcgccttatttgaactgctgaatttggaaaccttgcccgaaccgttattagatttcttttataataatggacaaaacaatccttatttgcttagagataaagcggtaaaaggagaacagctaagtaaactacaattagggcgtgtgttttatcattttgcagttaggcgaggttataaagatagcttgcaagcaccgcttgaagatggaaaaactttgcgaaaaggcgaccccaaaattggcaaaacaggcattgatgaaactcaaaagctaatagaccggcccgagcataaatcttttggttcggctatgtatagcattgatccggaaaacccaaataacaaaaataaagcggttgaacatagaattagaaaccggtataccttaagaaattggtttgttgaggagtttgatgcgatatgggaaaagcaaaaagctttctatccaaatttgttaaacgagcaccttaaaaatgataaagaatatcatctaaaagacatcatcttttttcaacgccctttacgtaaccaaaaatttttattaggaagttgcatttttgaaaaacagaaaccaaaatgccgaaagagtgctttacattttgaagaatttcggatgcatcaaaccattaacaacattaaaattaaagataaaaagttaaatgaagaacagcgattgattttaaaagatatgttttatactaaaaaagactttaaaacagaagacatcttagaaaaattaaaaatagataaagaagatattaacctcgccgaaaagcaagccgttaaaggcaatgaaacacatatcggttttgcaaaactttttaaaaaagatgtttggaaaaaaatgagtgacaccgataaggagcatgcttggcatataaaaataaacgcagatgataaggcgaaaacaattaaatatatcaacaaaaaaaccaagtggaactttaacgagaaacagtttaaacaattttttgatttacgattgaataaagattttgccagtgttagcactaaagccatcaaccatattttaccatttttaaagaaaggttatttatataatgatgctgttttattgggtggttttgtaaatgcattaggtaaagaagaatggaacagttgggataatgaattacggaaagctaccgaaaaagaaatagttgaactaattaaaaacccaactggtgaaactattaaaaagaagctgcaagagttttgcttagaacgttttaattttaccaacaaacaattaaacaaactatatcatcatagcgatttagaacttaccaaaacaacaggtagtttgccaaaagatgatgagctaattaacaaagtacgcaaccccttggtggctaatgctttgtttcaacttagaaggttaaccaatgctttggttaaagaatttggtaagccatttgaaatacgtgttgaaatggcgcgtgagttaaaagcatctttaaatcaaagagatgaaattaggtttgggcaacttaaaaatgaagaactaaacaacaaagcgaaagcaactttagacgaatacaatttgcctcatacgcccaaaaatataagaaaagtattgttgtttgaagaaatctataagcaaaatggacaggcaataaatccatttagtttaggtgaaggcagtaccgaatcttttggtgtaaacgacatatttcataagatgcaaattgaacatattataccctactctcgctcacttaataatagtatgggcaatttaacgctgtgtgaccctgatcgcaaccgcaataaaggtgacaaaaccccttacgagtatgcaatggcagtaggtaaagattgggaaaccataaaaaaccaaatttttaaagtattgccctacaaaaaagccaagcgttttatttctgaagaaaatattgttgatgaaagttttattagtcgccaattaaacgatacccgctacattgccaagtttgccaaagaatatttgaaacacatttgtacaaaagtaaatattacacaaggtggggcaacggcatatttaagagatatttggggtttgaacagcatcttaaataaaacctttgttttgaaaagcatttataatgatggcgatgaatattttgcagctttaaatgaagcgaacgaactaatagaaagttctttaattgaatggcagtatagcgaaaatgataaagaaaacaagaaaattcaaaaacaattattaaagcaaggcaaggtagtgcaaggggtaattagaaaaggaaagtttataccaaaaaaaattagagacgaccaccgacaccatgctgttgatgccattgcggttgcttgtaccgaaaaaaagtttttgcaagaaatatcatatatgcacgggcagtacgaaagaggcgatcaagcaaaaaaagcgatctctaattttccagagccatggcttggcttttatcaagatgccagaaaggctattgataatattctaatttattacagggtaaacaataaagtattaagcaaaacccgcaaaaaagtatttgataaaaaaacagcaaaacacaaagagaacaaagacggtagcaaacgctacggccaaggtataactgcccgcggccagctgcacgaagaaaccatttacggcaaacgcaaagcaccatttgaacaatcgcacggttttcatattcgtaaaaatttggcggatttaacttcggctatgttagataaaattgttgaccctatagttcgccatcaagtatatgaatttgcggctaaccacccaaatgctgaatgggatgctaaaggaaaactgaacataaaaaaagtagaattttttaaatttgatgaaactgaaaacattagcaaacccttagtttttatgcctcaaaaaacagacaagaaaactggtgaactaaaacctaaaagacctattaaaaaagtacgcattaggcaagaatcgtcaaacgccatcaaacttaaaaatattaaccaatgggttgagccaggcaacaattatgcggttgttttgtatgataatgaagatggcaaacgctatggtaaagtaattactttttgggaagctgttgaagctatgcgcaatgggttagaccctattaaccaaaacgtaaatggtgaatatttaatgcatctaaaaaaaggagatatggttttgatggattatgaaagtttggattttgatggtttacctgataacttaaagttgtctaaaagtttatattatttaagaaagttcagctcaagtggtgggcaaatcaaattaatatttgttaaacacaattactctaatgtagaagttgatagagctaaatttccaatagtaattagaaaagtaccaaatactttaaaatgtattaaagtagaaatttctttaactgggaaattggttaggccgaaagtattgtaaataatgatgacttaatgaaacctgttgccttggtgttacatggtgtttttgatttgcaagtgaacaggttcacttggaagtagtaacaaaaacacccaacaaagaatgatggaaattatttttttaacataaaacaaaatgcttatacttaaaagaaccataatttttgacagagcggtttatttgagtaccaaagatgaacagttaattgtagaaaattgtaaataatgatgacctaatgaaacctgttgccttggtgttacacgatatttttgatttgcaagtgaacaggttcacttggaggtagtaacaaaaacacccaacaaagaatgatgaaaattattttttaacataaaacaaaacgcttatgcttaaaagaaccatattttttgacaatgcggcgtatttgagtaccaaagatgaacagttagtagtacgataccctgatactgaagcgaaccgaaccgtacctattgaagatattggctatgtggtgctcaaccatccgcaaattacccttacgcacggcttaataccaaattggccataaaatgtcacacaaatttagttttaatgttggcaatcttttcgttaaaaatactcgccatagctaaggctatgcctgtgttttttgcctcaatcttaccaaattaaattctaaattttagtgtaacatcttatacccaaattggtataatacaaaagttaagtgctaataattgcgctgttattatttgtaatgaaaagcatttgcccgaagcgatgctgctaaatttagacagtcattatattcaaaacgaacgtttccgccaccagttggcggccagtgaaccactgaaaaaaaacttgtg

SEQ ID NO: 1992 - DNA, 18274 bp, synthetic construct
  misc_feature 1..18274: note = Synthetic
  source 1..18274: mol_type = other DNA
ggtcctggcggagttcacgcgcctgcccatgcatggcacctggccgacgcgcacagtgggcgtcgtgctcgctcccgcaaccaaaaattccggttattagttcagcgcgcacccagcatttgctccgcgcgcgacacgatgccttccaccggccacaaacggccgattccttcgtaaccgcaggcaagcataccttcttcgggtccaataaactccgctccgcgcgccgtgagcgtggcgacattcgccaccgtcgcgggatgcgaccacattttgccgttcatcgccggcgcgatcaggagcggtgcgcgacaaaccagatgcaacgagctcaaaaaatccggcgcgagtccgtgcgcgaactgcgcaatcacatccgccgtcgccggcgccacgagcaagagatccgctttgtccgctagctccacgtggcccggttgccaaccattgccttcgctccagagatccgtcgccacgggttgccgcgcgagcgcctgcaacgtgagcggcgtgataaatttctgcgcggccgccgtcatcacggggaaaacctcggcgccttttttgcgcaactgactggtgagctccgccgctttgtaagccgcgatggagccggtgataccgagaacgattttcttgccgttgagcggtgacgacatgccgtcagggaacgccgacgcccgcgcgtccgcaagcgtcgaaacgcttgcccactcagttgaccgcttccggcccgggcggaggcggcgccgtctcgccccgcggaggaggcggcgggcgctcacgttcgcgttcatgcggtggacggaagcgaccgctgccatctccgtcccgctcgcggcgctcccgcaactcgcgcatgcgcagccgttccgcttcgcgacgtttcgcgcgatgctcttggaacaacgtgcgctgctccggcgtgagcaccgcttcgaaggcttcgatcatgcgctggttgacggcctcaaattgtttccgcacgccgcgctgctcttccatgaagcgcgagaacaatacgcgcgtctccttcttctgctcgggcgtgagagcgagcgcttcgccgagttcgcgcgtctgctgcaggatgaaacgatccgcgcctttgttggaaacgaaacgttcgtaataacgaatcgacaacgcgccgcccgccaccgcgccgcacacaaacacgcccgccagaatcaggatgatgtgaaacggtttcttcatgcggatccggcgtcgatggtgtccacgacctcctcaggcgtttcgctcaaagcggcggcttcgttttcgattgccgtgatgaccggcttgaaagtcgccgccgcacacgccgcggcgagcacgcaagaaacaccgagcgcgcgcaatccgtatcgtgagaatagtgaagcatccatccatggcgcgcgcccgcccagggccaaggccgccactcgcgtcgcaaaaccatacggtgccgcttcgtcgcgcgtctcgcgcggagcgcggcgggcgagcgacacgaggcgggaccattccggaggattcgtgctcatgagcgttccttttgtttcagttgttcaaagagtttcttgagtttgcgacgcgcgcggaaagcccgaactttgatcagcgtcgtattccagcctgtcagctcacggatttccaccaacgttttctgttcgagatcgagcagttggatcacgagccgatcctcgggcttcaactgatcgagcagcttggtgaccaattcgcgcgccgccaacgcatcgccggcatcggccgcactggtgtcggagaggacattatcgagcacctcggcctcggtctcggacagatccgcccagcgaaattcgggacgacgtttctgcgcgcgcaaatgatcgatgcaggtcgtcaccgcgatgcgcgacacccaatgcggaaaaggcaccgagccctgatactgctccaggcgcgtgaacattttcataaatacctcctgggtgagatcctcctccaaaacgcgtcgcggcaaatgcccccgcacaatgcggatgaccagcggatggagatgctcgaccagctgccgggccgcctcttggtcccgtgcacgcacgcgctccaagcaggcgccaagatcgaaatccgcgtcggcatcaacggacatagggcaatggtgagaccatcatacacgcctctttagacgtgtgttccccgcgtaagttaccccgcaaacaatttggccgtttttcgttcaacgcccttcctccaccacaaaacgaaaccccaccgcgcgcgatcgctcggccttaggtgcagtcttcacaatcaattccccgtctttcatgccactcagcatacccgcctcgcgggcttcgacgagcgcatcgagccattcgctcacaccgtcactcaaacccacaaacgcatccggcgttttcaccgcgagccgataatcctccgcgcgaggcagacgcaccggacgccccaacagccagccgagcttgcggcaaaatgtctgcgcctcgctccagttcaccgagtccaccggaccggactcagcgatcacgcgactcggatttctccccgcgatttgtgtgtagagctcctgcgaaacttccgtgctcaacaggcgccgcgcgctgcccgcttccggcgaagtttccgccaaggcgagcacgcgcaacgcatcgcgcaatgtcgcatgcaaggtggccaacgtttccacatgagccgcgcggtactcgatgcgttcgcgcaatcctcggtcgagtcgcttcgagcggggaaacgttccccacacctgcgccgccagctccgcgctttcatggatggctcgccgcgcggcgtcgaagtcgcctttcgccaaggacgttccggtgtattcatcgatcgaatacaacttcgccagcgcttccgctgataacgcggtctgtcggttttcttcccattcttccggcacgcgactcgtcgcatggcggcttcgtgggaaatgggcattcagacgttcctgcgcttgctgagctgccgcccacgcctgcgccgccgcgtccatccgccctgccttctccgacacgatcgcacgttccacttgcgatcgtatctcgcgcgcgagatcgcccgatcggagcgtttccaactccacttccatctccgcttccgcaccgctgttcgcgtagggggttcttggatactcacgattgatgcgggcctgcaacgcgcgcacttcggcaaaggccgcctgcacatcgtcccaacgatgttcctccgcggccatctgtgcgcgtgcacgcatctccgtgaggcgcatatgcaacggctgcgcttcaagcgtttccacgtcgagccgcagacgactttcgcgcggcagatctttttgcgaaccgctcgcctggctgcggttcaccgtttcaagcagggtcaacgcgctcttcatcttttccagcgcgccttcccaatcacccgcttcacgcgcttcgcccgccgcgtgttcgagttcagaaactctccgcaaatcatctgtcaccgcgagctcgtcgagcgcactctccaaagcctgcaatcgctgaaactccggcggtgatgcgtgcgaatcgcgtcgtacgtattcgcgttgtttttgcactgcttgctcgagagcgcgacgagcctcgtccatgcggcccgccgccagcgcttcacgccaactggcctcaagcgcacgaaattcctccgcgagttgcgccagctcctcggcatttctttgcgcgacggccgccgctgtttccgcgcgccgctcgcgggcgttccaaaaataaaccgccgcgcccaacacgagcacaaccacaaccgtgatcagccccgtacgggagcgtttcggataaaagtggtcactcgaggtgtcgtgatcggacatgcgtttcccgggagaaaaattccccgcccgcaaaaagcaatgcctcctccgctagcccgcgctcaacgcccgcaggctcgacaatgtcctccggtttccgttttcacgggtcgtcgtgctcgaccaactcaccatcctcgctcccggtcttctcggtggctccgttgccatggccgcacgcgctcgcagcgccgcgcgtcgcatcgtcatctgggcgcgacgccccgaaacgcgtctcgcgctgcgcgaccaaccgtggtgcgacgccgtcgccgactcccccgaagatgccgtgcgcaacgccacgctcgtcgtgctcgccgcgcccgtggaaaaaatcatcgaactcgcgcgccagatcgcgccggcgctacccaccggcgcgatcgtcaccgatgtcggcagcgtgaaaggtgaactttgtcgcgcgtgttccgcggccatgcctgcgcacgcgattttcatcggttcgcatccgatggccggcagccagaaaacgggctgggaaaacggctccgattcgctcttcgacaaacgcgtttgtttcgtcacgccgctccccgcccccgacgacgcagcatcggccgcgcgggaccgcgcgatagaaaccgtcgcccgcttctggcgtgcgctcggcagcgcagtcagcaccgtcacgcccgacgaacacgacgagatcgtcgcgcacatcagccatctgccgcaggcggtggcgacgagtctgtgcaattttctcgcgcaaaaaaatcccggctggcgcaacttcgccggcaacgggctccgcgacaccacccgcatcgcggcgagcgacgcgacgatgtggatcgagatttttcagcaaaaccgcgacgaagttctccgcgcgttgagccaattccaagacgagctccaaggtctccacgccgccctcgccaatcgcgattggatcgaagtccgcgcccgcctcgaacgcggcaaagcctaccgcgacgccttccgtccgtagttcccactgcggccgcaaacgcgcagcacgcggacctttaataaagcaaaaccggcaccttttcaggagccggctttaagaagcgctgttgaccacggtgtcactgcctagcagtgagttagacgggctgcgctcacttactttgacttgattccgcagccacaaaatccggaggaaccccatggtcgcaagcaaaaatccagctcgtttagaactatcgttcgacatcggtcacagctccattggttgggctgttcttagcatccccacggcaacgcccctgcccgatatcctcggctgcggggttgtcacctttgaaaaagatggcgcgctcgccaaccagcgccgcctccatcgctcacaacgccgtcacgttcgcgccacgcgtctccgcatcgcacgcatggagaaactcctcgcgcatctcggcgtgctgaccgccgaacaactcgccgctaagcatcaggcttccggtgggcatcctgtcccatggttgctcgccgctcgggtgctcgcgtccgacggggcgcagctacttagttggccggaactttgggacgtccttcgttggtacgcgcacaaccgcggctacgaagaaatcggtagcgaagcatcagccgacgacgcacctgccgatgacgaaaaagcgaaagacgccgagaaagtcgccaacgccaaagccgccatgtcacgtctcggcaagagcaccatggccgaaaccatttgtgcttggctcggactcgatccgcttggcgaacgccgccccacgcatgaaaattacaaagccaagaacagcgctttcgaacgccccgtcgtcattgcggaagtccgtcgcatcctggccgctcaccgcggaaaactccccgcgctcgacgacgctgtgatcaccgcgctcctcgacgatgcgcgcgtcctttcgattcccacgatacgtttccctaagcgctatcaaggtgggctccttttcggtcgcctcgccacgcgctatcacaatcgcatcattggccggtgcccgatctccggtgagaaaatcccgtcgaaaaactgccccgaatttctccgctaccgctggggtatgcagctcgcaaacattcgcgtcggcaccgacgccaaaggcgatctccgtccgctttctatcgaggaacgcaaaacccttcacgccgccatgacctccgccggtcacctcagcgtgaaagccctcaaagaaactgtgcgcagccttccgggtgtcgttcgcgacaacctcgaaaacctcctgcttcatcccgacgccaaggaggccttcatcttcgatcccgcgcaaaaactcatcacaagccatccgcacctctcagcaatctggccgcatcttcccgagcgcatccaaaagcgcgccaaagggcgctggcgtcatggaaaatccatgacactcgccgtcctccgctccgaagccgccgctctcggccacgatctcaccgcattcgacgccgccctttccgcgctgctgagccctgacgccaaaaagcccaaaggcaaaaaggccgccaccctcacgcgtgagggcattttatccgcgccactcgatattcgccgtgacctttcacgtctctccggccgcgctccttacgcccgtccgctcctttccaaagccttcgacgaagtcatggccggaaacgaccccaaagcgaagggcggatgtttggaagaaacggatgaagttcgccgtcgtcgggaaacccgtccgattcctgagcagaccaacaaccacctcgtccgtcaccgcctgctcattctgggccgcctcctccgcgacctcattgccgacaaatcctacgccgccggcgatccagcccgcatcaatcgcgtcaccatcgaggtcaatcgcgacctccgcgaaatgtccggtttgagtgctcaagacatcgcgaaggaactcggcgcgcgtctctccaatcacaaaaaagtttccgcgcgtctcgaaaaagatctgccggaaggcacaccgatcactgccggccttatccgcaaagcccgcatcgccgacgaccttggctggcgttgtccgtacaccggcgtcgattttgaacctgtcgacctaatcgagaaacgcgtcgataaagatcacattattccacgctctcagcgtccgaccgattctctcgatgcgctcgtgatcacctttaacacgatcaatcgctggaaaggtaaacgcaccgcctggcagttcattgaggacgaaggaggcaaacctgtgcccggcgcgccgcacctctccattatgccgatgaaccgcttcaaagagtttgtcgaaaaactcgatgcaaggaacggccacgaagaagacagacgtcgcaagaagcgccgcaaagagtttctcctcctcgaaaagtacgaagaaaaatccggcggattcacgcccggccaactaacgcaaacgtcacagctcgcacgcctcgccgcgcaagttgtccgcgaacctttcacggggattaaagaaccacccacgatcgtcgccctccccggaagcgtcactggcacggtccgtcgcagttgggatctgcttggctgcctcagcgctgcgacgcctgcggtcctcgactcggacggatcggtgaaaactaaaaccgaaatacgtgagatcactcatctccaccacgcattggacgcatgcgtaatcggactcgctgcccattttatacccaatcgaggcgatgtctggcggctcctctccgaacgccgtcttcgtcctgaacaacaggcccagctcgtcgaagcgctgccgaccaagctcctcgatttcgacgctcaaggcggcttccgcctccgcgatctgccggacgagttgaaacaacaaatccgcgcccgcctgaccgagcgccgcgtcgtccaacacatctcgcgtgacatgaatggactccgcgtcgaggaaaacacgcgtggtgttatacgtcgcgaaaatggccgcgtctttcttcgtcagcagaaacgcgacgccgacggcaaacggatcatcaacgaaaccaacgagcccgaaggcaaagtcatcggcctccctccgctcggccacacgggtggcaagctcgccaagcttaacggcgtccgcgtcatcgctgacaacttcggcgtggcgatcttagacgacgaaaaactcccgcctgaagaccgcttcgtcatcatccccttcgcccacgtctggaaacgtgtggcagaactaaagacgcgcaacggtggtaaacgtccgcaaatctggcgcaacgggcaaataatcgaactgaagaaaggaaaacgtgcaggattatggcggatattctccatcaaaaataatactagcggcatggcgctggatctcggcccgatcgatgcggttaaacccatctggataaactgccttcttaagagcctccttcgcgacggagctcgtcgacttaatacaacatttagtggtgccgatatatagcgcaccatgtcctatcatattgtcagtatcgacgctcctcaggccgatctgacatgtcgtgatggacaactcgtctgcacaaccgacgcgggcaaaaggcaaattccgctcgaagacgttgctgctatcgtcatcaccagcttttcagcgcgaatccatagccatctctttctccaggcggcacgccacggcgtctcgctgatcatctgcgaacgtttccaaccggtcagtctgctactacccgcatgtcgatcggccgacaccatccttacccgaaaacaccttacactgtcagaactcacgcgtcgccgcctttgggaaaaaacgatcgacgctaaatgtatcaatcagctcgtcgtcgccgaacgtatcgcgcctgaggccacggctacgcgcgatcttgcaatcgcagtgcgagcacgcaccgcgcgcaaagaaggtggctgtgcgaaactcttttgggacgcattctccactgggctgcgcatggaaggttttaaccgcggaagaaagcttgggggactcaacgacctgttaaactacggctacgccgtattactctcgaccgtcctccaaaagctctacggttttggtctcgatcccacggtcgggatttcccacgccattcgtgaacgcagcgctccgcttgcgtatgatctcatggaacccttccgaccatgtgtcgactggcgggtatatcaatgggtgaaagataaaccacaggccgaagcatttgctgtcaccgcggaatttcgccgatgggtgacaggcttcgcgttggaaaaagtagattacttcggtctcgaactcgatctgccgggctgcattgaaggtgttgttcgcgggtttcgacaggcaatcatggcaggcagcacgcgctcctatcggccatggacgtggaaaaattcaaaatgggctggcttgtcgtagccttcgatctgccggttggcaccaaagcccaacggaaggccgccacggacttccgcgaatttcttttggatgacggctttcaaatgctccagtttagcgtgtacgcgcgtccctgcgtgagtttcgcccgccaacaaacccacttggatcgtttgaagaaaagtatcccggcagaaggtaaagtccgggcgatttttgtgacccgatcgcaatgggaacgctcattcgtgatctacggaaaacccgcccaagaggtggaacccgaggatctgcctgagcaaattcagctgtggtagaaatacagaagaccctcattaagagggccttctcatgggcggatactccgcgccgagtttttggaatcaaggcaaagctacatgggcagcggcagcacaggcattgctgatactccgcgccgagtttttggaatcaaggcaaagcccaaccttccctctcatcgctgaacgtcttgatactccgcgccgagtttttggaatcaaggcaaagcgctacgtagcggccgccactggtgccgatcgatactccgcgccgagtttttggaatcaaggcaaagcgatgatgcgcaccatcgacgacagggcgagatactccgcgccgagtttttggaatcaaggcaaagctcgcgaccgcgagcaatgcgggcctccagagatactccgcgccgagtttttggaatcaaggcaaagcagagtataccgaggatcaatccgaacacacgatactccgcgccgagtttttggaatcaaggcaaagcgtgcatgagccgcaggcaccgcagaatttcgatactccgcgccgagtttttggaatcaaggcaaagcacaccccggtaggtgctgcttagctcggtcgatactccgcgccgagtttttggaatcaaggcaaagcaaagtgggcgtttgttttggcacctgtaatgatactccgcgccgagtttttggaatcaaggcaaagcgaagattccttcgccgtagccctcggtatcgatactccgcgccgagtttttggaatcaaggcaaagccaccagcgccagcggtgcgagcgtgacctagatactccgcgccgagtttttggaatcaaggcaaagccgtcgttactgcggccgccggagcctgctcgatactccgcgccgagtttttggaatcaaggcaaagcgaaagcgcgccaaaagagcttcgtgagtgcgatactccgcgccgagtttttggaatcaaggcaaagcaacggctgaacaactccgtttgtctcgtaagatactccgcgccgagtttttggaatcaaggcaaagccagccccacacccataggacgaggtaggtgatactccgcgccgagtttttggaatcaaggcaaagcttaggttttcgtagcgttaagaatcggaaggatactccgcgccgagtttttggaatcaaggcaaagctgaaaacgactccgcttttttggcggcggcgatactccgcgccgagtttttggaatcaaggcaaagctgatgaaatcgagcaacgacggatgcttgatgatactccgcgccgagtttttggaatcaaggcaaagctgcccggaccttggatggatggccctctctgatactccgcgccgagtttttggaatcaaggcaaagcatcggaggcaacgtcacatcggcttcccacgatactccgcgccgagtttttggaatcaaggcaaagcggtcgtcgcttcgacagacagccgcatgctgatactccgcgccgagtttttggaatcaaggcaaagctcctgcccctaaagcagcggccaagcccgcgatactccgcgccgagtttttggaatcaaggcaaagcgattgcagacttgtatcgtttcgcgcggaggatactccgcgccgagtttttggaatcaaggcaaagctatggtgttagtggtgtcagttctggcttcgatactccgcgccgagtttttggaatcaaggcaaagcgatccggacacgaaattctactactatctcgatactccgcgccgagtttttggaatcaaggcaaagctgacaggggcgcgcgaaaaaatagcgtcccgatactccgcgccgagtttttggaatcaaggcaaagcgcgcgaggcgttcctcgacctggcgtgcgagatactccgcgccgagtttttggaatcaaggcaaagccggtaaatcttgtcgccgttaacgcaaccagatactccgcgccgagtttttggaatcaaggcaaagcagcttggaaacgtgagcgaatgattcttgtgatactccgcgccgagtttttggaatcaaggcaaagcgccgaagcccgccatgtgccgggcctcgtcgatactccgcgccgagtttttggaatcaaggcaaagccgaggccttggggcatgcgcgggggattgggatactccgcgccgagtttttggaatcaaggcaaagcaccgcgacgctcaccctcgccggctcaggcgatactccgcgccgagtttttggaatcaaggcaaagctcatgccgcaggtggtgattgatgcgctcagatactccgcgccgagtttttggaatcaaggcaaagcctcacggtctcgccctcgatgggcgccgcggatactccgcgccgagtttttggaatcaaggcaaagctggggggcaggcgtacgatctcattgcggggatactccgcgccgagtttttggaatcaaggcaaagcgcatccatcgcgcgcttgtcgagctcttaggatactccgcgccgagtttttggaatcaaggcaaagctcgggcttgtagcggccgaactctttggcgatactccgcgccgagtttttggaatcaaggcaaagctcgagccggaagcgccgcaacctcgcgcctgatactccgcgccgagtttttggaatcaaggcaaagccactggccggccgactcaagcgcgcatttagatactccgcgccgagtttttggaatcaaggcaaagcgaacgtgaggacaaaaagaccggcgaggtcgatactccgcgccgagtttttggaatcaaggcaaagcggaaagtatcttcacccggtcacaaagcaggatactccgcgccgagtttttggaatcaaggcaaagcccgagaaagaatgcgaagaattttggaagcgatactccgcgccgagtttttggaatcaaggcaaagcctagaagacctagaagactaaagggcgcgagatactccgcgccgagtttttggaatcaaggcaaagcaaaagagcctgacgacggcgaagaaacgatgatactccgcgccgagtttttggaatcaaggcaaagctcttagccaagatgatcttccgagcactaggatactccgcgccgagtttttggaatcaaggcaaagcggtcgccgccgcgctggcactggtgatctagatactccgcgccgagtttttggaatcaaggcaaagcagcgaactttcattcatcggggtgctcgcggatactccgcgccgagtttttggaatcaaggcaaagcgaactcgtcggtgctatcaccgccaacgccgatactccgcgccgagtttttggaatcaaggcaaagcagcaaaatctaacgccgtgtcgatagctttagatactccgcgccgagtttttggaatcaaggcaaagcgcgcatcgtctcggatatgtagctcatgcggatactccgcgccgagtttttggaatcaaggcaaagcacgcagccagcgcaagccagcgcgcgtcatgatactccgcgccgagtttttggaatcaaggcaaagcaaagtaaatgtgattaagcctgagctccacgatactccgcgccgagtttttggaatcaaggcaaagcgacgcggccctcgactccgatcctcacggtgatactccgcgccgagtttttggaatcaaggcaaagctgtcatcctgtgcagcccgccatccgtggtgatactccgcgccgagtttttggaatcaaggcaaagccggcgtcgacggcaggccccacgctccttggatactccgcgccgagtttttggaatcagcgacagggatccatacgcagaatgctcccgcctcttggcgcgcgtcgtcataatgcggccttgcgcttggcgtgaacaaaatttgctctccccgccatgcacgcagcgcccattttggctccttccatccttgccggcgaccacgccaatctcgccgccagcgcggctatcgtcgaatcgctcggcctcgcgtggatccatctggatatcatggacgggcatttcgtacccaatctttctttcggtccgcaaaccgtcgcggcgctgcgcaaaaactcgaaactctttttcgatgtccacctgatgctgagcgaaccgcatcgctacatcgaggcgttcgccaaagcaggcgccaatctcatcagcattcacatcgaaccggaaatcgatcatcgcgaaacgctgcgtcgcatccgcgaactcggttgtcagcgcggcctcgtgctcaatcccggcacgcccgcctccgccgtcgagccgtggctcgatcagatcgaacttcttctggtcatgaccgtgcagccaggtttcggcggtcagtcgttccggcgcgatcaattggaaaagatcgcccgcatcgctcaggtacgacgcgaacgcggtctttcgttccgcctcgaggtcgatggcggcatcgatctttcgacgggactcgaatgccgtagtgccggcgcggatacgttcgtggcgggcacgtcgttcttcaacgcggccgatcgcaaagcctactccgccgccgtggcggcgtggtgagttttttcgtcagcgctccgtcgcacgagcgatggctttggcgcgcgcgtatcgctcacgaaacacattgccgagttcggtcgtgagacgcagctcatccgccttgttgcgcgatgtaagggcggcgcggatacgtccgctggccgcggcataatcgaccgccgacaaatcttgcagcgcggtcagcgcttcctccggcatgccggcgtcgatgatggcacgccaagcatcgcgcagctcgtgatgcgtgtccaaacacatcacgcgaataacgaaggacatttcgcggaacagcgacccggtccacgcgggacgataaatgagctgctccgagccttcgtaaggaagatcgggatcgctgcgcagcgcggcgaactccgtcttctcataaaaatcgcggcgcaccggcagccggcgcagcgcaaaacgttccggtccgcccggtgtgccaggttcgaaattccacaacttctgtccgtccatcgagagcacgtactcgatgaatgccaccgcggccgcgcgatttttggcaccgcgcaagagcgcgatcggatccacggaattcaccgagccaccgaccggcgacacatacgcgatgcgtcccggaccgtcgcgacgttcgatcgcctcctgctgctgacgtccgtaaaaatcgatgcacataccggccgcggcatttccctgtgcgacatcgatcggcggtttctgcgaactgtcggtgaagtagcgcgagttggccccgatcagctgcatcaagcgcaagccttcggtccagccttcctccaccgcgcgttgctcgatttgtttcaactgctccggcgtcgcgtccggctgctgcgccatcaactcagtcaaccggcgctgcatttgctgttggatcacgttttcgaatgccttcgcgatcgagccgctcttggtgggatcggcgagcgcaacttctccgaagagccgcggatttttcagatcgtcccaacgtgtcggcaactcgacgccgaggcgtttgagcgcgtccagattcaccacgatgccgtagctgctgagcaccgtgcccatccagcgtccttgcgcatcccagtattgctcacccgcaaactcctccgggatcacatcggcccgaaaccactcggggtgtttcttcatcacaccgctgtccacgatgcgccccgcctgcgcctggcgaatgaagtcgtacggaccacctccgaaaaagagatcgatgccgcaactgatctcggactggagaaacatcgcgcgtgccatccgcgcctcttccgaggcctcggcgggcagccggggattttgaaacgcctcctgcacttccgcgctccattgtcgaccgagtgttttggtccaataaagttcaaacgccgccgtgtattcaccttcgagaaaacgtgcgatctcgctcgtgcctccgatcacgcgccaatcgatcacgacgttttttcccatgcgctcgcgataccagcggcgaaacccgacgccaaattcgtgacgcagcgcttcgttatgcggcgtgatgatcaccaacgtctcatccgcgcgctctgcagagtctttctccggtcgcagcgcgaatggcagcgcgacgaccgagatcaggcacacaactatgaggattcgtttgaacatcactcagtgcgcgtgtcgccgcagtttattcggacaagaccacgacgtcgtccacatcggcgcatgcgtggaacgttttctccgtcgaacgtccctgaaagcgcgggttcagttcatagattttcagaggatcgccgccccgcgacggcacaaaatcgtactgcgccacttcgccgagataaaccgcgtcgccgatgcgacccgacacgcagttcacatcgcgcggctcgccgcccaagcgccagcattcagggcggatcgaaaccgtcaccgccgcaccgaccgcgggcatttttgcgggatcgccgggtaaaccttcgaaacgtcccaccgctgtatccacaaaaacatgaccgccttgggtggaggtgacgttgcccgcgatgaaatccgtttctccgatgaaattcgcgaccgtgcgacaagtgggccgacgataaacttcacgcggcgtgccgacttggagaatgtgtccgctgtcgaggattgccatgcgatcggagatcgaaagcgcctccttctgatcgtgcgtcacatacaccgtggtgaggttgaactctttgcacacgcgccggatttcggtgcgcatttcgagacggagcttcgcgtcgagattcgagagcggttcgtcgagcaaaagacagcgcgggcgaatcaccagcgcgcgcgccaatgccacgcgttgctgctggccgccggaaagttggttgggcttgcgcgccgcgtagccttccatccgcaccgacgtgagcgcctcctccacgcgtttcttgatctccgggcgcggcaccttgcgctcttcgagaccgaaagcgacgttctccgccaccgtcatgtgcggccacagtgcgtagctttgaaacatcatgccggtgttgcgcttgtgcggctcgagacgcgtcacctcttcttcgccaaagagaatgctgccctcctccgggatgtagaaaccggcgatgctgcgcagcaaggtggtcttaccgcaaccactgggaccgaggagaaaaaacaactcaccaggacggatggtgaggtcgagtccgtgcagagcgactgtcgacccgaaacgtttggtgagattctgaatgcggatagaaatcatgccgcgcaaaacgcgccgggaagcaagatttcagccggaaattgagtcaaaagaataaacctcgtccgcgaccgagaagcagttgccgaggctccgctttatggccttcatcttcgtttctccatcatggccaaatcgcccgcccgtcccgcccacgccgatctcgaaaccgtcctcgtttcggaagcggccatcaaacgccgcctcaaaaaactcggtgcggaaatcgcacgcgtttacggcgacgaagagatcacggtggtcgccatcatcaacggcgcgatcctcttcaccgcggatttgctgcgacacatttccaatcccgtccgtctcgattgcatccgcgtttccagctatcgcaacgaggtcaaatcccaaggaaaaccacgtctgctcaatcggttctcgctcgatctcgccaatcgccacgtactgctgatcgacgacatcctcgataccggcaagacgctctccgtcgtcgtcgatctcatcaaaaaatccaaacccgcgagcatccgcacttgtgtgctgctcgataagaaaggccgtcgcgaggtggatttctcggccgacttcgtgggcttcgagattcccgacaagtttgtcgtcggctacggcctcgattttgccgagcgctaccgtaacctcccctgcatcggcgtgctcaaacccgcgctgcagaatccgccggaatgggcctgagcgcgtagttgtttattcaatacaaacgacgccgcgcatcattcgcgcgaaagccaagtcgacaccaactcgtcggtgagcaaatccgctcctccgccgcgtccgcaccattttaggaatgggacgacatgcggcgcggccgtttccacttcgcgcatgtaaagccgggccagcggcccgccatcgcggagataaccgctttcgcgaaaacgcgtcagcgtcgcctgcacgtcgtacggcaccgcgtgatgttccacgctccactctgcgccgcgccgctccatcaccacaaactgcgccttcaccgtgccatcgagcggaagtcccacagcgccggtgttgacgatgaaacgacgtccccacggacgcaccgccgcataatgattatgcccgcgaatgatccagcgttcatcgcaaccggcaaacataggctcgatctcggcatcgctcgtgtacggaaaaatcaaatcgtgatccccacgcattgacgcatgcacaaaaaggaggtcgggagcgtcaggcagccggatgatttccggcaaggcggccagcttgcggcggttttcttcgccgagttgcgcggcggcgtattgcaccggaccaaactgccgcgtgctccactccggcttcgcgcgcggcgtgccgagatcgaagacgtaacgctcgtgatttccgcgcagcaccgggcagcccagcgactgcacacgctcccagcagcgcaacgaatccggcgcgcccaccacgatgtcgcccgcaatcaccagccggtcgatcttcaagccttcgacacgtgccagcaccgcctccaaggcgggcaggttcccatgaata

SEQ ID NO: 1993 - DNA, 14995 bp, synthetic construct
  misc_feature 1..14995: note = Synthetic
  source 1..14995: mol_type = other DNA
cgtagtcgatggccatcgcctcctttttcttgcccgtggtcatgaccatgtgcacccgaccctcgaaggagtcggccgcggcaaccgcgctcagggtgatcagggcaaacgcggtcgcaagcagaccgcggcagagggcagaggagggcagtttcatgaaattcaagaccggaggaggggtgaggttaactgggccgagagccggactgccgccatggtttagggcccggcggccgaccgcaaggctgtccggcgcgcggccggaaatatccgccagggacgcagccgttacttcgccgggacccgcggcagctcgtcccgcagccagtcatccaccagcgccttctcaaaccgcaggttgtcgtcgcggttgatcgacagcttcatcatgaaggcgaggtcgcggagctggcgccgcccttccttcaccaccttgccgtcggggccggtgagcttgaactccaggtcgattttgggcgggtaaacgtccttcacgacgcggacgtcggacatctgcgggccgtgccagggctcaaagtctccggccagatcaacatcggtcaccacgatgctgagcttttgtcccgcgggcacgcggctttgggcccgctgtacaatatggtcctgcaactgcccgagcaggccgtcgcggccctggtcgctccccatgtaaccatcgcggacatcggagaatttctccggatgcgagaaggtcacgtcgacccgctcctcgcttttcacggccggatcggccgccatcaccgcgccaatcgcggtcagtcccgcgacgatcccgagccagaggtggttggttttcatggtgtgcgtgggacccacattgggcccggattgttccggcgcgagccaacttcccggccgggccccctcaaggagccgcgccggccggggcggcccgtttctcgattctgaccgccgtgatcttgtattccggggtcttggtgtaccggtcgcactgcgaggtggtgatctggttgaggaacacgcgcgcgcagtggaaggtggtgtaaacctccccgggcttgaccgtgccgctgatccgcaccggcaggtcggccgagccctgctggctggccagccgcacgatctcgccatcggtgatcccgaggcgggcggcgtccaccggcgccagctggagaaagtccgtcgtcgccatgctgccgttgggcgtccggccggtctgcgtggcggcgttgtactggaagaggttccggccggtggtcaggacaaaggggtactccgggctggtcacgtccggcgggggcaggaattcgatgcggcgcagcgcggtggtcgggccgtgggtgaaccgctccgcgtgcatgatggccatgccggggtcgttttcgtcgaggcagggccactgcaggccgcccaggcggtcgagccgggcgtagctgaggccggcgccctcgggccacagcgagcgcacctcgtcccagatttgctccgcggtgcgatagttgaaggccgcgcccttgcccatggcccgggcgacgtcgcagatgatttcccagtcgggccgggactggccgcgcgggcgcgcggcgccccgcacgcgctggacgcggcgctcgccattcatgaacgtgccatccttctcgaaggacgaggcggcgggcaggaagacgtcgccgaactcccgggcggtggcgttgaggaagaggtcctggacgatgaccaagtcgacctgctccagcgcgcggcgggtctcatgggcgttggggttggtcatcaggatgtcgtaaccgatcgcccagagggccttgaaccggccggtgctggcggccgccagcatctcgaacatgttgagcccggggtgggtgggaatggaggagtgccaggccgcctcgaaccgcgtgtgcgcctcggtgagcggcacgtagccggccaggagcttcggctcgcagcccatgtgcggggcgccctgcacgttgttctggccgcggagggggttgatgcccgagcccggcttgccgatgttgccggtgagcagcgcgatgttgaccagcgccatgatcccctcggtgccctggacatgctcggtcatgccgagcccgtggacgctgagcgagggcttggcggtggcgtacagccgcgcggcctggcggatcttcgccgccggcacgccgcagatgccctcgaccttctccggcaggaagtcgcggatgaaggtgcagtattcgtcaaactcggtgaggcgcgtgcggagaaactccaggtcgacgaggccctcctcgacgatcgtcgccccgagggcgttgaacaggacgacattggtgccggggcgcagctggaggtgcagcgtggcgaactcggtgagctcgatctggcgcgggtcgacgatgatgaggttcgcgccgcggcgcgccgcctgcttgatgcgcgcaccggtcacggggtggccctcggtcgggttggcgccgcagacgaggatcgtgcgggcaatctcgatctcgtcgagggagttggtggcggccccggtgccgagggtcatcttcatcgcggcggcggtcggcgagtggcacacccgcgcgcagcaatcgatgttgttcgtgccgaggacgacgcgcgcgaacttttgcgcgacgtaattctcctcgttggtgccgcgcgcggagctgagcacgccgatgctgtccgggccgtgctccgccgcgagggcggcgagccgctcggccaggtagcggatgacctcctcccagctgacgtcctgccagacgccatcgcgccggatcatcggggaggtgatgcgctcctcggcatagacgtagtcgaaggcgtagcggcccttgacgcaggtgtggccgtggttgctcgggccgtccgacggccggatggtggtgatctggccgtcgcgcgtgccgacgttcacctcgcagcccgtgccgcagtaggagcagatggtcttggtccacttggtcggcaccccgcgggccagaacggtgaggtcctcgagcgccccggaggggcaggtgtccacgcacgccccgcagctcacgcagccgccgtccagcagcgtctcgccgcggaccggcaggatgcgggtggcgtcgccgcggttccaggccttccagacaaactggccctgcacctcctcgcagatgcggacgcagcggtagcaggtcacgcactgcgacatgtcgacgttgatgtagggatgggaggcatcctgcatgaacggcacggcggggggcggcgcggtgcgcgagccgccggccgacacgccgtactcgtggaggtagcggtggaactgcttgtggggaaactcggcgacggcctcagccgggtagtcccgggcgaggagcccgagcagggtgcggcgcacgccctcgacggcgggcgagtgcgtgaggatttccatgccctcgcggatcggcgtgttgcaggcggtgacgagcgcgttgaagcccttgacctcgacggtgcagaggcggcaggaaccgtagggctcgaggcggtcgtcgtggcagagggtgggcacctcgaggccgagctgacgcagcgcctcgttgatggtgagcccctcgggaaacgagtgggactggccgttgatcgttatttgaagcatggctcaatctccgtcggatagtagcgcaggatggattcggcgaagcgggcgagcccggtgccatggccgcagaggctggtgagcttcagggcggtgacgaggtcgcggcattcctgcaggtcggccggcgcggcctggccggccagcgcccggcggaagagctcctcgacgcgcccgctcccgcggcggcacggcgtgcacttgccgcacgactcgtaggcgccgaacgagaacacgtgctgcacgaggtcggggatggaggtgtgctcgtcgaacgccacgatgccgccgtggccgacgcccgcgccgatggcggcgagctcctcgaacccgagcggggtgtcgagcaggtgcggcgggatcagcccgatgatcggcccgccgatcagcagccccttcagttggccgccgctgcgcaggccgccgccgagctcctcgacgatgtgccgcacggtcacgccaaactcgacctcgtagagcccgggccggacaaagagcgagttgagcgagagggccttggtgccgcggctcttggagaacccgatcgcggcataggcctcgccgccatgcgtcacgatccacggcacgttgaccagggtctcgacgttgttgagcagcgtcgggcggtcgaacaggccgcgctcggtcgggtacggcggccgggccatcacctcggggcgccggccctcgatcgagcggagcagggcggtttcctccccgcagacgtagctgccgtggccgatgaccagctccagttcaaaggcgaacggccggccgccaacctgcgggcccagccagccggcggcccgcgcctcggccaaggcggcgcgcagcaccgtggccgcgaacggatattcgatgcgcaggtacaggtagccctggctcgcgcccacggcgtagccggcgaggatcatcccctcgatcaggcgatgggggtcatcctccagcaaatagcggtcaatgtaggcgccggcgtcgccctcgtccgcattggcgacgacatacttcacgccggccggctgctgcgcgaccgcccgccacttgcggccggtcggaaagcccgcgccgccgcggccgcggagcgccgaggtctccaccgcggcgagcacccgctcggggggatggtccagggcctgggccagcgccgcatacccgccctgccgctggtagtccgccagcgagcgggccccgcccgccgcgagccggccgagcacgatcccgtggcgcgagcacacgcgcaccggcgggcgcggctgggtctggcccttggccggggcggcgtgacactcgccgaggcaatacacgcgggggtcctgccgcatcgcctcggcccagcgctccgggttgaggtggcgggcggcgtagcaggccgtgccctggcaggccttgccggcgtgctcgccctccgggaggtgataaaacgaccgcacatcggccgccaagtcatgggcgcccaccggggccgaggcgcgggaagggacgggcaaatggctcatgtcaccaacggggcagagggctgggggaaaatttcaccgcggaggttgtgagtgggcgccggggtgagttcaaccacagacctcgcccaccccgcggtttcatcctagccggtctccggtggatttctggcgggccgaggcagtttggggttttctcccttgggagtttcgctttcctgcggacatgcccacggtccccggactccgcagcccctacgccaaggtcggccgtctcgtctacttcggacggatgatcgacaagatccacctgcaggcccgcggcgcgctgcccgccgactacctcgccaacctcggccaggggttcgacctccgctgctgcgactttctccgcgtgccctacgccgacctgaaggcccaggccctcgccgggggccagacggaggcggcgctgctggactgggccctggagcgcggcggcccgcgcagcgacgaggagtgcgaggtctggaacgggttcctgatgaaacgcggctggcgcgacgccggcgcggaaattctcgcccggcgcatccgcgagggccagctggagggccagcccatcatgacgatgttcgactatctcgacttcgacgagggccgcgatccggtcgcggcgaaatcctggctcggctaagcgccccggctcatggtcatcctgctcatgggggtcaccggcagcggcaagaccaccatcggccggcagctggccggcgagctcggctgggggtttgcggacgccgaccagttccatccgcccgccaatgtggccaaaatgagtgcgggccaggccctcgatgacgccgaccgcgccccctggctcgacgccatccgcgcccacctcgacgcgcagctggcggccaaccggaacgccgtcgtcacctgctccgcgctgaaggcgcactaccgcgccaccctgctcggcgaccggcgccaggttaggctggtgtacctgcagggcacgcgcgaggtcctccagtcgcggctcagccgccggcagggccacttcatgccccccgccctgctcgacagccagctcgccacgctggaggagccggcggacgccctcgtgatcgacatctccccgccccccggccagattctcgcggccattcgcaccggcctatccctatgagctcacccgccggccaacggttccgcctcctcgccagcgtgctcagcgtgctgctgctgctgctggcgggcgcggggggctggttctactggcagctgcgcgccagccggccgctgctggaggggaccgtggccctgcccgggctgggggcgccggtcaccgtggcccgcgatgccctgggggtgccactcgtccgcggcgccgcgcgggccgacgtcgcccgggccctgggttatctgcacgcccaggaccggttctttcagatggacctgctgcgccggcgcggggcgggcgaactcgccgagctgttcggcgcggcggccctgccgctggaccggagcacccgcgtgcatgggttccggccgctcgcgcggcaggtgctcgcgcgcctcgcgcccgccgagcgcgagctgctcgccgcctacaccgccggcgtcaacgccggcctcgcggacctcggccagcaaccgtttgaatacctcgtgctgcgcaccgcgcccgcgccctggcggccggaggacagcgtcctgatcatctatgcgatgaccctcgacctgcaggattcgaccggatcctacgagctggcgctggccacgatgcgggaccagctcggggtcgccggcgtggcgtttttcgcccaggtcgcgcaccccgacgatggcgccatcgacggctccaccgccccgctcgccccgctcccgtcggaaaagatcctcgacctgcggaacccccgcaccgccgcccggccgcccgccggcccgccccccgccttcgccgccgaggagccccgcgatcccgaggcctttcccggcagcaacagcttcgccctctccggcgcccacaccgccagcggcgccgccctgctggccaacgacccgcacctcgacctcgccgtccccaacatctggtaccgggcctcgctggcgtgggacgcccccacggcgtgccgcatcacgggcgtcaccctgccggggctgcccatcgtcgtgatcggtagcaacggccacatcgcctgggggctcaccgacgcctacgccgacaccagcgacctcgtggccgtcgaggtcaacgccatcgaccactccctctacaagcggcccggccaggacgagctgctccgcatcgagcggcgccgcgagaccatccaggtgcggggcggggccccggtcacgatcgaggttccctggacctattgggggcccgtggtcgcgaccagccccgaggcccggccgctggcgttccactggctcgcacacgatcccgcggccaccgacctctccttcatgcagctggccgaggcgcgcacggtcgccgcggccgtcgccgtcgcccatcgggcgggcatgcccgcgcacaattttgtggtcgccgactcggccggccagatcgcctggacgatcattggccggctgccccagcgcgtcgggttcgacggccggctgcccaccacctggagctacggcgaccgccgctgggccggcctgctgccgccggacgaggtgcccacggtcctggcccccgccggcggccggctctggaccgccaacaaccgcatcgtcggccacgccgccttcacgctcctgggcgacgggggctattcgtccgccccgcgcgcgatccagattcgcgacgacctcgccgcgctggagcaggcggtcccgcgcgacctgcgggccatccagctcgatgaccgcgcgctgttcctcgaccgctggcagcagcgcctcctgcgcgtgctcacccccgaggcgatcgcggaaaaacccgcccgcgccgagctccgccgcctcgtcgagcactgggagggccgggccagcaccgactccgtgagctaccggctggtcaaggcctaccggctgcgcaccgcggccctcgcgctggaccccatctttgccggctgcgtcgaggcgctgccccggttcgactggcaccggttcctctatgaggatccgctccaggccctcctgcgggaaaagcccccgcacctgctcgacccgcgctatgcgagctgggacgcgctgcagctcgccgccgccgacgccgtggtggcggacttcgagcggcagggcgtgccgctggcccaggcgacgtggggccggcgcaacacggcgcgcatcgtccatcccttcgggcgcctgctgccggcctggatcgccggctggctcaacctgcccgccgatcagctgccgggcgacatggacatgccccgggtgcagacccccgcctttggcgccagcatgcggctcgtggtttcacccggccgggagagcgagggcctgctgcacatgtccggcggccagagcggccatccgctttcgcccttctaccgggccggccatgccgcctgggtccagggcgagcccacgcccctgttgcccgggccggcgaagcacaccctgcagttgatcccctgaggcggcgggcggcgcgggtttgccaaacgccggccggcgggttcaggctgcggccatgctccacgtcctcgaccacccgctcgcggcgcacgtgatcacccacctgcgcgacaagaccaccaagccggccaccttccgcacgctctgctaccagatcagcctgctcctcgccatcgaggcgacccggaccctccccaccgaggaaaaatccatcgagaccccgctggagccgatgaccgggagggtgctgaccgcccagccgctggtggtcgtccccatcctgcgcgccggcctcggcatggtgcagccgctgctggatctctttcccgacgtgagcgtgggctacatcggtctggagcgggaccatgccacggcggtcgcccggagttactactgcaagctgcccccgctcgcgggccgccgggtgctgctggtggacccgatgctggcgaccggcggctccgcggtgcaggcgatcgaggtcgtgcgcgcccagggcggcacggacatcacgctgatcaccattgtcagctcgcccgagggcgtggccgaggtggcaaggcacgacccccggctgccggtattcaccgccgcgctggaccgcgaactgaacgcccagagatacatcctccccggcctcggcgattttggcgaccggctctacggcacctgaccgggatgaatcttccctactggctcggcctgttttatctgctttccgaagtcgccctgcggttttcccggcgttcggggggcggcacgcagcgcgccgacggcggctcgctggccgtgctgtggatcaccatcaccgttggcatcatcagcggaatctatgtcacgcatctggctccgggcttccggtttccgctttcgcccgtcgcggccggggggacggtggcggtgttcgccggcgggctcgccctgcgctggtgggcgatcctttcgctcaggaaattctttaccgtggatgtcgccatcgccgccgaccaccggctgatcgtacgcggcccctaccggctgatgcggcatccctcctacaccggcatggtgctggcgtttgccgcgctcgccgcgacgtttcaaaactggctgtccttccccggggtgctcgggccgatcctgctggccctggcctaccgcatccgcgtggaggaggccgcgctccgtgcggcgtttggcgaggactacgcccgctatgcccaaacgaccaggcggctgcttccgggcgtgtactaaataaaacggcctccgaagaggccgttttctaagaagcgctgttgaccacgatgtaactgcagagcagttagggaaacgggctgcgctcgctactttgacttgattccgcagccacggaactccggaggaccctatgagcgcaagcgcaaaaccaccacgcgtcgaagtcgcgtttgatattggccacagttccattggctgggccgtgcttggcacaaacgagtccgcccctcctggtgtacttggttgcggcacggtcatctttgagaaggacagcgccctcgccaatacccgccggctccaccgctcgcagcgccgccacgtgcgcgccacacgccagcgcatcgcgcgcatggagaagctgctcgttcacctcggcatcttcaccgccaccgaacttgctgcaaaacaccgggctaatggcggcagtgccgccccatggctccttgccgcccgcgtgctcgccagcgatggcgcgcagacgctttcctggccagaattgtgggatgtcctccgctggtatgctcacaaccgcggttacgaggaaatcactggcgagctgcgcgacaaggccgaggagtctgacgagaaaaagcaggacaccgaaaaagtggagaacgccaaggccgccctcgcccagttcggcaaaaacagcatggccgaaaccatctgcgcctggcttggtcaggatccgctcggcccgcgcaccggcaccgccgaaaactacaaggccaaaaactgcgccttcgaacgcgcactcgtggatgccgaagtcacacgactgctagcctcgcacctcggcaaactcccgggcgtgactgaggcgtttgttgccgcagtcatcctcgatgctcgggccatcgccgtgcccaccattcggctgccgcgccgttaccaaggcagcctcctcttcggacgcctcgcgacccgctaccacaatcgcatcattggccgctgcccaatttcaggggagaagattcccagcaagaactgccccgagttcctccgttaccgctgggcaatgcagctcgccaatctccgcgtggcggattccgccgaggcgccccttcgcgcactcacggccaacgagcgcgtaaaaattcatgccctcatggtcgctgctggcagtctcggggtgcgggagttgaaggaggcagtgcgcgcgctgcctggtcacgtgcgggacaacctcgaacaattttttctccaccccgacgccaaggaaggcctcgtgctcgatccaattcaaaagcttatcgccggctcttctaccgccgccgcggtctggccgcacctgcctgaacacctgcaaaagcgcactcgtggccgctggcgccgcggcaaatccaccaccctcgccaaactgcgcgaagcggccatccaactcggtcacgactgcgccgctttcgatgccgccgtcgatgcgctctgcgctccgccaaaaaagccaagcaagaagactccgccgcccgtgaaggaaaatctcctgcttgatcctctcgatgcccggcgtgagttggccaaactcagcggacgtgcgccctatgcccgcccactgctggggcaggcgttcgacgaggtcatggccggccgcgaccccaaagccaccggcggttgcctcgaagaaaccgaagacgtgcgccgacgtcgtgagattcgcccactcgcgcaacagaccaacaaccacctcgtccgccaccgcctccaaatcctcggtcgcctgctcaacaatcttgtcgcagaccccgcctatggtgccggcgaaccggcgcggattgcccgcatcactttggaagtaaaccgcgacctgcgcgagatggccgggctcactgcacaggacattgccaaggaactcggccagcgcctcaagcaacatggcgatgccgtccaatggctcgaacaagacccgcaggtcgcacccaagatttcagccggactcatccgcaaggctcgtgtcgccctcgatcttggccagcgctgcccctacactggcgaaagcctaaaccccatcgatctcgtcactagacgcgtcgatctcgaccatatcatcccgcgctcacagcgtgcctccgactcgctggactcgctcgcgctcactttctctgccgtcaacaaatggaagggtaaacgcaccgcctggcagtttattcaggacgaaggcggcaaacccgtccctgatgcgccaaatctttcgatcatgacgccggctcgattcaaggcacacatcgaatcgctcaacaccaagggtcacctcgacgactaccgtcgcaagaagcggcgcaaggagttctttctgctggaacgctacgaggaaaaggcgcgcactttcacgccgggccagctcacacaaacttcacagctcgcgcgtctcgcggcccaagtggtgcgcgagccgtttgccagactcccagatccaccacaactcgtcgccttgcccggttctgtgactgggactgtgcgcaaagcctgggatattcttggctgcctctctaccgctgcgcccggtgtgcttgagacagtcaaactgaccgacggcaccgagacgcaggaagtgcgcaccaagactgaaattcgggacatcacccacctgcaccacgcgcttgatgcgtgcgcacttgggctcgccgcgcactttattcccaaccgcggcgatgtgtggcggctgctctccgagcgccggctggactcagcgcagcgggccgaactcgccgccttgaatctctttgatttcgacgaacggggtcacttccgcctgcgcgaccttgcaccggaattgaaggagcaaattcgccaacggctcgccgaacgacgggttgttcaacacgtcccagctgacatgagcggcctgcgcgtcgaggaaaacacccgtggcatcctccgccgggaaaacggtcgcgtctttctccagcaacggaaaaaaaacgccgacggccaagtcgtcgtgaaccttaccgaggagtcagagggcaaagtcgtaggcctgccacgtgcagacggctccggcggcaaactcgctgcgctcaaaggcgtgcgggtgattgatggaaatttcggcgtggcaattctcgatgcgcccgacgtaccggatggcgaacgcgtctcagttgtgagattcttccgtgtctggcggaaactccgcgagctgcggacgcggaatggtggaatcaggccgcgtcttctgcgcaacggtctactgattcacgtgccgcgtggctcgcgcgcgggcacttggcgcatcctttcgacgaaggaaacccaagcctttggtattgcagttgatttgggcgcccctgacgggatgaggctcatcaagggcaatgcgcccgtcgccaccctcgtgcgtgatggtttggaaattctcaaatcacggctgaccggcaatactccacgttaggttctcatcatgtcctaccacatcgtcagcatcgacgccccgcaggccgatctgacatgccgggacggacaattggtctgcaccaccgacgaagggatcaagaaactcccactcgaggacatcgcgtcgatcatcgtcacgagtttctcggcgcgcattcacagccacctgtttctcgaagcggcacggcatggcgtcgcgctcgtaatctgcgaaaaattccagccggtcgccctgcttttgcccgcctgccgctcggccgatactttgctcacccgccgtcacctcaccctgcccgacgcttcccgtcaccgtctttgggaaaaaaccatcgatgccaagtgcgcgaaccaagccttcattgccacgcgcattgctccggcaagtaaagccaccgtgcagcttagccgggccgcgcaggccggcaccgcgcgcaaggagggcggctgtgcaaaattgttctgggacgttgtctccgaggggttgcgaatcgaagggttctcccgcggtcgaaaactcggtgggttaaacgacctgttgaattacggctacgcggtgctgctttccaccgtgctccagaagctctatggctttggcctcgatccgatggtcggcatttcccacgccatccgggagcgcagcgcgcccctcgcctatgacttgatggaaccgttccgtccgtgcgtggactggcggatttatcagtgggtgaaagatcggccccaggtcgaggcgtttgccgtcacgggtgagtttcgccgctgggtgaccgggttttctttggaacgagtggactacttcgggctcgaacttgatatccgcagctgcatcgagggcgtggtgcgcggctttcggcaggccgtgctctccgagagcacccgtcattaccggccatggatgtggaaaaattcaaaatgggctggctcgtagtcgcgttcgatctgcccgtcggcacaaaaccgcagcgcaaggccgcgacggacttccgggattttttgctggatgacggtttccagatgatgcagttcagcgtttatgtgcgcccttgcgtgagtttcgcgcggcaggaaacccatctggaacggatcaagcggagcattccccccgaaggcaaagtgcgggccttttacgtgacgcgggcgcaatgggagcgggctttcgtgatctacggatcacccgcgaaggaggtgccggcggaggaaatgccggaacaaattcagctttggtgagccgaatccgtggcatgaaaatttaagcggagggaggccggcgtgctgagccacgccggcctccctccgcttttcgagtcattcaagttgccgtgcgtaaagtatttccggggggcggagcatccgccccccggaattggaatcaaggcaaagcattgaccgacgcgtgcccgtcacaaccgacgagcatccgccccccggaattggaatcaaggcaaagcgcggagtgggtgcaggcgttcatgcggattgagcatccgccccccggaattggaatcaaggcaaagcagtagcatagaacatgacttttgccttttcgagcatccgccccccggaattggaatcaaggcaaagcggactcgacacctcagcgatgctcttgtgcgagcatccgccccccggaattggaatcaaggcaaagccgagtcatccgtcgccgtctgcgtgaacgcgagcatccgccccccggaattggaatcaaggcaaagccgaaaatctcgcgtac

SEQ ID NO: 1994 - DNA, 14878 bp, synthetic construct
  source 1..14878: mol_type = other DNA
  misc_feature 1..14878: note = Synthetic
ggtcctgctggtagatgcgggtcttcttctcgaccggcacctgggcaaagacgtagccggggaacagcggcttggtgaagctcttcgtctgctggccatagcggcggatgctgtcgatcagcggcaggtagtgctcgaacttctcggctgccatcagggcggcgaattttttttcacaccggggcttggtgtgacagaccagccagtaggagtcggccatgctcaaagcttcaggagaaaacgcacggcggcgtgatagccctcgagcccgagcccggtaatgaccgcgcggcaggcgggagccgtcagcgaggtgtgccggaaatgttcgcgctggtacaggttcgagatgtggacctccactgtcggcagatgcgcgccgagcagggcgtcgcgcagcgcgacgctggtatgggtgagcgcgccgccattgagcacgaggccgtcgaacttcgcgtccgcgagggcggccaccttgtcgatcagcgcgccttcgtggttggattggaagaattcgagctgcgccacggcgccgaattccgcccgcagggcctgctccaggtcggccagcgttgcgcggccgtagatttccggctcgcggcggcccagccggtcgaggttgggcccattcaggatggcgattttcttcatcgggacgtcggccgcgactgcacgcgaattgccggcggttgccaaggaatcattcgcggcccacccccggcgtgcggccggcgtcacagcggattttcggtggcgatgaactcccagggcagccggaattttcgcgccaattcggccgcgagcgccttcaccccgtggacctcggtcgcgtaatggccgcaaagatagaggttcagcttctcctcctgcgcccggttgaaccactcctcccggagttccccggtgaccagtgtatccactccggctgacgccagttcgggcaccgcgctgttgcccgagccgctgcagaaggcgactgagcccggcttcgcggcgccgcattcgatcgcgacgacccgtggataaagcgcctcgagtttcgtgcgcagcgcagcccgggtcatgcccgtccgggcaatccggccgatggcctcgccgtcgcggaccaggaatggccgggagggcttgagtccgagctgccgggcgagcagcgcgttgttgccgatctcgggatgcccatcgagtggcaggtggctggaatacagcgcacaattgccgcggacgagggtggcgacacgctcgtaaaccgggcctgtcagcgggcggggcatgtcccagtacatcccatgatggacgatcaggaagtcgacaccggctgcgaccgcgcggcgaaacggctccgcgccggcgtcgacggcggcgccaatcttcgtcacccggccatggttggccacctggaggccgttgcaggcaccgggagcgtccttgaaggcggcgcggcgggtgcgcgcgtcacaatagcggacgagatcgtcgagttgggcggacatgatgaggctttcgctggctgggttctgattcgcaatgatgcagatggcctcccgctaatcacgcgaatacgcgcgaagcgccgatggaaaacgaagccgttgaatcgatttcaaccggtgccaaaccggcagctgtgcgcactgaagccggcgccgaaggtgaccagccagaagtcgccggtgccgttgggcgattcggccttcagcgtctcctccagtgcgaagaggacggacgggctgctcatgttgccctggtcgcggagcacccgggcgctggcatcgagcgagtgcggcgcgaccacgggggcgagcgcctcgagcacgtcgcggccaccggcgtggctgacgacgcgtgcgaccggccgcggtccgcgttcgcgccaaaggcggcccaccgcctcggcggcgagttccggcacggtgcggtggagaaggttccggagcttcccgtcgcgctgctcgaaccgcagcttgtcgcggtgttccgggacgtgcgtggtctgaaaatcgaacgcccggagcggcagcccgtggggagaaccgcgccagatgctcgcagcggcgccgtcaccgaacaggcaggcgctgatgatcacgccgggatcgtcgtcgaggtagaaggcggcggagcacacctcgaccgcgatgcacgccacgcgcgcgtccggctcggcggcgagaatatggctggcggcgcggagcatgggaatggcggccccgcagccgagcccgacgagatcctgcagatgggcgttggcccgcaggcccagcgattccgccacgtaactgcttacgcccgggcagaggtagccggtgcaggtgcagacgaggagcgcatcgagttcggaggcgcgcagcccggcctgctcgagcgcgcgggttagcgcccggccggcgagtcggggggccgcctggcgaaacgcggcgttcagctcgtccgaggtgagatcaaagacgccggcgatattgggcagcgcgaaatggcgccgctcgatgccatgctccccccggagaatcgactgcaggatcagcatcgatcgcttcttcaaccggtcgcggacgcccgactgccgggcaatgtcccagcattccgcctgcgtgtagctggcgtcgggcacggcggtggcgagggcgtgaaggtacattccagaggacggaggacggaggacggaggactgacgacagacgacagacgacggacggcggatgacagacgactgtggatgggacggagggcggtgggcggaggacagaggattgaggtccggcggggattcagtgcagggtcgcgtaaagcgatttgaacggcagcagccgcgcccggccgagcgcggcgacgaaacgctgccgcgagggtcgcagcaggaacggatgcagtgcgccggcagaagcaagccgcagccggaaatgccggtgcagcgcggtgtggatcgcctgccgggcatcggcccagccgatccggccgtgggcataaccgagcagagggtccagtgcgacttccgcgctttgaaatgccatgctcattccgttcccggtgaagggcgggatcatcccgccggcatcgccgatctcgagccggtcggtcggcacgatccgttgggaaaattccagcgcggctaccgcgctgaatgactccgggcagagtttgccggccgcgatccgcgtggcgagtgcatccaacccggccgcgcgcaggtaacccagcagcagggcggggccctgcccgtcggcggcccgccggcggaacaatccacacacattgacccggccatcctcgatcccggcgagcccgacataggcatggtcgcccaggtgcagctcgagatcctctgccagctcgagagcttcaacatggatcttcagcccgagccatggcgaacggccgcgccggcgaccggtggcaatgacacggccgggggcgtcgtcgggtcgggccagccgggtgcggcagcggagttcgccgccggcggcgacaaaggcgcgggcgattcgtgcatcgagtgcatagcggctcagcccgagcgcgggctcgggaatctgctggatctggacgggcttttcaccggcgaaccatccgaccgatcggtgccgccgcgcatcgtccaggaagggagccagcccgagccgggcaacggttccggatccgagcccggtgatgaattcgccacacacgcggtgccggggatattcaccagcctcgataatcgtgaccggcaccgcctcgcggcggagcgcgagaccgagcgacagaccggccagcccgccgccaatgatttcaatgggagccgcgcgcgtcatggtgcgcgcacggcgaccagccggtagatgcccagccaggtgatctggcggcggatccgccatcggctcggctcgagtccgagcagccgcggaagttcgtcatcgcggaacccggccgcaatgctcacgtgcgcgtcatgcaggctgacatgacttgcgccgaacagtggcgcgactccgcggaacagcacctgggagccgcggcgtcgagcgggctctgcggccacgatcacccgcgcggtctttgtccattgtgcaccaagcgcgccgagttcttcgtccgtgaactggtgcaggatgagattggcgagaatcacggggtaatcggcgtaaccggggaaccgcctcaggtccgcggtgtgccactgccgatcagccggccaatcggcgggccgatcccagaggtcgagcccatcggtgcgaatcccggatttttccaggaaagcgacgagttcgccggtgccggcgccaatttccaggcagatctcggagggttccagcagccggggcaaaattcgggaaaaccagcggtaattacccacaatcgtgttgatcagccgcaggtcgcgccggttatgcaacgcatcgggatgatcggggggaagcgagtcgaggagttccggctgcagcgtgcgttgcatcgagggggtgggcgtgcgtcagtcgaaggttgcccggccaccatcagctgtccagagtcgcaggcagattcaatgagcctgcccacgctgcccaccaattccacgcccgacagtcccgccgttccacccgtgcccgtgctgccggtcgacctcattgcggaggcggcggccaattttccgcaccggccgtcgtgggacgagtacttcatggccacggcagtgctgatggcctcgcgatcgaactgcgaacgactccatgtcggctgcgtgattgtcacgggcggcgagcggaagaaccggattgtggccgccggctacaacgggtttctccctggcactccccacgtctcgcgactgcgggacggccacgagcaggcgacggtccatgcggaacagaatgcgattgcggatgcggcccggcgcggaagttccgtggaggggtgcgtggcctacgtcacccattatccctgtatcaactgcgccaagatcctggcggcggcgggcatcgcgcagattcgttatcgcgctgactacgccaacgacccgctggtggccccgctcctggcggacgccggtgtcacggtgctgaaactttgaccatgaggtccggtccgtcccactgccatgcgtgagcgccgcaagatcacccgggatacgctggcgggctccctgctgctggcgcacccctcgatgcgcgacccgaatttccggcgcagcgtcatcctgatgtcggcgcacaatgccgagggcgcgatgggcgtcgtgctcaaccgcccgatgcacaagcggctgggcgagttgagcggcgacttcgcgctcgggccgctggccggcgtgccgctgtttattggtgggccggttcagaatgatcagcttgtcctggcggcctggcagacccggtcggacggcttccggctgcacttcggaatcgagccggacaaggcgctgcaattgctggcggaggagggaacccatgtccgcgggttcctgggctattcgggctggtcggccgggcagctggagaatgagatgaaggtgcgcacgtggatcgtggcggatgtgccggaggatttgctgacccatccgcaggatgacaccttgtggcggacggtcctgggccgggagggtgcggaatggcggctgctggccggcgagcccgagcaccccgagcagaactgagtgttgccgcggtatcgcaggcatagcgcccgcgcggaaacgcagcgaaccctcttccccaaggcgcgcgcccgcgcggagcctggcagcccgtcagcaaggcccgccaggttgccgaaaaaaaatggcattgatgctggctgcgctcgactgcaagtccgacgggctgccaaggggacaattcagttgacaggccccgcggccgcctatgctttcaccacttttatgaaagttgtctcctccatcaaatcggccaagaagcgtcacccggcctgccaggtcgtgcgccgcaagggcaagatttacgtgatcaacaaggtcgagccgcgttacaaggcgcgtcagggctgaacattccaaaatttcccgccgtgaaagccgaaggccatcccactctcaacaacgtctgcttcatcgatgtcgcgaccggcaggcgtttcctcaccaagtccacgctgaagtcggcccgcaaggagcagattgacggcaaggactacttcgtcgtgctccgcgacgtgacgatggattcgcatcccgcctacaccggcgaaaagcggttggtcgacactgccggacgggtcgagaagttcacgacgaaattcaagcgcggcacggcgccgaagaagtaagcgccgttcgagtcgtcaccaggttgtttttgccctccggagacggggggctttttttgggctggttccgtgagccggctgaacctgcgcgcgacccacgatcggcctggccagcccaaactttttccgtgtgtttccgcggatccctgtcccatcctcggcgttttcccactcgtcatgcgcattcatcccttccaaggcctggttcccccgccggcatacgctcccgaagtcgcctgcgtcccatacgatgtcgtcaacaccgcggaagcggccgcactggcggcggaccggccgcacagcctgttgcacgtggatcgggcggagatcgatctgcctgcgggcacggacccgcacagcgacgcggtgtacgagcgggcgcgggataatttccacgggctgcagcgggccggcgtactggtgagggagagtgagccctgtgtgtacatttaccagcagcagatgggttcgcatgtccagcgggggctggtggccggttgccacgtggaggattacgacgcggggttgatcaagaagcacgagcgaacccgcaaggacaaggaggacgatcgcacgcgactgatcgacacgattggcgcgaacaccgggccggtctttctcacttatcgcgatcatccccgggtgaaggcactggtcgacgcgaagactcgggaggtgccgttgcacgatttcaccgcgccggatgggatccggcatacggtgtggcggattccgggcggacaggaatggctcgatgcgttcgccgcggttcctgcggcctatatcgccgatggccaccaccgtgccgccagcgcagcgcgggtcgcgcggctgcgacgggagcgtgctgcgcggcatacgggcgtggaggactacaactggttcctgtgcgttctttttccggcgagtgaattgaaaattctgccctacaaccggatcgtgagcgatctgcacgggctttcgccggcgaaattcctggaacgagtgaattcgattttcccggtggaggccggagcgtcacccacgcccgaaaccagcggccgggtgagcatgtacctcggcgggaaatggcacgggctgcggctggcggtcgatcccgcggcggatccggttgcgcagttggatgtgagcgtgctccaggacaagttgctcgcacccgtgcttgggatcgaggatgtgcggacgagcaagcggatcgacttcgtgggcgggattcggggcacggcggaactcgagcggcgggtcgatgcggagggcggggtggccttctcgatgtatccggtgagcctcgggcaattgatggcgatcgccgatgccggacagatcatgccgccgaagagcacctggtttgagccgaagctgcgatcggggctggcgatccacacgttctaatccggatgctgatgtatccgggttagttcgagcattgcatgggcggcggagggccattaccaacgcaatcatggacgggctgaaatctccggcggctgacgcgcgggcaaggcgatgaaggcctttccgggtccaggcggcgtgctgatgcgccggctcttgcgcctcctgcggtggcgcgtctggattcaggaaaagctgcagccgacggaatggcagatcacgctgctgtgggccgcgctcgccggctttctgggcgcccttgcctcgattgtgttcctgacgttgacggaaaatgtccacacgtggtttggcacttccgggctcggcgtggtggaatcgatgcagcgactaccctggtggggctgcctgctggtcccgacggcgggtggggcgtgcgccgggctcgtgctgatttttggccagaggctgacgcgcgcgcagagttcgacggactacatggaggcgattgtcatcggcaacgggcacgtgccggtgcgggcgagcctggtgaaatcggcggcggcgcttttctccatcggctccggcggttccatcggccgggagggcccgatggtccagctggcggcggtgctggcctcggcggtcggccgctggcggaagttttccccgccgcagctgcggctgttggtcgcttgcggtgcctccgcgggcatcgcgtcggcgtacaatgcgccgattgccgggtcgttcttcgtggcggagatcattctcggcacgatcgcgatggagagtctcggcccgctggtcgtctccgcggtggtggcgacgctcacgatgcatgtgctgacctcttcgcacgtgctgtatcgcgtgccgccgttcgaggaggtgtcggtggcggaattcggtccctacatcctgctcggtttcctggccggcgggctggcgccgctgtttctccgctcgctcaagcacgcggaggaattcttcatctcgctgcggctgccgattgtcgcccgactggcgctgggcggactcgcggtgggcgcgatcgcgatcaacgtgccgcaggtcgcgggcaacgggtattccgtcgtggtcgagatgatcaacgggaaggttttctggatgaccatcctggggctggtggcctgcaagtggctcgcgacgatggcctcgtttggctcgggggcgccgggtggcgtgttcacgccgtcgctgttcatgggtgcgggcgctgggctgctctttggcacggcggtgaacgcggtgtttccggccgccgcccgcgaccccaccgctttcgcgctggtcgggatgggcgccttcctgtccgccgccagccatgcgccggtgatgtcggtgatcatgcttttcgaaatgacgctgagctacgacatcatcctgccgctgatgctttgcagcgtgatcgcgtattacacggccaagagcctggaggggtcgtcgctctacagtgaggcgctgcgccggaaggcggcatcggcgccggatccgtcgctgaccgagggacgggtggccgacatgatgcgcgcgaatccgccggtggtcccggccacggcgcattttgccgagattgcgcggatgttcctgaatgtgcgcgtcaacaatctctacgtggtggatgatgccgggaaattccagggggtggtctcgctgcatgacatcaagccgtacctgggcgaaccggatctggcggagctggtgatcgcgcgggacatcctgcgcgaggattttccgcgggtcgggccggagcagttgctgacggatgcactggccggtttcatgggcgtgcaggcggagcggctgccggtggtcgagtcggatgggacgctccgcggcagcctggcgaagagtgatctgctgctcacgttggtggagaagcggaagaaggcggcggcgtagcgaaccgcgaaggccgcgaggaatcgagcggcgcgcagagccgacaaccgcgaatccggggaggtggtcgccggaatcgacgcgaatccacgcaaactcttgataccgacgtcggtttgcacccgcctaggcggggattcatcaaggaatccccgccgcaattcatcgaaaactgcgattgatccaaatagcggatactgctgtactccgcgttgtaagaacgcggcgaccgccagggttacccagtcccaatcaatccgcctgcccaacctggacaggcgatccagccatgaatcgtaccttccagggcttcgccgtatctccaaaaaagcagagcggcacctttcgatgccgctccaaagaaagcgctgtttatcccacggtgtgccctgacggcagaaagaacggggtgcgctaactactttgcttgattccgccgcgaagctgatccgcgtcctcacagtcttcaagaccgaaatccatcatgagcctcacgctagccttcgaccttggccacagttccatcggatgggccgtgctccgccaggaacccaccgttatgcccgagcttctcggctgcggcaccgtgctattcgagaagaactcagcactcgcgatcgaacgccggcggaaccgctcccaacggcgccacgtgcgggcaacgcgccgtcgcattcaacggatagagaagctcctcgagcagcgtggtgccctcacatccgcggcaatcgccgccgctcaccaacccggcgccggcgacgctgctccctggctgctcgctgcgcgcgtgctggccagcgacggtgtgcgagtcctctcttggccggaactctggcacgtgctccgctggtatgcacacaaccgtggctacgaatcgatgggccgagcggcggacgatccggatgccgatgagaatcacgagaaagttcagaatgctcgtgatgcgatgggtgagctgggggcaggatctatggccgaaacgatctgccgccatcttgggcaggaccctctcggaccgcatcgaatcgccgacgcccacgtaaagaactatctgcaggcgaatttcgcttttccacgcgaggtcgtcctttccgaggtcgagcggatcctgcatgcccatcgcggtcaccttcctggtctcgacgaaggcttcatccgcgcattgctgcatgacgcgagggcgctccgcattcccggtgtgtgtcttgcgaaacgttaccagcgcggactgctcttcggtcggctggcgatgcgctacgataaccgcatcattggccgctgcgcgttccagcagttggcgctggagaagatattcatcgccgagggcatgaccgccgaggctgcgcgggcaaaggcggaaaagctctcgaaactgccggcgaaacggtcacccgagttcctgcgctaccgctgggccatgatgctggtgcgaattcaagtggcaccctcgattgatgcgcgagtcccgctccgtcctttgtcgctcgagcagcggcaggcgctgcaccaagagatgagtgcccgcgggcggttcaccaagggggccttcaagcaggcggttcgagccctgccgggtgttgcacgtgataatctggatcaggtgctcgtgcatccggacgccgagaaggaactcgtgctcgatccggtgcaggccctcgtcacacaggaaaggtcgagccttgcggccatatggccgaccctcccctcaatgcttcaatcccgattacgcaatcggtggtggcgtcccgcggcgaacgaatgtggcgtttccctagtggagattcgtgagcagctagttgccttgggcggaaatcccaccgatttcgatgccgcgttcgaaagggtcataacccggccaagaatgaagcgattcaaaggtgcagctgtctcgcgcgaggaaattctcggtgagaagcaccgggcaaatctctctggtctcaccggccgtgctccgtacgcacgcccgctcctccaacgtgcgttcgagatcgtcgtcaacgaaggcgctgatccgaaggcgaaaggccagattctggaggaaacgccggacgtgcggaaacttcgcgactcacggccacttgatcgccagactaataaccatctggtgcggcatcggcttctgatcttcggccggctgattcgcgacctcgttgcccacccggattatgccaatggcgaagctagtagggtcgaaacagtagtcctagaggtcgcgcgggagttgcgcgaatgggcgggaaagaacgtgaaggagattgatgccgagttgcgcgaacgcacgaaggaccacactgccgtcgtcaagctgctggaagcacggctcccgaccggcacctcaagactcgaagtcgcgcgcctcatccgaaaggcgcgggttgcgcaggatctcaagtggacgtgcccatacacaggggagtcattcgagccgcaggaccttctcgatcggcgggtcgatctcgatcatgtcatccctcgctcccagcgaccctccgacgggctcgattcgctggtcctcacatttgccgaggtaaacaagtggaagggatcacgaacagcgctcgcgttcatacaggagtgcggcggacagtccgttccggcattgggccgccttagtatcatgacgccgcaacggtaccgcgaattcgtcgagtcactcgacactaagggacaccgcgacgatcaaaatcgtaagcggcggaggagggagttcttgctcctcgagcgctacgaagacgaacagcgggaattcctgcccgggcagctcacgcagacgtctcagctaaacaaactgggccgcctcgttgtccagcgcgaattgccgcacgtccgcgacgccgatatcgtcttcatgcgggggcaggtgaccgccgcagtgcgccgtgcgtggcgcgtgaccggatgcctcgctgcggctaatgtcgacgtgctcgatcccaagacgggcgatccattgccaaaggcggagatccgcgaaatcacgcacctgcaccacgccctcgatgcctgcgtactcgcatttgcgggaacactgctaccggaccgcaacgacctgtggctagcgatgcgagagcggcgaatgacgccggagcaacagcggagcgcgcgcgccaacggcttgttcgaattcaatggcgaaggttcgtggcgacttgtcgatctgccaaacgatctaaaagatcagattcgacgccggctcgcggagcggcgagttgtccagcacgtgccagcggatatgggtggcctgcgcgttgaggcaaatacccgacgcgtgctccaaatcgatgaaggtcgtgcgctactccaacagcgtgccgcccgtaatggcgacggctcgcgtcccccgccgaagcaaacgaaagaagcggtcgtgaagctatttggtgtgagcgatgggaaactggcagcgcttaagggcgttcgtgtgattacggacaattttggcgtggcggtgctcgaagagcccggaggaccgcggcgcgaccgtttcgtcattattccgcatcaccgcgtgtggaaacggctgcctgaactccggcgactcaacggcggaaaaccgccgcaaattatccgcaacggccagatgatcgcattgaagcgcggggcgccggcgcgactgggtcactggcgtgtgttttcaatcaagaacaatgcacgtggcctcgcgctggacctcggccgacccgatgcggtctcggccagctggaataatgttctcctggcgagtctcctgcgtgatggtgcatcactcgtgcaaggaaatctggccggctagctgagtgggtagccgccatgtcctaccacatcgtcagcatcgacgccccacaagcggatctgacgtgccgggatggacaacttgtctgcacgactgatgccggggcaaagaggctcccgctcgaagacatcgcctcgatcatcatcacgagcttctccgcccgcattcatagtcacttgtttctagaagcggcacgccatggtgtggcgatggtcatttgcgagaagtttcagccgatctccctgctcctgcctgcctgccggtcagctgacacgcttctgacgcgccgtcacctcaccctagccggcgcgacccgcgttcgcctatgggagaagacgatcgacgccaagtgtgcgaaccaggcgacgatcgcgcatcggattgccccggcaagtgccgcgacggcgcaattgctgatggcggcgcaggcccgcagcgcgcggaaggaaggcggctgcgcgaagctgttctgggacgtggtctcggaaggattgagcatcgagggattctcccgcggccgaaagctcggcggacttaacgatctgctgaactacggttacgccgtcctgctttcgtcagtgctgcaaaagctctacggctttggactcgatccgatggtcgggatctcgcacgcgatccgcgaacgcagcgcgccgcttgcctatgatttgatggaaccgtttcgcccatgcgtcgactggcgggtctaccagtgggtgagagatagaccgcacgcggaggcgttcaatgtgtccggcgagttccgccgctggattaccggtttctcactggaaagggtcgattatttcgggctcgatctcgacatccgcggatgcatcgaaggcgtggtgcgcggttttcggcaagctgtgctcaccggcagtgcccgccactatcggccatggacctggaaaagttcaaaatgggctggttagttgtggcgttcgacttgccggtcgtgacgaagccgcagcggaaggcagcgaccgcatttcgccagtttctgctcgatgacggtttccagatgatccaattcagcgtgtacgtgcggccctgcgtgagctttgcgcggcaggagacgcatctcgctcgaatcaagctaggcatccctccggaagggaaagtgcgggccttttttgtcactcgtgcgcaatgggagcgggcattcgtgatttatggttcgcctgcgaaggaggtgccagctgaggaaatgcctgagcaaatccagctctggtgagaggtaagtcatttataaaaaagctaatccggggggcggatcacgccccccccggatttggaatcaagacaaagcgccgccaccggcagcacccgacgcgtcagcgatcacgccccccccggatttggaatcaagacaaagcttcctactacttgtcgtctacggctaagaagatcacgccccccccggatttggaatcaagacaaagctgacgctgctacaggggacgcgttcggtatgatcacgccccccccggatttggaatcaagacaaagcaagctcgtcggcgataacgttgcgcgactggatcacgccccccccggatttggaatcaagacaaagctgactcaggg

SEQ ID NO: 1995 - DNA, 11063 bp, synthetic construct
  source 1..11063: mol_type = other DNA
  misc_feature 1..11063: note = Synthetic
agcgtcttgccctcgccggtggccatctcggcgatcttcccctcgtgcagggcgatgccgccgatcagctggacgtcgtagtgcaccatgtcccaggtgagctcgtggtcgcacaccgtgatcttccggccgcagagccggcgggcggcgctcttcaccgcggcaaatgcctccggcagcagctggtcgagcgtttcgcccgccttgaagcgctcgcggaactcggcggtcttcgcctgcagctgctcgtcgctgagcgcctcgtatgagcgttcgatctcattgacgcgcgccactatcggccggcaccgctcgaggaatttgcggtaatggcggccggagaatttcttaaggagccaggaaatcatgaaaagaggttgaagcaaagccggcccggccgggcttggcaaatgacaaatccccgctccttgaagcgccctccagattttttggcggaaaacggcccgtctcgcacgcgaattgctttccaaagatgttcccatgcccaccgccaccgattccgcccaaaacgaaaccacctgctccggcaccggcgcggctgcgcctgcgacgccctccggcccgttccgcagctacgacacgcagggctatttcgacgagatgctggacccctccggcggtccgcgcccgcattatgcgcggtttgcgcagcgtctcaccgggatgagccggaccgagttcgaggccaaacgccgggcggtcgacctcgccttcatgcgccagggcatcaccttcaatgtctatggcgactcgcgggggaccgagcggatattcccgttcgacctggtcccgcggataatcccggcggccgaatgggcctacctggagaccggtctcattcaacgcatcaccgcgctcaatcttttcctccacgacatctatcacgaccagcatatcatccgggacggcaccatccccgccgagtacgtcttttccgcaaaacacttccggcgcgagttcgtcaatttcccggtgccgcgcgacatctacattcacatctgcggcaccgacatcatccgggacgccgccggcaagtacctggtgctggaggacaacggccgctgcccctcgggcgtcagctacgttctggagaaccggcgggccatcaagcgaaccttccccgagagtttcgaggagaacggcgtgcggccggtcgaacactacccggccgagctgttgaaactcctcaaatacatcgccccggcgggaatcgccgatcccacggtcgtgctgctcacgcccggcgcgttcaactcggcctatttcgaacacacctacctcgcgcgccagatgggcatcgagatcgtggaagggcgcgacctcctcgtgcgcgaccagcacgtctatatgcgcacgaccaaggggctgcagccggtccacgtcatctaccgccgcatcgacgacgacttcatcgatccgctcgtgttccgccacgactcggcgctcggcgtgcccggactgatcaacgcctaccgggcaggccacgtctcgctcgccaattccgtgggaaccggcgtcgccgacgacaaggtcatgtactgcttcgtgccgcggatgatcaaatactacctcgaccaggagccgatcctgccgaacgtgcccacctaccttgccagcgaggaggccgaccgccgctatatcgtcgaacacctgcccgagctcgtggtcaaggcggccaacgaggccggcggctacggaatgctgatggggccgcaggccgccgccgccgagcgcgaggagttccgccgccgcatcgaggccgagccgcgcaactacatcgcgcagccggtcgtccgcctttcgcgacatccgacgggccatgaggacggcttcgcggggaggcacgtcgacctgcgcccgttcattctctacggcgagaagaccgttgtcgttccgggcggcctcacgcgcgtcgccctgcggccgggctcgctcgtcgtcaattcctcccagggcggcggcagcaaggacacctgggttctctacggaagcgaatgatcctcccatgctcagccgcgtagcccacaacctcttctggatgagccgccacatcgagcgggcggaaaacaccgcccgcctggtcgatgtcaacctgcagctcctcctcgacgtgcacaacctcaacgaccgcaccgtcgccgcatactggctcccggtcgtgcagagcaccggcgacgaggagctcttcctccagctccataccaaggccaccggacggaccgtcaccgagttcctcgttttccagccgctcaatccgaactccatcgtctcctgcatcgcccaggctcgcgagaacgcgcgcaccgtgcgcgaccagctgacgctcgaggtgtgggaggcgctcaaccgcctctacctgatgctccagtctccgcgcgccagggagctctggcgtgaaagcccccaggagttcttcgacgaaatcaaatccggctcgctccacctccagggactgaccgacgccacggtggtccgcaacgagggctggtatttcgtccagaccgcccgcttcctcgaacgggcggacaagacctcgcgcctgctcgacctgcgccacgcctccgtgcccgcgcgcggcgccccggccggagccgagccaagccagaccgacgccctggcgtggtccgccgtgctgcgttcctgcagcgcgtgggacgcctacaaggcgctccacggcgccgaggtgcagcccgcgctggtcgccgagtttcttctgttgtcagagggctttccgcgctcggtgcgcttctgcgtgcagcagctcaacctcgccctgcgcggcatctccggcgtcgccgaaaaccgcttcggcaacgaggcggagagactttgcggccgcctgctcgccgagcttcaattcagcaccgcggccgacgtcttcgactgcggcctgcacgcctatgtcgaccagctccaggccaagctcaacgccatcggagaggcgctctttcaaacctacattttgcaggccttccggctgcagtccgacgacgaactgcgccagcaggaggaacagcagcagcaatgaagctgcaagtctaccatcgcacgcaccacgtctacgcagcgttggtgcgcgacagcttcaacgaggcgcgcctcgagcccgtcgactgccccgagcagacccggcagagcttcctgctcaaggtcctgccctccacccggctttcgcattttcacgacttttatcgcaactgcgtccacgtcatcgacctcacgtcgccccatcaggagctgacggtcgaagccacctccgtcgtcgtcacgcgggaccttcccccgctgcccggcgatgccacccccgcgccagtcgccgcgctggcggcctgcgagcgtctcggcgaatgctacgattttctccagcccagcacctacgtccgcgccactcccgaggcctggcggctcgcgatcgacatcgccgccggccacagcgacgcctggcagatcgtgcaggccatcatgcgccatctcggcagcgagttcaggtacattcccgctgtgaccaacgcccacacgacaatggaggaggcgctccggttgcgccagggcgtctgccaggatttcgcgcacgtgatgatcgggctctgccgcgccctgaaggtccccgcgcgctacgtgagcggctatctctacaacggcccggccgacaggctcaagggcacgcaggccacgcacgcctgggtcgaagtctacctgccgggcgtcggctggcgcggactcgatcccaccaaccagcagccggtcagccagcgccacgtgaaggtcgccatcgggcgcgactacgccgatgtttcgccgctccgcggcacctaccgcggcaccgccagccgcaagctcagcgtcgaggtcctcgtcacccggctcgattcggaggaagccgcggaagaaggccctttgtcgccgctggcaggctagcaggtcgccattccatctcatgccgaggaacgcacccgtctcgggtgctggcgcaggcgtcccgcctacgcccaagtctggcggggcgccgcctcgctagacccgcccgcggaaatacgcgattgtccgcttcaagccttcgtcgagcgccacggccggcttccacttgagcgtgcggcgcgcgagcgagatgtccggccggcgctgcttcggatcgtcggacggcaggggcttgtgcacgatcttcgatttcccgccgacgagcttcaccgtgagctccgcaagctggagcatcgtgaattcatcggggttgcccaggttgagcggaccgaccgtctccgtctgcttcatgaagcggcagaacgcctcgatcagatcgcccacaaaacagaaggaccgcgtctgcatgccgtcgccatagaccgtgagatcctcgcccttcaacgcctgcacgatgaaattcgagacaacgcggccgtcgttgggcagcatccgcggtccataggtgttgaagatcctcgcaacccggatgtcgacgcggttctcccggtgataatcgaagaagagcgtctcggcgcagcgcttcccttcatcgtaacacgagcgcaggccgaccggattgacgtggccccagtaggtctcggactgcggatgctcctggggatcgccatacacctcggaagtcgacgcctggaacacgcgcgccttcacccgtttcgccagacccaggcagttgatcgcccccatgaccgaggtcttggtcgtcttgatggggttgtactggtaatgcggaggggaggccggacaggccaggttgaagatctggtccacctcgaccttgaagggatcgaccacgtcgtgccgcatgaattcgaagtggggattcgacagcagatggacgatgttgtccttcctcccggtgaacagattatcgagacagatgacgtcatggccatcgctgatcagccgatcgcaaagatggctgccgagaaacccggcgccgccggtcacgaggatgcgcatggggcggagactggacgggaaacagccgggttgcgagtccgctttggcaggccgcggcgacatcagctgcatcgttcccgcctagatcaaatcccgatggaggttcaagaaaccaaccaaatccggcaggcgttgcttcgccatcgtcatcaagtaatcgtccaccgattgaggtggggacttcagccgctctcgacacgtcttcgccgccccgcaaacggcctgtgggcggaggttgctgagatggccaagaaattcatccggatgttgaacttcgagatcgtacttcttcagctcggcctccggaaaatgcttcagattgtacgtcacaatgacgtcgcaccgccccctgatggcggcggcaacaacatggcgatcattcgggtccgggagcacaacgatcgggatcaacgcctcgaagccacagaccaaggcatcccgaacgttggaatccatcagttcccgagttcgccgtatctgttcaggctttagatccgacctatcccgtagcacggagcgcatccattcatcatggattgaagcgctccatttcgctcggaatagatcggtcagcgccaattggaggagcagatcccgcaaaggggcgggataaagcacgcaggagtcgtagagtgcagtataggcggccacggggtgacaaagaccacaaccctaataccccatgcccaattcctgcgcctggcgggcaagctcgtccaacgccgccaatcggtcgcgatcgatctgctgtttgaacaccatcagatccgaaaagagaatgcgccgatgggtccccaccttccgggcggggattttcttctgctcgatcaaacccacgacgaaaggcctcgacacattcaacaggttcgcggcctcctgcgtggtcagttccgcatggacggggatcattgtcacgctgttccccttcgccatctcagagagcagctcaaccaggagactaacggccgccgcaggcaacacagcaacttccgagcggccatgcccttcaccaatccgcaccctcaaacccgtactggcactgaggtgcggagcgaacaaacggctcgcttcacgagcgacctgacggtcttcgtcagtcggaatgatcgaaggacgagacggaacatcggagagtttcatagggtttccttgcagagttcgacactagatcaaacgaaacaaccgaagcaaacagaataaacgaataaatggtccgttggaccaagcctgccgattccgctgtttgcttcgaccttgcacattctgcaatcaaagagtagtcactccgttggaggaaaattcctggctctgccagcgttccatgccgatgaacgtatctgccctgccctcgtgtaaacacttccggcggcacctcgcgatgccgccggaaaatagaagtgctgttgaacacggtgtgctcgcctagcgaacagggacgcggtctgcactcactgactttgacttgattccgatgaacatggaaacaaaccccacccccgaggcaagccccaatccggccaagccccgcctttctttcgccttcgatgtcggccacagctccatcggctggtctgtacttaccgctcccgaatccggcgcacccgacatcctcggctgcggtgtcgtgctcttcgaaaaggatagtgcgctcgccaatcagcgccggctccaccgccagcagcgccgccatgtccgcgccacccgccagcgtatccggcggatcgagcaactgcttgcccacatcggcgccattcccgagaaggagattgctgcccgccacattgctgccggcggccacccgactccgtggctcctcgcggcacgcgtcctcgccagcggcggggcaaagacgctcacgtggcccgagctctgggatgtcctgcgctggtacgcgcacaaccgcggctacgagccgatcggcgaggatctcgacgccaaggaaaatgaggagaaacgcgaacaggctaaagtcggcatggcgcagtatggcaagtccacgatggccgagaccatctgcgcctggctcggccaggacccgctctcaccgcgagcaggcacaaccgtcagctataagtcccagaaggccgccttcgaacgctctgtcgtccgcgacgaagtccgccgcctcctcacggcccacctcggcaagctccatggactcaatgcgcagttcatcaccgcccttctcgacgacgcccgcgccatcgccatgccggatctccgcctgaccaagcgctacatcggcggcctgctcttcggccgtctcgcgatgcgctacgacaaccgaatcatcggcatctgcccgttctacgcctacgaactggagcaaaagcacatcgccgcggggcaacccgccgcagaggcgagccgcctcgccgagaaggaagccaagctaccctcgaaggactgcccggagttcttccgcttccgctgggccatgctgctcgcaaacatcgtggtcgccgcgccctccgattccggtctccgccctctcaacacaaccgagcgcgagaagctcacggctcaggcgcaggccgagggttacttcactccggcggcgttccgcaaaaccgtccacacgctcaccggggcagtccgcgacaacctcgaccagatgttcatggacgccaccgccgaaaagaacctcgtgttcgatccggggctcaagctggtgaactccaaggactggatatcgccgctttggcctcatctcccggaacgcgtgcggctccacgccctcaaccgctggcgccgcggtcgctcgcaaaccctcggcgccctccgtaccgaagctcagcaagctggatacgacctcgcgccgttcgaagccgccctcgccgcgctctgtgttccgaagaagcccggtcgaacgaccaagaaggaaaaccaaccgccgacacctggccagatcctcgaagccaagtactcggtggatctgctcggcgggcgcgccccgcacgcacgcccgatcctcgtccgcgcaaccaacgaggtaatggccggccgccacccgcgcgaggaaggcggctgcctatacgagacgcccgacctccgcggcgctcgcgagcgccgcacactcgaccagcagaccaacaaccatctcgtccgccaccgcctcctcattctcggccgactcgtcgcgcaactcgtcgccgatccggcctacggcgccggcgaacccgcccgcgtcgcccgcctgaccctcgaagtgaaccgcgacctccgggagatggccggactcaccgcacaggacatcgccaaggagatgaacgaacgcctgcgcagccatggcaaagtctcgcagcgtctcctcgacgatctcccacccgaacaccactcccgcatcaacgcctcgctcatccgcaaggcccgcatcgccgacgatctcggctggcattgcccctataccgggcaggagttcgagcccatcgatctcattaccaaacgggtcgatctcgaccatatcatcccccgatcccaacgcacctccgactcgctcgattcgctcgtcgtcaccttttccgagatcaataagtggaagggcgcccgcaccgcctggcagttcatgaaagagttcgaggccaggccggtgcccggacttccccaatactcgcttaagcaactcaagcgctacgaagccgacgtcaaagccctggacacccgcggccaccccgacgaccaaaaacgcaagaagcgccgcatcgagaaactcctgctggagaagttcgacgagaaagccggtggcttcacacctggccagctcacgcaaacctcgcacctctctcggctcggccagcaagtgctccgcgcccccttcgcacaactcgaagacggtccttcgttcgtagccctgcccggccaggtgacgggacaggtgcgcgcagcgtggaaggttctcgcctgcctcgacaaagccgcgccagacgtgatggagaagaccctcgatgctgaaggacgtgagcatttggaaccgaggacgaagaccgagatccgcgacatcactcatttgcaccacgcgctcgacgcatgcgtgctcggtctcgccgcctcgcgattccccaacaacggcgaagtctggcgcgccctcctcgaacgccgccccaaccccgcgcaacgcgcgttgctggaatctctcgacctcggggacttcgatgcctcaggcggcttccgtctccgcgacctgccggagtcgttgaaacagcagctccgcacacgtctggccgaacgccgcgtcgtccagcatgtgcccgccgacatgagcggtatccgggtaaagcagaacgtgagaggtatcctcgacgcctctgatcctgaattcctgatcctgaagccgggtatcggcgacgatggcaccaaacagaagaaaccagagaaggtgcttcgtagtaaggttattggcctccagccaggaaagctcagccagttgaagggagttcggctattcgacggcaatttcggcgttgccatcctcgacgacgataagctcccgcccaccgagcgcttcgtcatccttcccttcgcccgggtctggcagcgattgcaggcgctcgaactgcgcaacggcggcaagcgaccgaaggtctggcgaaacgggcagatcattgccctccccaagggagcacacgttggtcggtggcggatctactcagtgatgaacaccgctgacggactcgttcttaagctcggccgcgtcgatgggctcgactgggagtggaaactcgctcttcacagcctgctccgcgacggcgcagagcgtttttcgacgaagctcgatggtaacctataggatgccatgtcctaccacatcgtcagcatcgacgcgccccaggccgatctgacgtgtcgcgatggccagctcgtttgcaccaccgatccgggcacgccaccgcggaggctcccgctggaggacatcgccgccatcatcatcaccagcttctctgcccgcatccacagccatcttttcatcgaagccgcgcgccatggggtgtcgcttgtcatttgcgaccgctttcaacccgtcagtctgctcctgccggcctgccgttcggccgatacgctgctcacccgccgccatctcaccctaccggaacccgtgcgacggcggctatgggaaagagccatcgatgccaagtgtgccaaccaggcgactgtggcccaaaagatcgcgccattcagcaattccacacgcgagctggcccgggccgcgcaggcacgcactgcccgaaaagaaggcggatgcgcgaagctgttctgggatgttgtcgccgaagggctccggatcgagggatttgcccgaggcagaaagctcggcgggctcaacgaccttctgaattacggctacgcagtgcttctttccaccgtgcttcagaagctttacggcttcggcctcgatccgaccatcggcatctcacacgcgatccgcgagcgcagcgccccacttgcctacgatctcatggagccgtttcgcccctgtgtggactggcggatctatcaatgggtgaaagagcgcccgcacgaggaggcgttccaggtcaccggggaatttcgccgctgggtcaccggcttcaccttggagcgtgtcgattatctcggcctcgaaatcgacattcgcggcgtgatcgagggctcggttcggagcttccggcaagcagtcctcaccggcatcgccagatactaccgcccatggacctggagaaattcaaaatgggctggctcgtcgtagcgttcgacctgccggtactcaccaagccgcaacggaaggctgcaacggcgttccggcagtttctgttggacgatgggtttcagatggtccagttcagcgtctatgtgcggccgtgcgtgagcttcgcccggcaggagacccacctcgaccggatcaagaagggagtcccgccagaggggaaagtgcgggcgtttttcgtcacccgcgcccaatgggaacggtcattcgtgatctacggcagcccagccaaagaggtgccggcggaggaaatgccggagcaaatccaactctggtgaccgggaaaatacggttccgccccggccaagttgcttgcgacgagcgacttggctggggcggatgctctccgccgcggaattgg

SEQ ID NO: 1996 - DNA, 10552 bp, synthetic construct
  misc_feature 1..10552: note = Synthetic
  source 1..10552: mol_type = other DNA
cggcaacatctgcacgcgctcctgcaacttctgcgcgatcgccaccggccgccccaccgagctcgatctcggcgaacccgcccgcgtcgccgatgccgtggcgaagatgaatctcaaacactgcgtcgtcaccagcgtcgcccgcgacgaactcaacgacggcggcgccagcgtctgggccgccaccatccgcgccatccgctaccgcaatccgaacaccgcgatcgaagtgctcgtgcccgacttcaagggcaacaccgcgcacatcgacatcgtgctcgatgccaagcccgacattttcaatcacaacgtcgagacggtcgaacgcctgcaaaaacccgttcgcgtgcaagcccgctacgaccgttcgcgcggcgtgctccgtcacgccaagagccgcggtttcgtgaccaagaccggcatcatgctcggcctcggcgaaaccaaggaagagatcgagcagacgatccgcgacatcgccgctgacaagaccgacattctcaccatcggtcagtatctccagccgacgccgcaacacctccccgtcgcccgctgggccacgcctgaggagtttctgcactggaagcagtttggcctctctgtcggccttggcgtcgtcgagagcggcgcgctcgtgcgctccagctaccacgccgacgagcagtcgcagaaatacaccggcgtcgagcatctcaacaacgagaacgccctcgccagcgcctgagtcgcgcgaagcgaaatcgttcttcgttctcttgctcgttctcgttctcgaaccgcgttctgcgagaacgagaaagagaacgaagaacgagaacgatccggacaccatcgactcatcgtcgacgccaacgtcgctcgaatcgcgaaacgccctcgctctcgctgtcattctgagcgcagcgaagaatccagtgggcgcttcgccgccggttcagcatgccatggtccaagtggattcttcgctccgctcagaatgacaaaccaggcggagccgcgccccaccgcgtcccgggtcgagccaaggtgcgcaccgggtcgagccacagtccggctcgacgcgtgctttactccggcacggcccaagccagattgaagtccgcgccgggaccttgcgcgagcagccgcgcgagactttccagcgagggcttcaccgcttcgtcgaagcgccacggcggattgatgaccgcgaggccgcagccgcgcattttcagcggtgagttttctcctgcgatcgcgatttccaccgcgagggtcggcggcggcttgagcgcgatgagctcgtcgtaaaacgcatcaatcttcgcgcgactcgtcagcggataccagatcgcgaacacaccgctcgggaaacgctgcagcccgccgcgcaggccttcgacgatctgcgcaaattcatcctgcgcttcgaacggtggatcgatcagcacgagcgcgcgccgctcaggcggcggcagcatcgcgcggagcgccacatagccgtccatctcgtgcacggagcagcgatcggtaaattgaaactccgcgcgcagcgccgcgctctcggcgggatgtttttcacagagcgcgagccggtcctgcgcccgcacgagcgagcgcgcgatgtgcggcgagccgggatagaagcgcagctcgtccgcgacgttgccctgattgcgatcaaacgtccggatgcgctccacataatccgcgagcagcggcgtgagcggctcgtccgtcgcgacgagacggccgatgccatcgggccattcgggtttgcgttcgagcgaatcgccacgcgcggccgtctccaaatcgtagcgtccgcgaccggcgtgcgtgtcgagatagagaaacggtttctccttcttctgcagaccgcgaagtagctcgagcaaaaggacgtgcttgaacacgtcggcgaaattgcccgcgtgaaaatggtggcggtagttcatccgcgacttagccccacaaataggcggccattgaacggcctgggcccgaactttgtgcactctgggtcagcgccctgtgctctctgtggctcatgtttggacgattccccaactcagcccgcgacgggaaccttgatgacggttttgcggaccatcgcggagccgtccggcacccggagcgccggcatatgcacatccactggaaaaaagatcgccgcctcacccgcccggacgcgcagcaccgacgcgccggcgaggtccgcgtatttgatgaagtcgcgctcttcgacataaggctcgctcacggtcgcgcgcgacagctccacgacttccatcagctcttcgccttcgacgatcacctgcacgtcgatgtagcggcggtgcgattcgaaaaacccatcgggccggcgacgcgcttcatagacttgttcgagcgcaaacgatccgcccggcaactccacgcgctcggtcacgcccgcggccatcgctgcgagtcggcggcgaatcgccgagtccgcgcgatcgagatccgcaagatacgcgaacgccgccgcgaactgatcgcggtcaggaacttgcgcgcgcaaggtggcgatgctgccgaggagagccatcggcccacttttcgccgggccgcggggctggcaagcgccgaaacctgccgccgcgcactgcgacgcgtcgcgcgcagctcggcagttccccgatatgccgaatgcttgcgtcgcaaatcgctgacaccaaacctgctttccccatgaaaaccccactccgttccctgttcctcctcgtcaccgcgctggtgttgcccgcggtcgtccatgccgctgcgtttgaaggcaaagtccggatgaagatcaccgccgccggcagcaagtcggcgcaggagatgacctacagcagcaaggccggtttgctccgcactgagatcgacggcaaaggcggcgagagtttcgcgatgatcatgaaccacgcgaagcgggaaatgatcatcctcatgcccgagcagaagatgtatatggtccgcccgatgcccgcgatgaacgaactcgccggtgctgacgatggcgccgacgacgtgaagctcgaaaagacgtccgagaccgaaaaaatcctcggctacaccgccacgaaatacatcgcgacctcgaaggaaggcgtcaccgacatgtggctcaccgaggaactcggctcgttcatgggcttggacgccagcgccaacgccaatccgatgggcggtcgcccgaaagcccccgccgcctgggaaaaggcgctcatgggcaaagagtttttcccgctccgcatcgtcagccgcggcaagcgcaacaaggaggagttccgcctcgacgtcgtctcgatcaacaagcaatccctccccgactctgaattcgcgcctcccgccagcttcaaaaagttcgacatgggcgcgatgatgcagggcttcggcggctgagcccgcatcctgctttcgttttcaaacacactgtggcttccacgttcacccgcatcttttccgacctgcactacggcgatcgctcgagcacgcttcgcgagctcgcgagtcttcgcccgctgctcgacggaccggaccgggtgatcttcaacggtgacacactcgacacgcgcccgagccgccaccccgagcgcgtcgccgaactgcgcggcagcgtgctcgacttcgtgcaacaccacgcgccgcccgcgacgttgatcacgggcaatcacgatcccgacatctccgacgtccacgcactcgaactcgccgaaggcgaagtgctcgtttcgcacggcgacgtgatcttcgacgacctcgtgccgtggagccgcgaggccacacagatgggccggctcatgcgcgaggcgctcgccaccttttccgaaagcgaacgcgccaccctcgccgcgcggctccgcgcgatgcggcacgcggccgcccagattccgcagcgccatcacaccgaatccgacgcgctcaaacacgcgatcggtttgttcaccgacatgtgctggccgcccacgcgcgtgctccgcgtcgtgcaggcgtggcgcgacacacctcgtctcgccgccgcgctcctcgcgcaacaccgcccggacgcccgcgtgtttgtaatgggtcacacccaccgcgccggcgtgcgccagatcggtggcggcaaatggttgatcaacaccggcgccttctgcccgcccacccgcgcgtgcgtggtcgacgtgagcgcggaaaaactcgttgtccgtgaagtcgagcgccgccgcggcgtctatcggatcggatccacgcgcgcggaattttcgctggcggcggaaccggcgaccgtgacactcgccgcatgagcatcactttcggttggtggacgcgcgaccctgagctgggcaagtatcaggtttccgtctcggtccacggcggaaacatcgagtggacccgcaaacacggtcaccatcaacggtgggaaccgcacacgcccaccgaagacgatcgtgaacgcctcgtcgacgaagcgagccggcgcatcccgcgccgcctgatcacgcaaaagcaattcgacgaaatcaaacgcctcgccacgcgcgaaggccccggcgccctctccggcatccgcaaccgtccccccggtccggagtaagctggggcggcaagcggccgaccacgtcaccattccaaaagaaaaacccgggatattttcccgggttttcttctagaagcgctgtttaccacggtgtaactgcttggcagttagttttaacgggctgcgctcactgactttgacttgattccgcagccataacttcaactcgactcccaaatttcaagtagaaatgcaaatgctcgatttttattgtaatcatgtctgccctcatacatatcccgatcgtgtcacgatcttggtctttaaagtgggtccaaaccatgagcgcagccaagagcgtgatgccgtgcgaaacagaggacgtctgccctcagctttgccttggttctaggcagcactccgtaagggagtgctgcctttacattttatgcccctcctaaacttcgccttcgacgtcggccacagctcgatcggttgggctgttttatccgctgctcagaactctgctccctccgtccttggatgcggctcggtcatcttcgaaaaggacagtgccttggcgaaatcccggcgcttgcatcgacagcagcggaggcatgttcgcgccacacgacagcgcatcgcccgactcgaaaggttgcttgttcaccttggagcgttctcagccgaagagctcgcccgtaaacacagcgcgaacggaggaagccccacgccgtggttgctcgcagcgcgtgtgctcgcgagcaacggtgagcacgcgctgacgtggagtgaactgtgggatgttctccgttggtatgcccataaccgcggctacgaagcgatcggagccgatgaagatgaggcggagaacaaggagaaacgggctcacgctcgtgaagccatggagcggtttggaaaaaacaccatggccgagacgatttgtgcatggttggggcaagatcctctcgctccccggagcgggacaacggaaagctacaaagcgaaagacgccgctttcgatcgcgcagtggtggtggatgaagtccggcaagttctcgcacatcacacaggcaaactaccaggcgtggacgacgcgttcgttcgcgcgctgctggaggacgctcacgcgattgtctgtcccgacattcgcctccctcgacgttatagaggcggtctacttttcgggcgcctagcgactcgctaccacaaccgcatcatcggtcggtgccccatttccggtgagaaactcccgctcaaggactgccccgagtttcttcgtttccgttgggcaatgctgctggccaatatcaatgtggcctctgcaagcgaccaatcgctgcgtccgctgagcaaagaggagcggagcgcattgacccagcaggcgaccacaaagggctacttcacgcccggcgagtttaggaaaaccgtgcgcgcgttaactgggtctgtccgcgacaatctcgaccagatgttcatggacgcgacagcggcggaaaacctcgtgctcgatcctgcgctcagactggtttcgaccaatcgatggatcgccgctgtgtggccccatctccccgagatcgttcaacgccacgccctcaaccgctggcgtcgaggtcgatcccagacgctcggcaaactgcgcgacgaagccattcgaagaggtgccgacatcagcgcgttcgatgccgcggtcgcccaactctgttctgtgccagagaaacgctccggaaaaaaaactccgacaccccctcctaccgccgcacaaatcctgactacctcctttactgtcccacctctcggcggtcgcgctgcctatgcgcgcccactgctactctccacttatcaacaagtgatgagcggcacagtgcatccccgcagcgaaggagggtgtttgtttgaaacgcccgagctccgccgggctcgggataaccgtccgcttgatcagcaaaccaacaaccacctcgtccgacatcgtcttcaaatcctcggacgcctcctccagcatttgattgctgactatgcaggcggggatgcctcgcgcgtgcaacgcatcaccctcgaagtgaatcgcgatctcagagcgatggctggactgaccgctcaagagatcgccaaggagatgaatgagcgcctccggaatcatgcgcaggtttcgaaacgcctgctggctgaattaccgcagggaaccaagatcaacgcctcgttgatccgcaaagcccgcatcgccgacgaccttggttggcgctgcccctatactggccacgactttgagccgatcgaccttatcactcgtagagtagatttggatcacatcattccccgctcgcagcgcccgtcggactcactcgattcgctggtggtcacgttttcggagattaacaaatggaagggcaaacgcaccgcatgggagttcgttcgcgccgaggagacgaagaccgttcccggattgcccaatctgcaaatcaagcagctcagccgctataaacaggacgttgaagcgctcgataaacgagggcacttggatgatcagcgacggaagaagcgccgcgtcgaaaagctgctgctcgaacgctacgaagaaaaagccggcggcttcactcccggccagctaacccagacctcccaactcacgcgcctcgggcaacaagtgctgcgagctccgtttgcccacctgccttcgccccccaccttcgtcgctctgcccggacctgtcactgctcgtattcgtgcggcttgggacgttcttggttgcctcgccgaagcagctcccgccgtgctggagaagtccgtcgatactgagggaaatgaacggatcgtcgtaaaaaacaaaaccgagatccgacaaatcactcatcttcaccatgccctagatgcgtgcgtgctggggctggccgccgcgttaatccccaaccaaggcgacgtttggcgtttgctgttggaacgacgcttgaacactgaacagcgtggcgcgctggaaaaactcgacttgggcgacttcgacgcaaatggcggctttcgcctccgcgaccttccgggcgacttgaaacaacagatccgagaccggctggccgaacggcgcgttgttcaacatgtgccggccgacatgagcggcatccgagttgaagaaaacacccgtggtgtgatcagccgcgagaacggacgagtcaccctacggcagcgaaagaaaaacgccgacggtaaaatcgtcaccaattgcacgaccgaactcgaaaccaaagtcatcggcctgaacccggacggcaaactgagcaaagttcggggcgttcgagtgatcgcggacaacttcggcgtagctattctcgataaccccgaaatccctccagccgagcgcttggtcatcatccccttcgcgcgagtttgggcgcaattgggagcgctcaaacagcgcaatggagggaagcctccgctgatttggcgaaatgggcaggtgcttaagatcccagccgggccacgtgccggactgtggcggatcttctcgatcaagaacaatgcaagcggcatggccttggacctaggcacagtcgagacggtgagaccaagttggatcaacgtcctcctgaagagtctacttcgagacggagcgctccgtctgaacaccgacttaaccggtcgcgcgttcccgcaagactgagaactctccgatgtcctaccacatcgtcagtatcgatgctcctcaggccgatctgacatgtcgcgatggacaactcgtctgcagcacggaccagggctcgaagcgcgtgccgctggaagacgttgcctcaatcatcgtcaccagcttctccgcgcgcattcacagccacttgtttctcgaagccgccaaacacggcgtagctctcgttatctgcgagcggtttcaacccgtctcgttgctgcttcctgcatgtcgctccgccgacacgctcctcactcgcagacatctcacgcttccggaacacgtgcgctcacgcctctgggagaagaccattgacgcaaagtgcgcgaaccagcttcaagtcgcccggcggattctaccagacgctcaaaccactcacaggctcgccgatgccgctcgggcgcgtagcgcccgcaaggaaggtgggtgcgccaaactgttttgggaagtcatcaccgaaggactacgcatcgaaggcttctcgcgcggacgaaaactcggcggtctaaacgatctccttaactacggctacgcggtccttctctcgaccgtcctgcaaaagctctatgcggtgggactcgatccgatggtcggcatctcgcacgccatccgcgaacgtagtgcgccgttggcctacgatttgatggagccatttcgcccctgcgtcgattggcgtgtttatcaatgggtgaaggaccgtcctcaggccgaggctttcgctgtcaccggagagttccgaaaatgggtgacgggcttttcgctggagcgcgtcgactacctgggcctcgaactcgatattcgcggctgtattgaaggtgtcgtccgcggcttccgccaggcggtgatcgccagcacctctcgacactatcggccatggatgtcgaaaagctgaaaatgggctggcttgtcgtcgcattcgatctgccggtcgtcacccgggctcaacggaaagctgccacagcctttcgagagtttctcatcgatgatggatttcagatgatccagttcagcgtctatgcgcggccatgcgtgagtttcgcgcgacaggaaacgcacctcgaccgtgttcggaaaggcatcccaccggaaggcaaagtccgcgcctttttcgtgactcgagcccaatgggaacgcgcttttgtgatctacggctctccggccaaagaggtttcgcccgagaaaatgccagagcaaatccagctctggtaagagctaagttattcaaggaaaggtcatttcgcggagcggagcttccgctccgcgaaattggaatcaaggcaaagccgacgacatcgacgactacctctggctctggagcttccgctccgcgaaattggaatcaaggcaaagcggcgcgagcctcggcgtaggccttggcgaggagcttccgctccgcgaaattggaatcaaggcaaagcgtcgaagcggtcaacttctccgcgccggtcgagcttccgctccgcgaaattggaatcaaggcaaagcaaaggtggctcacagagtcccgaaaattagagcttccgctccgcgaaattggaatcaaggcaaagcattgtgaataccaagggtgaaatcttggggagcttccgctccgcgaaattggaatcaaggcaaagccatgacgaagagttcgcgcagcgcgtccgcgagcttccgctccgcgaaattggaatcaaggcaaagctactttccgcaactcgacacccgccgcgaggagcttccgctccgcgaaattggaatcaaggcaaagctctggtttgtcacccatgccggcgtgccaggagcttccgctccgcgaaattggaatcaaggcaaagcctcgaccggataggtgacaccctcggcaatgagcttccgctccgcgaaattggaatcaaggcaaagcacgacaaccacgaacctcttcgacaagattgagcttccgctccgcgaaattggaatcaaggcaaagcttcgagaaacaagccggccagacggccggtgagcttccgctccgcgaaattggaatcaaggcaaagctggaggacagaagatctctggacctacttcgagcttccgctccgcgaaattggaatcaaggcaaagcgcgtggaaagccaaacaagccaaccaaggagagcttccgctccgcgaaattggaatcaaggcaaagccgatggcccgtgcgggccgagctcgtgcacgagcttccgctccgcgaaattggaatcaaggcaaagcgccgaggaacgccacctcgccaaactcgccgagcttccgctccgcgaaattggaatcaaggcaaagccgtgacgaggcggaaatgcgcgcctttgaggagcttccgctccgcgaaattggaatcaaggcaaagcctgaatcaccgggtgctc

SEQ ID NO: 1997 - DNA, 9019 bp, synthetic construct
  source 1..9019: mol_type = other DNA
  misc_feature 1..9019: note = Synthetic
gacgaacaaggagctcctcgacgagcgcgccttcgtcgccgacatgatcaagtaaggaatcgttctctttctcgtaatcgttctccttctctcaggcgcccggcaacgggcgcctttttatttccgctggcgactgcgagcgccagcgagcagccgacgtagtgcttgcatcacgacacaccgaattttcccacgaggcacattcgctgcgctattgcgcccacactgcattttcgcccttatcgccccgacgcgcatcccagccgcgctctacgtctcagcccctccagtcctgcgacgctgaatcctgcttcaacacctccatgccccgcacccgtcaaggcctcttcacggcttggaaaaacatttcggcggcacctttcgatgccgccgaaaaagaagcgctgttgaccacggtgtgttcgcctaacgaacagagcgacgggctgcgctcacttactttgacttgattccaatgcaaaacgacacagctcagacttcttccgcaagccgaaactccgctcctctttctttcgcattcgacgttggtcacagctcgatcggctggtccgtcctcaccgcacccgcgagcggaatgcccgacatcctcagctgcggcgtcgttctcttcgagaaagatagcgccctcgctattcaacgtcgccagcaccgccaacagcggcgacatatccgagctacacgccagcgcatagcgcgaatggaacgtctactcagcagtctgggtgttttcagtgccgaagagctgaaatcgaagcatatcgcgaatggcggcagccccaccccttggttgctggccgcccgcgtgctcgcaagcaacggtcaacaaaccctcaactggcccgagctgtgggatgtgctgcgttggtatgcccacaaccgcggatacgagccaattggtgccgacgaagacgaagaagagaacaaggaaaagcgcgctcacgcccgagaaggcatggagcggttcggcaagcaaaccatggccgagaccatttgcgcgtggctcggacaggaccctctcgcgcctcgttccggcactaccgaaagctataaagcaaaagacgctgccttcgaccgccacgttgtgcgcgaggaagtgcgacgattgcttaccagtcacatcggcaaactaccttgcatcgacgaggatttcattcgcgcactgctcgatgatgcccaacccaaaccgtgcgccggaatccgtttgccccgccgttacaccggcggattgctgtttggtcgcctagccacccgttatcacaaccgcatcattggccgctgccctatttctggcgcaaaactaccggtaaaggattgcccggaatattatcggttccgatgggcgttacttttggcgaatatcacagtcgcgaccgctgcagactcaccgcttcgagaacttaccgcgacagagcgagctgagctcactaaaatcgcggaacgtgacggatacttcactccagccgaatttcgcaaaacagtccgcactctcaccggagccgtgcgcgacaaccttgaccaaatgttcatggatgcgaccgcggcggaaaacctcgttctcgatcctgcgctaaagctcgccaccaccaactcgtggatcggccccttgtggctgcaccttcctgaaaacactcgtcgacacgcactcaaccactggcgccgaggacgcacacaaacccttgccgaccttcgcagcaaagccgcttccagtggagccgacctgaccggattcgatagtgctctcgcgcaactctgcactgcacccgcgcggaaatcgcggaagaaagaacccgtcccgccgcccaccgccgatgaaatcctgagcacccgattcgctgcgccattaattggcggccgcgccccttatgcacgacccctgcttattcaagcttatcaacagtcgatgcaagggcgccatcctcgcgccgaagatggatgtctcttcgaaacaccggaacagcgtcggagccgggatcaacggacgatcgatcagcagaccaacaatcaccttgtgcgccaccggctgcagattctcggtcgcttggtcgcccaattgattgccgatcccgcctacgccaatggcgatgctgcgagggtggaacgcatcacactcgaagtgaatcgcgacctccgcgagatggcgggactgaccgctcaagacatcgcgaaggaaatgaacgagcgtctgcgcagccacgcgcaggtttcaaaacgcttgttggccgaacttccgcctggcacccgcatcaatgcttcgctgattcgcaaagcccgcatcgccgacgatctcaactggcaatgcccctacacggggcacgacttcgagcccgtcgacctcgtcactcgccgggtcgatctcgatcacatcattccgcgatcgctgcgtccctccgactccctcgactcgctggtggtcacattttcagaaatcaacaagtggaaaggtaatcgcaccgcgtggcagtttgtcgctgacgaagaaacaaaagccgtgcccggcctgccccatcttcacatcaagcagcttcgtcgttacgaagaagacgttagagctttcgacaaacgaggccatatcgacgaccagcggcgcaagaaacggcgcatcgaaaaactcctgctggcccgctacgaggaaaagggcggcggatttactcccggccagctcacgcagacctcccagctcgcgcgactcggccagcaagtgctacgcgcaccgttcacacatctcgcccagccgcctgttttcgtcgcgttgccaggcccggtgaccgctcgcgtgcgcgccgcgtgggatgcgctcggctgccttgccgaggctgcgcctggcgtgctggaaaaaaccaaagatgcagacggccgggaacattttgtcgttaaaaccaagaccgagatccgaaacatcactcatctccatcatgcgctcgatgcctgcgtgctcggcctagcttcggccctcatacccaatcgcggcgatgtttggcgtctccttcttgagcgtaagctcaaacccgaccaacgggcagatttggaagccctcaatctcggcgattttgacgccaacggcgggtttcgtctgcgcgatctgcctcactcgttgaaacagcagattcgcacccggctcgccgaacgccgcgttgtgcaacatgtgccggcagacatgagcggcttgcgcgtggaggagaacacacgcggtgtgctgaagcgagagaacggccgcgtttttctacgccagcgaaagaagaataccaacggagagttcgtcgtgaatcgcactgacgaactggaaagcaaagttgtcggactgaacccagaagggaagctggccaaaatcaaaggggttcgcgtagttaccgacaactttggcgtcgcaattctcgacgacgaaaagctgccgccagccgagcgttttgttgtcatcccgttcgcacgagtttgggagcaactggaaaccttgaaagcacgcaatggtggcaggtcgcctcaggtgtggcgtaacggccaggtcatcaagctgcctaaaggaccacgcgctgggcattggcgcatcttttcgatcaagaacacctcaaacatgggcctagtgctcgatctcgggactgtggaggcaatccgccctacgtggatcaacgttctgctcaaaacccttctccgaaacggagcatcacgagcgatcacaactcttgcggggtccgaagcgcgaaacgcgtaacacatcaactctatgtcctaccacatcgtcagcatcgatgccccccaggccgatctgacgtgtcgagatggacaacttgtctgcacgtcggagggcgtggccaagaaactgccgctcgaggacatcgcatcgatcatcgtcacgagcttctcggctcgcatccacagccatctttttctcgaggcagcgcgccacggcgtggctttggtcatctgcgaaaagtttcaacccgtaagcctgctcctgccggcgtgtcgatccgcggacaccttgctcacccgccggcatctcaccttgtcggacacgatgcgcacacgtctgtgggaaaagaccatcgacgccaaatgtgccaaccaagctttcatcgctgcccgcattgcgcccgacagcatgagcacacgacaactcgcgagtgcggccaccgcccgttcggcgcgaaaagaaggcggatgcgccaaactgttttgggatgtgttcagcgaagggctgcgcgtcgaaggtttctcacgtggccgaaagctcggcggtttaaacgacctgctgaactacggctacgccgtgctactctcgacagtgcttcagaagctctacggctttggactcgatcccatggtcggcatctcccacgcaatccgcgaacgcagcgcaccgttagcctatgatttgatggagccctttcgtccttgcgtcgactggcgtgtgtatcagtgggtgaaagaccgcccacatcaggaggccttcatcgtcagcggcgagtttcgccgatgggtcacggggttctcgttggaacgagtcgactacctcggcctcgatctcgatatccgcgggtgcatcgaaggggttgttcgcggtttccgccaagccgtgttgaccggcagcacccgccactaccggccatggatgtggaaaaattcaaaatgggctggctcgtagtcgcgttcgatctgcccgtcttgacgaagccgcagcggaaagccgccacggccttccgaaagttcttggtcgatgacggattccagatggcccagttcagcgtttatatccggccctgtgtaagctttgcccgtcagcaaacgcatatggaccggatcaagaaatgtatccctcccgagggtaaggtccgggcatttttcgtaacgcgggcccagtgggaacgagcctttgtcatctacggatcgccggcaaaagaggtgccgtccgagaaaatgccggagcaaatccagctttggtaaccagctaaattactgaaaatgaatgaaattcgcggagcggatgctccgctccgcgaatttggaatcaaggcaaagcgcggagccgggtgggctcaccacgattgggatgctccgctccgcgaatttggaatcaaggcaaagcccttcggaggaaattgcgttcgcggtgtctgatgctccgctccgcgaatttggaatcaaggcaaagcatgaggtggttgtggagacgcagtttcccggatgctccgctccgcgaatttggaatcaaggcaaagcgaactggcagatcccacgctcaaatacaaagatgctccgctccgcgaatttggaatcaaggcaaagccgcagcccctgactcacatccgttggagcggatgctccgctccgcgaatttggaatcaaggcaaagcatgcggccgatgcggtcgacgtagagcttcgatgctccgctccgcgaatttggaatcaaggcaaagcatcggtcgcctcaaggatgccaccgcagacgatgctccgctccgcgaatttggaatcaaggcaaagcgcgggccggccgtttgcgctccccggcggggatgctccgctccgcgaatttggaatcaaggcaaagcatcgccaatctcgtcacgctgccggtcagcgatgctccgctccgcgaatttggaatcaaggcaaagccttcggaggaaattgcgttcgcggtgtctggatgctccgctccgcgaatttggaatcaaggcaaagcatggacgctttgcgcgagacgttcggcccggatgctccgctccgcgaatttggaatcaaggcaaagcgagaaacgcgataaatgcacgcgaggcgaggatgctccgctccgcgaatttggaatcaaggcaaagctccggcggcgcaatcgtcaggcgacgacatgatgctccgctccgcgaatttggaatcaaggcaaagcccttaattgcttcacgatatgcctgccggagatgctccgctccgcgaatttggaatcaaggcaaagctcgtaaacgtatttcaaaaacgcaagctctgatgctccgctccgcgaatttggaatcaaggcaaagctcccgcggcgtgcgtctcgtcgtgatcctcgatgctccgctccgcgaatttggaatcaaggcaaagcaccggaacagagcgggaagaaaccttgcatgatgctccgctccgcgaatttggaatcaaggcaaagcaaggtcaaggctaaggctggtcaggcggttgatgctccgctccgcgaatttggaatcaaggcaaagcattgcagggatccagggtgaccaggttccagatgctccgctccgcgaatttggaatcaaggcaaagcgggacggtcgagcggaaagcggccgcgacggatgctccgctccgcgaatttggaatcaaggcaaagcgggacggtcgagcggaaagcggccgcgacggatgctccgctccgcgaatttggaatcaaggcaaagcagaagaggcagacatgacgccgcgagagttgatgctccgctccgcgaatttggaatcaaggcaaagctctcgcagtctcaacatcaggaacgacgtggatgctccgctccgcgaatttggaatcaaggcaaagcatagttttcgagggtgagctgcgtgcgggagatgctccgctccgcgaatttggaatcaaggcaaagccggtgaaatcattgcggggtcgtccagtgtgatgctccgctccgcgaatttggaatcaaggcaaagctacagtctcggggtcgacgggcggtgttacgatgctccgctccgcgaatttggaatcaaggcaaagctctgggccgatcgtgtggttgtctgacggcgatgctccgctccgcgaatttggaatcaaggcaaagccctgataaatattataacgcgcccacgaatgatgctccgctccgcgaatttggaatcaaggcaaagcacgaagcggattctgatgatggacggtgtcggatgctccgctccgcgaatttggaatcaaggcaaagccgaggcgatgcgcagggcataagtttgagagatgctccgctccgcgaatttggaatcaaggcaaagctcgaagcaccggcacttgcatgacgaagtgatgctccgctccgcgaatttggaatcaaggcaaagcacaacgtccgcgagttggtgcgcttggaatggatgctccgctccgcgaatttggaatcaaggcaaagccaccggcgtggagagtgcgaacgtgatgcagatgctccgctccgcgaatttggaatcaaggcaaagctccaacggcgaggacaacataaatccaacggatgctccgctccgcgaatttggaatcaaggcaaagcgcgccgaacggtcgggcctttgctcgtgaagatgctccgctccgcgaatttggaatcaaggcaaagcttaaaacaaggtgacgaggtggtcggcgaggatgctccgctccgcgaatttggaatcaaggcaaagccgagcgacaggcggcaaggtccggcaacgggatgctccgctccgcgaatttggaatcaaggcaaagctctccgcatggtgtctcaatcacgtccggcgatgctccgctccgcgaatttggaatcaaggcaaagcaccgaactcgacgacgcgttgtcgaccggtgatgctccgctccgcgaatttggaatcaaggcaaagcggccggcgtgcacgataccagagaaatgatgatgctccgctccgcgaatttggaatcaaggcaaagccccacaaccacgaaggtctcgtcgggcggcgatgctccgctccgcgaatttggaatcaaggcaaagcgttgaccgcggtgtgaataactttcgcttggatgctccgctccgcgaatttggaatcaaggcaaagcaaagagggggaggactacgctgccgacattgatgctccgctccgcgaatttggaatcaaggcaaagctggatctgcacgctctgcttgaacgcattggatgctccgctccgcgaatttggaatcaaggcaaagcaagcagccgatagacctccgccgagctttcgatgctccgctccgcgaatttggaatcaaggcaaagctcggtcgctgatgacgagcgagaggacgatgatgctccgctccgcgaatttggaatcaaggcaaagcttgacagcggggggcgtgtagaggctcaaggatgctccgctccgcgaatttggaatcaaggcaaagcacgccgaactgcatgtgcgtgaggtagtgggatgctccgctccgcgaatttggaatcaaggcaaagctcagaagcggtggagattgcggctgcttacgatgctccgctccgcgaatttggaatcaaggcaaagccaacgcctgccgcgaccaccgatggagcgggatgctccgctccgcgaatttggaatcaaggcaaagcagcgacaccatcgaccgcgaggcgaaggaggatgctccgctccgcgaatttggaatcaaggcaaagcgtgcccggcgtcggcaccgtcatcgcgcccgatgctccgctccgcgaatttggaatcaaggcaaagcgagaaggacggcctcgctcccgtcgaggcggatgctccgctccgcgaatttggaatcaaggcaaagcgagaaggacggcctcgctcccgtcgaggcggatgctccgctccgcgaatttggaatcaaggcaaagccaggggcaacaagttgtcggagatgtcattgatgctccgctccgcgaatttggaatcaaggcaaagcacgcagatacggaacacagatagcacgttgggatgctccgctccgcgaatttggaatcaaggcaaagcgcgccggagaaagtggaaaacgcggttccggatgctccgctccgcgaatttggaatcaaggcaaagccatcattcgcgcattcgacgtcttccgtgtgatccgcgtgttccgtgggccagacccagtcacccaacccgcgctccgccctcccaaccctcatctctcaactacccctcccccctcacccaatcaaccccgccaactcccgatcgatccgaaacgcctcccgc

SEQ ID NO: 1998 - DNA, 8537 bp, synthetic construct
  source 1..8537: mol_type = other DNA
  misc_feature 1..8537: note = Synthetic
gatttctggttttcaatttcgcccccgcatgcctcccccgaggccgcgctcgccggccgccgcgccatcgtcctgagcgagaacgccaccctgcggcacattctctccgccatgtgccgctggtgggggttgaatacctgcgagatcgaacggtccaccgccgccctcgccctcctccgcagccccaccgcctgcgatctcgccatcgtcgaccgccagatcgagacactggaaagctgcgaaatcgccgccaccatccactccatccccgaacgcaagaatctccccattctgcttctcggccacaccggcaccccgcccgtcgacggcacgatctctatcgcgaagcccgtcaaacccagccacctcaagatcatgctgcttcaggcgttcggagccccgcccgagtgcatcccccatatcccggaagccgacatcgtcgaattcgacagcacgctcgcccgccgcatgcccctgcgcatcctcatcgtcgacgacgacatcgtgaaccagcgcagcctcgtcctcatgctcgagcgcttcggctacgcggccaccgtcgtcggcggaggccgcgacgccctcgagcgcgcctgtagcgaaagtttcgatctcatcttcatggacatcgacctccccggcgccgacggcaacgagatcgcccgccgaatccgccgcgacagcaaccgtgccgcggccgcgtggatcgtcgccttcaccgccaccgcctccgactgcacccgcagccatctcgagagcgccggcatgaacgactgcctcctcaaacccttccgcaccgccgagctctccgcagtgctcgagcgcggtttccgatcgctgcaacagcaccgcaacagcacacgcggttgaccgggcctgcccgcaccggcaccccggcgcgcgaaaaaacaccgtcctccaatctccggccttgcatcgttctgtggagcgcgaggaaattcgccgtcgcgttcactcaggtaacttctccccgagccgaaaatacccgtatgcccgtccgcctcgcccaactgctgcatccctcccgcatcctcctccaagtgcagcagactaagcgcaccgccgccatcaacgaggtcgcccgcctgctcgaaggccaccccgacatcacggacttccagcatttctacaacgaactccttgctcgcgaacgcctcgaccccacctgcatcggcaacgagatcgctctgccccacgcccgcaccgagcacgcccaggccatcgtcctcgccgtcggtcgcagcccgaccggcgtctacttcgagaactgccagcagaccgtgcgcctcatcttcgtcgtcgccaccccgaagtcgcagcccggcgactacctcgccctcgtcggcgcactctgccgcgtgctgaaggatcccgccgtacgcgaagccctcatggccgcccagacccccgaggacttcatccgtcccctcgccgaggccgaagcccgcctctacggcgccgcctgagctcccgggaaacacctcgatcccgctcgccccctgcgcgcctcgcctcgcagttcgtgaggaactgcgaaatcccctccgcccgcggcttgcctcgctctgccgtgccgcgcaccatgccgcccgcgcatgatccgctcgttcgtattcagcgaaggtaaactcgtcgccagcgacctcgaagccgaggccatgcgcctcgtccgcgccgacaaaggcctccacctctgggtcgacctcgagaaccccaccgacgacgagatcaagctcgtcctcgacggcgtcttccagttccaccccctcgccatcgaggactgcgtcaccccctccagcctccccaagatcgaggactacgaggactacctcttcatcgtcgcccacgccgtcgacctcgcgcagaccgaacacttcgccaccaccgagctcgatctgttcctcggcaaggagtacctcgtcaccttccaccgcaagcccctgcgctccatccagtggctcgccgaccgctgcaccaagggcaccggtatcatcgcccgcggtacagaccgcctcgcccacgacatcatcgaccagctcgtcgaacgctacacccctgtcctcgacggcgtccgcgccaagatcgagcgcatcgaggcccgcgtcctcaaggagcacgccgagaacctcacctccgatctcctcgccgtccgttccgagctcgccgacctccgccagatcatccgcccccagcgcgacgtcatcaaccgcctcgcccacggcgatagcaagatcgtccgcaccctcatgctgccctacttccgcgacctgcgcgacagcctcatccgtcaggaggaaaccctcaccactctcggcgacgccctcctcgtctccttcgatctctacctcaacaaatccgccagccaggccaacgaaggcatcaagatcctcaccgccctcaccgccatcaccatgccgcccatcctcttcggcacttggtacggcatgaacttcgagcacatgcccgagatctccagcccctacggctactggatctccctcggcgtcatgctgctctccaccctcggcatgttcatctggtgccgccgtcgcggctggatctaggattgcgcgcggaggagggcgctccctgcgccccttcagcccgctcccatcgtctcggccaagcaagattccccgtcggcccccaccaccacacacatcgctctcctccgcacgcaatcctcatgatccagagcgtcgtctatcgcgactccaagttcgtcgccgactgcccgccggccgagaccctcgccaccctccggcaggaccccgccgtcatgctctgggtcgatctcgccgaacccaccgacgacgagatccgactcgtcatgcaggacctcttcgccgtccaccccctcaccgtcgaggactgcatccaggacaccccgctccccaagttcgaggagtacgagaactacgtctacatcgtcgcccacgccgtcgactactcccgcaccgagaagttcaccaccaccgagctcgatttcatcctgggaaagaacttcctcatcaccttccaccgccgccccctcaaggccgtccagacctgccgcgaacgcattctccgcaccccgggcatcctcatccgcggacccgaccgcttcgcccacaccctcctcgacctcatcgtcgacaacttcaagcccgccctcgacgaactccgcggcgagatcgaatccatcgaggaggccgtcctcgcccgcagcaaggagccgctcgcccagcgcatcgtcgacgtccgtgaggacctcaccacgctccgtcaaatcctccgcccccagcgcgagctcgccgtcgccctcgcctccggccgcaccggtttcttccgccccaagctcctcccctacatgcgcgacctctccgacgacctcgtccgcatcgaggagcaggtgaagtcctggtccgagcagctcatcttcgtcttcaagctcttcctcaaccgctccacccacgagaccaacgaaggcgtgcgcgtgctcaccggcctcaccgccgtcgccattccgctcatgatcatcggcagctggttctcgatgaacttcaagtactcgcccctgctcgcgtctcgatccgcctaccacgtggtcgtcggcatcaccgtcgtctccaccgtcgcgctcttcttctatctcaagcgccgcaagtggctctgagccggctaagttgtctccgctgactgcggcagccgtcgccactatccggtttcgcaacggcaccattgcccttgccagtggtggcacttgagattgtcatctggtgacgcaacccccgttggcgtcctccacctcatggacttccgtccgttcgcccccccggaagcacatccggcggcatctttcgatgccgccgggaagagtagtgctgtttaccacggtgtgtccgcatagcggacagggaatcgggctgcacccactgactttgacttgatccaatgagcaccaaagcgtccccagaaattcaggcaagcgccaaaccgaccgtccaagccctcgcgttcgccttcgatgtcggccacagctccatcggctggtcagtcctgaccgccccgcccaccgggctgccggacattctcggttgcggcaccgtgctcttcgagaaggacagcgcgctcgccaaccagcgccggctccaccgccagcaacgccgccatgtccgcgccactcgccagcgcatccgtcggctggaacaactcctcgcgcacctcggcgccatcccagagaaggagatcgccgcgcgccacatcgccgcaggcgggcatcccaccccgtggctcctcgccgcccgcgtcctcgccagcaacggagccaagacgctcacttggcccgagctttgggatgtcctccgctggtacgcccacaaccgcggctacgagcccatcggacaagacgacgacgaggaggagaacaaagagaagcggcagaaagccagcgaggcgcagaagcagttcggcacatcgacgatggccgaaaccatctgcgcctggctcaggcaggacccgctcgcggcgcgcgccggcaccaccgtcagctacaaaggccagaacgccgcgttcgaccgctctgtcgtccgcgaagaggtccgccgcattcttgcctcccacgtgggcaggctcaccggcgtcgacgccgccttcatcaccgccatcgtcgacgatgcccgcgcgatcaagattcccgggctcaaactgccgaaccgtttcgacaatccgatctacaccccgcgcaccggaggcctgctcttcggacgccttgggatgcgatacgacaaccgcatcatcggtctctgcccgatctacgcccacgaactggagcagcgccatctcgccgccggcaaatcgcccgacagtgcacgcaagctcgccgaaaaggaggccaagctgccgtcgaaggactgccccgagttctaccgtttccgctgggccatgctcctcgccaacatctccgtcgcgagtccggtcgattccgccctccgccgactcaccgtcgccgaacgccggcaattgaccgagctagcggcacgtgagggctatttcacgcccggtgaattccgcaaaaccgtccgcacactcaccggcgccgtccgcaacaacctcgaccagatgtttatggacgccactgccgagaagaaccttgtgttcgatccggcgctcaaactggtgaactccaagagctggatcgccacgctctggtcgcaccttccgcaacaggtgcgactccacgcgctcaaccgctggcgccggggccgcacccaaactctcggtactctccgaaccgaagcgcagcagatcggacatgacctggcaccattcgatgccgccctcgtcgccctttgcgttctcaagaagcccggacgggcgaccaagaaagagactcctccgcccaccccagaccagatcctcgagactccgtactcagtggaactgctcggcggacgtgccccacacgcccgaccgattctcgtccgagccaccgccgaagccatgaccggtcgccatccgcgcgaggaaggcggatgcctgttcgagactcctgacctaagccgcagccgcgagcgcaggacactcgaccagcagaccaacaaccatctcatccggcaccggcttctcatactcggccggttgatcgcgcagctcgtcgccgatccggcctacggcgccggcaaacccgaccgcatcgtccgcatcacgctcgaagtaaaccgcgacctccgcgacatggccagtctcaccgtacaggacatcgccaaggagatgaacgagcgactacgcagccacggcagagtctccaagcgccttgctgaagagcttccgcccgaatatcagtcgcgcatcaacgcctcgctcatccgcaaagcccgcatcgccgacgacctcggctggcgctgcccctacaccgggcaggagtttgagcccattgatctcgtcaccaaacgggtcgacctcgatcacattatccctcggtctcagcgcacttccgattcgctcgactcgctcgtcgtcaccttctccgaaatcaataaatggaagggcgcccgcaccgcctggcagttcatgcaagagttcgagagccagccggtgcctggtctgccgcaatactcactcaagcagctcaagcgctacgtggccgacgtgaaaaccctcgatacccgcgggcaccccgacgacatccgccgcaagaagcgtcgcatcgagaaactcctgctcgaacactatgaggagaaagccggcggcttcactcccggtcagctcacccagacctcgcaactctcccgcctcggccagcaggtcctccgcaagccgttcgagaagctcgaagacggcccggcattcgtcgcattgcccgggcaagtcaccggtcgcattcgcactgcttggcaagtgctcgcctgcctggaccaagccgcgccggcgatcatggagaagaccgtcgatgccaatggccgcgagcacctggaaccgagaaccaagaccgagattcgcgagatcacgcacctccaccacgccctcgacgcctgcgtgctcggcctcgccgccgccagcgtccccaacaacggcgaggtctggcgcgccttgctggagcggcgcccaaaccccgcacagcgggcgctcctcgaaccactcgacctcggcgagttcgacgcctccgggcgcttcatcctccgcgacctacccgaatcgctgaaacagcagcttcgcacccgcctcgccgagcgccgcgtcgtccagcacgtccccgccgacatgagcggcatccgcgtcgaagaaaacacccgcggcatcgtgaagagggaagatggtcgcgtctggttgcgccagcggaaagccaacgccaagggcgagatcgtcctcaatcgcggcgacgaaccggagaacaagctgctcggactgcgccagcccggagaccgcgccggcaaactcgccgcccagaaaggcgtccgcgtcatcaccgacaatttcggcgtcgccatcctcgacgacgagaaactcccgccctccgagcgcttcgtcatcctccccttcgcccgcgtgtggcaacagctgcaagcgctcacacagcgcaacggcggcaagcgaccaaaggtctggcgcaacggacagatcatcaccttaccgacgggaacccgtgcagggcagtggcgaatctactcgatcaagaacaacacaagcgggatggcacttgatctcggttccgtcgagggcacgaaggcaacctggatcaatgtcctcctaaaaagccttctgcgcgacggtgctgttctgcgaaacagtaaccggctgaccggttttcccggctaaactcccatgtcctaccacatcgtcagcatcgacgcgcctcaggccgatctgacgtgccgcgacggccagctcgtctgcacgaccgagccgggctcgccgccgcggaaactcccgttggaggacatcgccgccatcgtcgtcaccagtttctccgcgcgcttccacagccacctcttcctcgaagccgcgcgccacggcgtctcgctcatcatctgcgaacgtttccaacctgtaagcatcctcctccccgcctgccgctcggccgacaccctgctcacacgccgccacctcaccctgcccgagaacgtccgccgccggctctgggatcgcaccatcgacgccaagtgcgccaatcaggccaccctcgccgcccgcatcgcccccgaaagttccagcacccgcgagctcgctcgcgccgcgcaggctcgtacggcgcgcaaggagggcggttgcgccaagctcttctgggacgtcgtcgccgagggccttcgtatcgagggattctcccgcggccgaaaactcggcgggctcaacgacctcctgaactacggctacgccgtcctgctttcgaccgtgctccagaagctctacggcttcgggctcgatcccaccatcggcatctctcacgcgatccgcgaacgcagcgccccgctcgcctacgacctcatggagccgttccgcccctgcgtcgactggcgcatctaccaatgggtgaaggagcggccgcacgaggaagcgtttgccgtcaccaccgagtttcgccgttgggtcaccggcttctcgctcgaacgcgtcgactacctcgggctcgaactcgacattcgcggcgtgatcgaaggttcggtccgcagcttccgccaggcggtgctctccggcagcgcccgctcctaccggccatggacgtggaaaaattcaagatgggctggctcgtcgtagccttcgacttgcccgtcctgagcaaggcgcaacggaagtcggccaccgccttccgccagttccttttggatgacggtttccagatggtgcagttcagcgtctacgtgcgcccctgcgtgagcttcgcccggcaggagacgcacctcgaccggatcaagaaaggcatcccgcccgaggggaaggtgcgggccttcttcgtgacccgcgcgcaatgggaacgctcgttcgtgatctacggcagcccggcagaggaggttccagccgaggaaatgcccgagcaaatc

SEQ ID NO: 1999 - DNA, 13910 bp, synthetic construct
  misc_feature 1..13910: note = Synthetic
  source 1..13910: mol_type = other DNA
gaacaataggttgttgcgatttcagatgtaatatgtggtgctataggaaagagcattgctgctaacagttgaatggcttctacaatactgtttttttcttgatcagtatgtgtcagttttcgagctgttaaaaaattaaccagctccatgcaccgtgcaataatggtgttaaaagaatgtcgttcaaagtctgtcgtaacacgtttgagtgttttgtgtgtttcacgttgtatctcaagatcatgatcgactgattgtttagagagaatggatacagaatcgcgatgattataggcaagtcgccatagtcgatgcaaaaagcgatggcatccttcgacttgttcgttagaccatttaatatctttatccataggtcctgcaaacattacaaacgtacgaacagcatcggttccatagtctttgatgatgtcagaaggggacactacattaccccaacgtttagacatttttcttccatcgggtccattaacaataccttgtgtaattaaagttttgataggttcttgatgtgtcgtaagtcccatttcattcatgaccatcatccaaaaacgacaatataaaagatgcatcgtggaatgctcagggccaccgatataaacatcgataggaaaccattgattggctttatcagatgtaaaaggtaagtcgttgttgtgaggatctaagtatcgtgcgaagtaccatgccgaatcaacaaatgtatccattgtttctgcttctcttgtggcaggacctttgcagagcgggcatgtggtatttaaaaatgaagagaccttggccagtggaggttctccacgacctgttaatacctgttcaacatcaatgtctgggagtttcacaggaagatcttcataagggacagcaataccttcatgattaggatcacattgatcgcaatatacgatcggaatcggtgttccccaatatcgttgtcttgaaataccccaatctcgttgtcgaaatgtaaccgccggttcacctatgttttgtttttgaacatgttgagcaatcgcaatcgttgcttgttttgatgtcaatcctgtaaaggagtcactgtcaacgagaatgccttcatctataaacgcaacaccgttatggatatcagtatcttggttgtcacttggtttgatgaccgctttaatagggagatcataggtttgtgcaaaatccatatcacgttgatcatgtgcagggacactcatgacagcaccagtgccataatctgatacaacaaagtttgctaaccaaacagggagtttctcaccggtcattggatggatggcgatggcacctgtgttaacaccttctttgggaatatcgctgcgatcatgttggcgtgtcgttttttgagttgtttgatctttgatgaagcggtctgtttgttgtttgtgtttttccgtaacaatggctgcgatatctgggtggtcagcagaaatgccaaggtaactacatccaaagatagtgtcaggacgtgtggtaaaaacacgcagtgtgacatcggtgttcataactttgaaatcaaaaaaaacaccttcgttttttccgatccaattgcgttgttttttgatcacctcagtaggccaatgaatgagttgatcaagattttctaacagtcgctccgcataatttgtgattcgtattgcccattctggcatttgacgaacaatgacagtgccattgcatcgttcacaacatccatcaacaacttgttcgttggcaatcactgtatgacaatcgttgcaccagttgaccgatgcttttcggcgatacacaagatcgcgctcacgcattttgagaaaaaaccattgattccatttgtagtaattgggatcagccgtggatatttcccgtgaccattgataggaaaatccaagtcgtttcatttcatttttgaatgattttatattttcagcggtacgtttttcaggatgttgtttgtctttaatggcagcattttcagcaggcaaccctaaagcatcccatcccataggatgcaatacttctgttccttggagacgcatgtatcgtgcaatgacatctccaataagataattgcgtacatgccccatatgcatagcgcctgaaggataggggaacatttccagaacatatcctgttgaagatgcatcatctgaaacttcataagcctgacgctcttcccatcgagtttgccatgtgggttcgagtgtctgcggattatagtgctcgttcacaacacaaaaccagtatgtttaaaactgactaaacagcttcaccgcgcgaacgcatgtcacggactatggattcaattccttttttgtcaatggtacgcataccacgcacagtcacacggagttggatccatcgcttttctgattcgagccaatagcgcttattgcgaagattgatttcgaaacgacgttttgtttttcgatttgatttgctgactctgtttccaaccaaagcccgcttaccggtaacttgacatactcgtgacatggaaattcctgactagatttttgcttccttaaaatctacatgttttctgattttaggatcgtactttttgatcaccagtttatcaggtgtacgacttttactttttgttgttgtgtaaaagaaccctgtacccgcagttgagaccaagcggattaattcacgtccttttcctcttttcttggccatggtaggcaggaatatgccacaaaaaacaatcaataagcaagtgtacgcgggtattcaaaatcctctaaaacatggtgcgaatgacagggattgaacctgtgacccctgccgtgtgaaggcagtgctctaccgctgagctacattcgcatgtcaattgtctctctttatataccactgcaggctccaattgtggtttggatagcaggtaaatagtcattgttctatttcaaaatgatgaatggccatgtacaacattcaccaatgtcagccattaatatcgtttctacacactctgcccctcaagccattggaccttattctcaagccgttttggtgggtgattttctgttttgttcaggtcaaatcgcccttgatccttcaggtgcctttgttggagagggtgatgttatatctcagaccaaacaggctttaacaaaccttgctgcagttcttgttgcgggtggttcatcccctcaatcattggtcaaaataacgatttacctcacaaacatggccgattttgatgatattaatccaatttatgaaacatggcttgatggtgtatttccggcacgagctacagtagaggtgtctaatttgcctaaaaatgccatgatcgaaattgatgctatcgctttagtcacacgcaatcacgacagtgtcgcatctgctgttatcgatgattcaaaacggtgacagattattgttttttggcgagctctgaccacggcttgtcaaacatgcccgtaatatatgaaggaatcaggaataattcgggcctgttgcttgatatggcatagacttcattggctgtcgtattccccaatgacaatgtgactgatttgttttcactgttgattgcggtgatgtgaattttaggtggattaagacctcgttttcgtagattttttttgttcgttgcaacaaatcgattgattttaatactgcctaacacgcctgtcatccgctcaatgtcatatttgtcgttcaatacataccctttaggtttgttgattttccaagaagaatcttgtcgttcaaaaaccaacaactctttgtcacgtttgactttaatttgattaatttcggttgaagaaaacggcacaatacttttgtctcgccatgcaagaatgccgcctgatatcgattgaatagtcgctgttggaatggtccaaatatgtttgttatcaggatgcccaatgtaggtgttattgcctgtttgatttccaatccaaagtttttcggaagacttgtcggccaatgtgacggtaacaacaactttaggtggcatcattccagcacgacgatgtgtgataccatcgacaatcgatgttgcacgtaaatcagataatactctaacaaggctagggccaatgctactatctaatgctccaacaaattgtgcgccttgagtcaatgtccattgtggtttgtcgtctttggttttcgtgtgcgttaattcggcatgtttggtttgttccttcagcgcaacaacacgaatatcatcggcagggattttgagtacttgacgattacgccacccatggacattgtcgatgattgattctttgtcgagattagaaacacggtatacattatcgctgttatcgagacggatataatctctggttccaatatgaatcgttttagattgttttttagtgttgatgagtgtgattgccttggtttgttcttcaagcacacctagtgtttcccatgagttgctgtgttcagcagcaggtttactgtcaaaacgtaatgacacaaggtttttgatgacttcatcaatcaatgtgctatcagccaatgcctgaatcggtgatgtgatgttccagtgattgttagacatgtctttgacaatgacaataggcttttcttcattaggcgtagcaatgtgaagctcatgtatttgtgttgctccaattgatgctagtggtgatggcggtgtttgctgaacaagctttgaatcgttgctctgaagattcactatggcaagcagaagtgccacgccgaaaacggctaatgctatcagggtttgtttcttttcaattgtttttgtttgactcatttatttttcttttgttttgaatgttgaaatatcgatagaatatcgtttcttatcagagatgaaatgcatggcaacggcaatgagaaggatgaaaaaagatacgccgaggcctgcgccatattttgcccatgctttttgtgaagggctaatcacggccatgggttgtggtgcttgtttgctcatgattgcagttaatgtcctgtcatcgagcaaccagtcaaccattgaggataaggcatattgtccaaagacaaggttttgaaacaaaggtgatcgctgtgccaagctaacatacgcatcgcccacaaaatctgcggaaccaaaagcaatcatacgggtggattttccctgtgttgatggattggtgaatgaagggaatgtaccttccaaagcataacctgtgctgtatggccctcgatcttcagtaagcggtgtaaatggaatatcttgtgcaacagtcagcaccttgtcgtgaaaaaatgatgcgtcagatgtttgtgcaagcagtgttgttttgatctgtgcagatgttgcttgatcgttgttgagcgtgatgcgactggtgtaaggcatgaccaattttttcattccagcaagaacgccatgcgattgtgaagaaataatatcaaccaaaggaaaaggttctttagtgagaaatccattgtttccaacaaaggcagctccaagagagttttgtataggatcaaggatgatttcactatgtagcgtcacaccataatttttaagcatgttttcaagaccggtttgtactggaacaccgatcagtgattttgaattttgccccatgggttgaaacttcatgccacgcaataaaaacaatacaggttttccagatgtaacataggcatcaatgtcaccaagggcttgagatgataaaagctctgtaggtccattaacgatcaagacatcggcaggatctaatgaaaatgtctcagaagcgatatcaaccatgttaacagcataattatttgataacgaagatagaatgacacgtgcttctgctggggagccgaatccttgagtgactaatatttgtttgcgtggataagcaagccgtttaaacaatgatgtgaacgtatattctaatccgttgagattaaactgtgccggtggtgtccatacttcggattggtctaaatatttgaatttaatttgaaagtagatagggatttgttgtggaacaccatcaactaatgaaaaccatagtattttgtcaatttgttcatcatcacgtagttgattttgaaattcacgaccacgttcaaacggatcgattttctcccatgtcagctttccgttagatgcttcggaataacgttcaaggagtgattcgacatattgttgttcaaaggcattttcattaggcacattaccaatatatgccgtggcatggatacgttcatcgagtcctgcaaccaacgctttagatgcaacatccaaagaataaatattagatgttgtcagatccacgcgtgttgaaatgccctcactagcaacattgatcagaagaacactgaataaaatagcgagtaaacttatcaaagcatgtcgtgatgaagatcgttttacatgttgcatagaaaataatgagtttggttttttcatttccatctccttgaggtgagtgagtgagtgctcaaagcaagaaacgcaaagatgacggataagaaataaataatggttctgaattcaacaaatcccttttgaagattgagaaagtgaaaatcaggagcagcataacgaatggcatagcccagcgcacttgagtcaataaaccaacgcaatgaaaatgtgataaaacagagggtcatgcctagcatgaatgctacgatctgttctttggttaatgctgatccaagtaatccaatagagatatagatgctaccgagcaaaaaagaacctagatatcctgaaaacactgcaccccaatccaacggaccaaaaccactaactgtgattgcaatcgggaaggtgcagactaatgcaacgaataagacaaaaatcgctgagagaaatttcccaacgacaatttgataatcatgaacaggcattgtaacaagcaattggaatgttcctgttccgcgttcttcagctaacaaacgcattgacaatgcgggtgcaaacaacaggaagattaacggaaatgttccaaacaacccgcttagtgatgctgttcgttgaataaaaaagttgtcattaaagaaaaggatactgtttatcgctgcaaatgcagccaaaatgacataggcgatgggcgatttaaaataggcgcctgtttctctttttgtaatacaccagatggttttcataattatagctcctctgaacgagtcaaacgtgagaaaacatcttcaagggatgctgttttacgatcgagctctagtaaaggaagattttgttgcgacgcgagttggaataaattcagtcgcagatctgttgttgcatcactaacgatatcaaactgaatttcattggtttctgtatcactatgcgtgatgtgtttaacgccactcaatgctttaatcttttgttcaatagctgttgctggaggcagtgagttatcagaaatattgcgtgcaaaaagcatacgataacgattcgtttgctcttgagcaatcaatgcatcaggtgttccatcggcgacaattttaccgtgattgataatgacaacacgggtgcatgtggcctgaacttcaggaagaatatgcgtagagagaatcactgttttctctttgccgattcttcgaaccagttctctgatttctacgatttgattaggatccaatccactggtgggttcatcgagaatgagtacgtcaggatcatgaatcatggcttgtgcaagcccgacacgttgacgatagccacgtgaaagctcacggatgtatttcccgagtacatcgagaatacctgtggtttctcccactgctccgatgcgatgttttcgttctgaaaaaggaatgttgcgcagttcagccacatattctaaatagcctaagacagtcatgtctttgtatagcggtgtatcttctggaagatatccaacatgtttccgtacggcgatcgaatcactgtaaacattatgtcctgcaatggtaacgtgaccattagtcggtggtaaaaagcaagtaagcaccttcatggtggttgattttccagctccgttgggacctaaaaagccaaggacttcgccacgggataccgaaaaggtaatcccatccactgcgggacgtttatgttttgaataggcacgaacaagatcgttcactccgatcattgtattggtgtcgattttaggcacaaacgaactcctttgattgatgattgaaacaaagcaaagggatagcgatgaatagttatgttgtcaatagacgatgggttgttaatgatttattttgctatcaatcaaccggattgtattccaaaatttagggttcggccggctggtttccgtcaattgcgtgatcgatatggcgagttcatcgagccacccccccatagtttcctcaaatgcttttttgttgatctcgggaaggttaatatcgatatgattgcgtaatcgtttggctgtttctttttttgtttctaatgaaaaaacaccaattggatcggttaatgtggagatatgattgcgtaatgctgtaaacaattcctgtgagaatggttctaccgaaggtgttttgtttaacaaacaataagccaaagccgtttgaccataactgtctaacatcggaggttgagagactgttgatgatgtttctgaatgaatcaaaacatcggtagtcacacccataccttccaatacaaaagccactttgaatccaatgacagccaatgcattggttaaaatacgtacatcgttatagctggaaatagggcgcatctcattgtcggttgtgttgtcaaagacacaaggaaaccatggccgtgattcacacagtgctgtgatcaatgcagcgtcttgtatgttcatggtgtttttataaggcgcaaaactaaacgcacctttggcaagtttgaccgtgacactaaatcctaaacgatggaggcgtaccaatgaaatagtacgcaatgcttctgcggctttggataatttgccgcgagtgacagtttcaagacccaacgataagctggcaagggtatgatgtgcacattgtttgacaccgtctttgtctccaggggacacataggaggctgacaaggctcgattgattaaatatcctgttgctgtttgtatgacatcaatttcttgttgatcatcaatggtatcgagtgctgccgctaaaaatgtttgatcgttgatgttaaatgcagacaagacaaatgatgctttgtcgataggaagagcacgtgcctgttgaatgggtgatgagttttcaccaatagataccgagccaatagggagtgtttgaaaaatttcaagcgaacgatgtggattcggaaatcctaaatcttccatgcgaccagaacgccaccgataactcaactcttcaagcggtgcgataggttcagaacgtgcagacataataatatgccgcgccatttgcatatcaccatgatagagcgaattgatgagttgaaaaatgcgtgtcacatcttcgggatgttcttcgatgacttcaattgaaaagaaatcatcaggggttttcattgcaggaagctctgaatcttcaggaacttcttcttctaaggaatgatcataaatccgcgttgattgtttgaggatcaatgcgacaaattcttgatccaaacatcgccatacatgacatgtgttttcaaaccctgtttcaagcaacgcatcaatccacacattaacttgtgttaaatcaacctgatctcttgcccatcctgacaaatcaaaacatccttggatttgtgacggggaagccaatgtcaccaaatcatgtgcatcagagagtcccatatcagagactaattgataaaaatcaggcacaggtaacgcttgcaccatctctttggcattatcatgtgcaagcaatgcattgtaacgcttctgtacagatgtcgtttcattgacagagagaaaacgtgtcaatgctgtttctggatcggatttggtttgagtcatcgtggtggataatgcaagaaagcgagccagagctcgcttcttatatgttgcagcaacagtaccgaagtactattaccgcttgttattggttcccatgtttccatgagtaaaggcacacaatcttcaatcggctaaacatgaaacgaaaccttaaatatagtataagacggagtatgaacaaaaaagataattctgtcaactatcgtttgggcttggacttgggcacaaactccattggatgggccatgctctgtttggatgatgagaacaaccctaacaaggtattgaaagcgggagttcgtattttttcggatggtcgtaatgcaaaaacatcagtctcaaatgccgtgacacgtcgtcaagcacgaggcgcacgtcgtagacgtgatcgctatttacgtcggcgtgcaaaactaatgaaccgtctcattaagtttggactaatgcctcccaataaatctgatcgcaaaaagcttgaacaggaggatccttacaagctgcgtgcccaagccatcatagaacaattatcttcttatgagctgggtcgtgttttgtttcatctcaatcagcgtagaggctttaagtccaatcgcaaagaaaacacaaaagaaacaaagagtgatttgaaagagggtatcaagcgattagaggctcatttaaaagaaaatcagactactctaggggcttttttgtatgcaaaaaatacaaaaaaaaggaataaaaccaaaggaatacgattcaaacctcatttgttaaaagatgaagattacggctatcccagcagagctatgtatgcagatgaatttgatgcaattagaaaaaaacaagcagattgccatcaactcacgccagagcaatgggatgatttgcgtgagattatttttcatcaacgtccattgaaacctggtgttgtcgggaaatgccaatatgaacctgatgagaaacgtgctgctaaagcactgcctatcattcaacgctttcgtatcgttcaagaggttgcaaacatacgaattcatgtggatacgggagagactatttcattgtcgcaacaacaacgcaaagatgcagtagattttcttttagctaaaaagaatgtggaattttcaagcaaaacattgctgaaaaaattacaactaggttcgaatgttgcaattaatcttgaaacagaggtgcgcaaaacattaaaaggagatgtaacaggggttttgctcagtggtacgaaagacaatgaagtattcgggaaatcatggtttaaaaaaacgattgaagaacaaaatacaattgtcgaattgcttttagatgaacatgatgatcttgatgatgatggccttgttcgtaaagctcaggaagaatggggattgacattggagcaggccgaaatcatggtctctttgtctttgccacagggctatggtcatgtgagccaaaaagccgcattaaaattaacagcctacatggaagaacatcattgtgatttgacagaagctgtcaaagaaaaataccctgatttttacaataacgatgacattatgtgtcacgatacccttggttattatggcaaagtcgttccacgatcaacgacaggtggtgtggatgatccgaagcccgaggatgatgacagcaaacgttatggtaaaatttctaatccaaccgtgcatattgggttagggcagttaaggcgagtggtcaatgcattgattgcccaacatggtaaaccctcacaagtagtgattgaacttgcccgtgatttaaaatggaatcaagaacaaaaaagcaactatgaaaagaagcaaaaaaccaatacaaaaaacaacgaaaaatacaatgaacagattcaagcatcagggaaaaatccaagttatcattggcgtaacaagttgcgattatacgctgaattagagccattaaaacattgttgtccctattgtgacaaaacaatatcacaagcgatggtgttgtccgaagaaacagatgttgatcacatcttaccggtcagcaaatcattagatgaaagcatggcaaacaaaattctttgtcacatcaaatgcaatcgagaaaaagggaatagaacacctcatgaagcctttggatggcttgcaaaatcggccagcttaccaaaaaacaaacaatggcgttttaaaaaagaagatgtcattaatgcaaaattggagcttgatccaaaacttggatttgcggcacgccaactgaacgacaccagttatttttcacgagtatctgcggattatttaaaaacgattattaaagatcctcttaaaaatgtatgggtgaccccaggacaattaacaggaagattacggcgtcaatggggatttaatgaactgttgaatgaacaggctaacgaaaaagatcgaaccgatcaccgacatcatgcccttgatgccattgtgattgcactcacggatcgaagaacactgcaacgatacagcagagcgagtgccacaacaaaaaaaatacatcatgatggaacgcctaaaattacactcgatgctccatgggatgattttagagatcaaattgaacccgttatggatgccatagttgtttcgcatcgtcctgaacgcgtgcgtccaggaaaacactcgaggataaaacaagatacgacatcgggtcagcttcataacgagacggcttacggcatggcagaaaaaatcaaagaagatggcagcaatgttgattatactaagcctgtgatgggtgtttataccaaacctgtgaacaaagatattatcaacacaattcttgtcaaaaattctgggaaacaaaatattcgtgattcgaaattaaaagatgcgatgaaacgtcattgggaatttgtggaagcacaaaaagaaccttcaactcaagatggatctggcaaaaaagaatcaaaagaaaaaacattcattgacagcattgccaaaccgcatgcattaaaaaaatatgggtttaaaggagcacgatcaggggtgcgttccgtcaagattgaagagaaacttactgttattgaaggctctaaaaacaaagaaggaaaggttgaacaatggttcaaacctcatggcaatgcctttatggatatttataaactgcctgataatcgaaataaaaagaaacacaaaaaaaaatatgcctcggtgactgtgacgcttcgggatgccaacaggaaagattttttgaaacattataatcaattaaaacctcatcctgccgcaaagaaaatcatgcgcctctatattaatgattatattcttttaaatggcagcgatttatatcgtgttcagaaattgtctgggaattcaattggctatacgcgccctaacgaagccaacacggaagcaggaaaaaggatcgcagcatcagtgctgatggaaaaacataatatgcgtcatgtgtatatcgatgctttggggcgaatctatgaacgaggacatcccattatgattgattaatccatgcttggtcgtctgattgaaatagaatctgatgggcaatatttgtctcgcaaacagggatttatgcttatctcaaaaggacgaaccgaaattgcacggatcccgttggatgatattgctgttgtgttgtgcaatgctcatgggctgacctattctaacagtcttttagtcgagtttgcccatcgtggcattgtagctgtggtttgtggtgccaatcatctccctgtatcatggatatggcctttaaaagggcatcatgtccaatctaaacgcatgagagcacagctcgaagcaaccaaaccgcttcgcaaacggttgtggcagtcgattgttcaagccaaaatcatgcaacaacaagccgtgttggcacggataggcaccgatacagcaaaaatgtcagcctttatcaaacaggttcgatcgggagatccagataacattgaagctcaagccgcacggtattattggcctttgttattggggaaagcgtttcgtcgaaaccgtaacgaaacaggtgttaatacgcttttgaactatggctatagcattgtacgatcagcaatggcgcgtgccattgttaccacaggactgcatcctt

SEQ ID NO: 2000 - DNA, 23492 bp, synthetic construct
  misc_feature 1..23492: note = Synthetic
  source 1..23492: mol_type = other DNA
tgcacaggccagggcttgtcgaggccgagcttcgcatgaatcgctgcgatgtcttcagcggacggctgcccgtcactgtcgaagaatgccgcggcagggtcgcccggcatgaggcgcacgatgccgaacgccagcagtgagagtagaaccagcacggccagactggagcccagtcggcgaacgatgtatttcatgaagttcctcggcgatgccgtgggccgaggcccgagtcggtcgcaagccatctcgacgtgcggccagcctcaggcctcagcggtgggttcagacggttcagcgaccaatccatgtggtcagcagagaagtacgtgaatcgaagggatcggggctgtaaccgtgcaccttgctcgtcgataggctgtaagacagcggggtggcataggccacgacgatgaatgactgctccgcgatctcctggttcaggtcgttggccacctgcaggcgcttctgatcatcagcctcagacgtcagctggccgaacagctcctgcagacgcgcggtctgggtgctgcccttgaacgcgttcaggttcgcgctctcgggcacccactggttgaagtcgccagccacgtcggggcggccgacgttctgtacggcgatgatgtcgccgaagaacggagcacctgaggtgaataccgcttggatgcgtgagtactcgaccggctggaggtcgacggtgatgccggcctcggcagcctgctgcttcagcagttcccaagtggacttatcgttcgagtcggcctgatacaccaggctgatcgtagggttggtctggccggcctcggcgagcagctgcttggcaccttcgacgtcacgctggtagttcggcgtgctgtcgttcggcgcatcgacaccgatctgggtaggttcggtgacgaaggacacctcaccgaacccctgtgcgccgaccttggccagctggtcgcgatcgacggccttcgagaacgcctggcgcacgcgcacatcgttgaatgcaccctcagagttcaagtacagcacgcgagtgctggtgctctgcagctcgcccagggtcagaccactgtccttgccctgttgcgcgagagtggagttccagaaccagccagcatcgatctggccgctctgcagctgtgtgagcagggtgttctcgtcggggacgaccttgaaggtgatgccgtcgaggtaaggcttgggctgatcccagtacttcgagttcttcgtcagcacgacctcgacgccctgcgtccaatggtcgaggctgaaggcaccggatgcgttggcggtcttctgtcggtcctgctcgctcgtcgtgtcgtaccagttctggctgacgatgaagaagctcttgcgatcagagacgatgttcaagaaggcggggtttgacttattgaaggtgaacgtgactgtgcgggctaccgcatcggtggtcagccctttcagatcggtgaggtagctcttcttgctcagtgttgattcgcgcaccttgttgaagctgaaggcgacatcgtccaccgtgatcgggctaccgtcggcgaaggtcgctccgtcgcggatggtgaacacgaactcggttttgtcgtcgttagtggtccatgattcggcgatgagcggtcgcagcgtgccgtcgttgtctttggtgagcagagtgtcataaatcagggcctgaatggccgtactcgagtacaccgccgtcgagaacgggtcgaggccgccgttgccgggctcgctcttcgtgccatacacaagagtgccgccgggcactggatcgccgtctgacgatgaggatgcattggtggacgttgtagtgacgcagcctgcgagcaggagtgctgtcacaccgacgccggctagggcaagcaggccgcgacgagtcacgctggagttcatggatgctacttcctcggaaatcgggtactaatcggttctttgcgccgaagcgccgcggctcattccaccagccgggtttatgctgcaccaaatgagttggattatttcgtcacaaaaccgaccaatagatctcagtggcattgaataggctcactcaactcgtgaggttcgtttcgcttgtgtctcacgaggagtgctcaaatatcgccgagcgtgactcgcaggagcagcacgcgctcacaacagaaagtatcccgatgactgacgccaccgaagaacataagatccacaatcccggtaacctcatctcccctgacgaggcggttgagcggcatgcgaatggcgctgtgctcatcgacgtgcgcggtccgatcacgcgcggtaagcaggggctcgtcgacgatgcaattgtcatcgacaaggcacgcactgccgaggtgctgaatccagattctgacgagcgcatcgctcagctgactggcgacctcgatcaagacgtcgtcgtgttctgcggcagcgaattcggttcagacccggttgtcgaccagctcaaggagtacggataccagaatgtgcaccagattgccggtggcatcacccgttggctggtcgagggcaagccgacgacgcctgcacccgcaacgtctgaagtttgacgatgtgcccctctgcgggcatccgaagtagaggatatcgttcgctctgatgcccgcagacttcaccccgccgcgcccaacgtcaagaagtcgtacaaccccgcatcgaccgcatgctcgaggtgcagcgtcgtgcgaaccaccgacacttcacccttctcagccggcatcgtgagctgctgtgcttcggccgccgcggtcgtgacacgtcccaggtagtagaaatcggtgccctcggcatcactcttcttcacgaacagatgcagcgcgatctcaccgccgagaatctggcgcacatccttcgactccaacgtgcgccgactcttcgagaaccaggtgaacgtgcgctcgtcgacgaacgcgtcttcgtaccgagtggtctcggcgatctcatcactcttgtgataggtcacgaagatcgggcaggtggcagtcaccgggtcgaccttgtacccgtacaccgtgctcgcttcgttcgacgcccagttgagcacccgcagcgcatctttgcgcccgtacttctgccccaccacgagatcagagctgcccacatatcgctgagcgttgacgagcagcccggtcgcgatcatgtcgtccaagacggatgcgaagaatccgttggccagataagcgtcagtcaggtcgtcagtcgccttgccgtcgatcaccaacggctggctgctgtacttcttgcgttcggcctgcgtgaagaagctgaggtcgagcacgcgccccgctgaacgtgcgcgcagttccgacctaccaggccctatcgaatctgcaacgctgtcggctaagtcaaccaccgcatccgcatcatggcgcagccttgcgagcgcgtcacgcagcaccacgagctcggcgcgccgccgcccgttgagcaactctttcgtcacgaaggtgagcacggcatcctgccatggcggcagcaccggcacctcttcgtgcgccgcggtcagcagccgagcgtagttctcgaagccgttcgccaacacaactgggtcgaccgctccggcctcggcgaagtcagccaaccgcggcggctcagcctgacgtgcacgcagctcgcggtaggcgtcgagcagctggcgtttggtatcgatgcgcgcggtgtcgattgaggcgagcacccgctcggcggcgattctgtcaaagctcaccgtcgagagcccgctgagtgtgccctcgctgatcgcccgacgcatctgcttgcgcagggcgtcacgattgcgtgagcggtcgccgaagagcgcgatcgggatcatgtagttgttctgatagttgccgatgaagtcgacgaccaccaggtactccttgcccggcgccttgcgcagcccgcgaccgagctgctgcacgaacacgatgctcgactgcgtctggcgcagcatgatgatctggttgacctcgggaatgtcgatgccctcgttgaagatgtcgacggtgagcagatagtcaaggcgtccctcgcgcagatcgagcacgagctcgtcgcggcgctgctgattgtcgcgtccgctcacggcagccgtgcgcagcggccgaccgcccagggtgtgcgtattgaactcggctgcgagcgccgcggcctcggcgttgcgactgcaaaagatgatgcctttgggggcgatgccggcctgagcgtgcagctcgatctgacgcaggatgtagtgcgcacgctccgagtcagcgaggcgcatcaatgtgctcggatcgtcgcccagttcgccggcgttcgtgaggtactcggtgacgccgtaatagtggaacgggcagagcatctcggtttcgagcgcctcgttcaggcgaatctcgtaggcggtgttgtagtcgaacgctcgaaagatgtcggcgccgtcggtgcgctccggcgtggcagtcataccgagcaggaacttcggggcgaagtgatcgaggatgcgctggtagctgcccgccgcagaacgatgcacctcgtcgatcacgatgtagtcaaaggcatctggcgcgaactgactccacgcgtcacccgcgttcagcgactgcactgtggcgaagacgtacctggccgcagcgttcttgtgctgcccggcatagagggcgaaatctggcgcgtcaccgtcgagcacttgctgatactcggtcatcgcgcggcgcagaatctgttcgcgatgcacgacgaagagcatgcgaccggagcccgtagactcgtgttcgtgcactgcacgcacgtcgaaggcagacagcagcgtcttgcccgtgccggtcgccgagatgacgacggcacgagtctcgcccgcgtcgcgcagccgctgcagcgcatcgagtgcacgcgcctgcatcgcgttgggtcgcagacgttcgacgacgtgccatgctcgctcccccggcctgaccgacggcgccgaccccggcatccgcgccggcgtctgatcgggcgcattctcagcttcgggcagctcgatctcgacctgcgcatcgcccggccagaagacgtcgactcgcttgggcacgaaggtgcgcgcatactcgtcgacccacgattcggtcagcggaatgctctcggccagctgcgcctcgagttcgctgtcgagcatcgccgtgatgccgctgtggtgcagggctgagacgcgcaggttccattcgacgttgccgtcaagcgccgcctgggtcaggttcgaactgccgacgatgcccgtcgtgatgtcgccctggcgaaacaggtagcccttggcgtgaaacggccgccgggcactcgacgcacgatcaccttggaagatgtacgtggtgatgttcggcagcgcgagcagctcgcgaaacgcccgcggactgttgaactgcaggtagtcagaggtgatgatgacgcctcgaccttcgaagtcgatgagctcctgcttgagcgtcgcgatcgcacccggagtcacgaacgcaactgagaacgtgaacgagtctgcgatgcgcagctcgcgccgcagcgcgcgcagcatggtgttgccgtcgcggttggcaatgagcgtcggcgccagccgtgtggtggtcacctgatcggcgtcgacgaacccatgctgcaggccggcctgcagcgcgctgagttcgttgtctgggtacatcaagtcgcgtcagtcgtcgttgtcggcggatgctgcggcgcccgcctgcagcctcgcctcgatctcgtgcaggtcggcctgctgcagcgcctttgcggcggggatgtcggccggggcccagtcgaggtcggccagctggtcttggccgaaccaggtgaggtgcgagtgttcggtgagcgtcgggtgtccgtcggtgagcacggcgtagtacgtggtcagctggatcgtgccgaagtcgtactcatacgtcgtcgtctctatccgcgaccccacctgaatgctgcagcgcagctcttcgtgaatctcgcgcaccagcgcctcggcgccggtctcgcccgcctcgatcttgccgccgggaaattcccacttgccttcgagtgcacgccccggcccgcgctgcgcacacaggatgcgacccttatggacgatagcggcaccgacgacggtgatgaccttactgatggctgcctcctggctgggctggtctacgctgggtgcctctctttgcaggacaccacacgaataccaggataggggaagcctatacagccttgccttgtcatccctacgcgcagcggctagaggatctttcgtccgtcttgatcagctgcgagagatgacgcattatcatgtcgctgagccccgcgaatgactttgcaccaagtacacacgaccacacacgcagactatggcgtcagggtagctgttacgtcttctacaatgcctctgactgcgcatcaaccccacgcagctgcgcgtccatttcatcgttcttggcgagaaggcaccaacgatttgagcctctccttgagctccgcatcacacacatacacatacgttccgagcatgccgcgagtcatcagcactcgatagatgttgcgcacgaacttcagcagctcttcgtcactgtaggtgatcccaagctgtgcgttgttctctttgcccttcttgtcgtagtagtcgtcccggctgaacatgagcctgccggtactccggtcaagctgcagatcacgaccgatgatcacacccgcatagttcagctcgtacccctgtaccgtgtgaatcgaccccacctgatcaatcgcatgcggcgatgcgatccagtcggtctgtgcccagttccactgcagcgccacgccatcctcaacgatgtcgggcactgacttgtcattcttactgttccacggccatgcgaaaccggcgaccagacgtgacagcccgacctcggcatcccgtttgcgtatctcttcgtgcatctctccgagatcgtcgaagaaacgcagatcgtatgcgtcaccgaagctcttcggtgctggcggctcatcactcagaagacggccgacatactcgatgtagtcgctgccgcctttgacacgcagttgcgacgtcaaccgcagcagccgatcaccgcggcacgcagcatccagcaccgaccgcaacgtcggtgtcggcaggtcgctcggccgaacggtctgatccgcgtcgatcagcagaatctggttcgtgctgcgtgcacgtatccagtcgagctgcgtgtagtgcaggtcatcttcgccgaagagcttcgtattgatgtcgatgaacttcttgttctgcgtaccggacgactggttcgcgcgctggcccagacgatgggcctcgtcgaccagcagcaggtcgtaatagtcatcgccgctgccgacgtcgaagggggtgaggactttgacctcgcgcatatttggaatgctcttgaacactcgccgcatcgatgtccgcaacgactgctgcggaaccacgataccgatatccatgtgctgcagcgcctcgcggtgctcgccggcgaagaagtcagagaacagagaattcatctcgaacaggtcgtcgtcgctcgtgttgccgatgtcacgcagcagtttgatcagatagatcgcgacgatggtcttccccgtgccaggatctccctggaccacaatggtgctgcctcgctgcgctgcgcgatcggcgctcagcgtctcgagaatctgctcgatcgcgacagactgatcagtcgtcaggctcttgaacggcgatagcttgaacagctcgctgttctcgatctcggggatgctgtgcgtaaagacgccctcggcgcgcagccgttcgaaaatctcgtggaatctcttgcgatacgtttcccggtcgaagtagtcagcatcgaccagcccggcattgcggttaagcacctggaaggtgccgtctccttggcaccatccaatcagctgggactcgaggtcgagacaggcagatttgttgaacgtctcgtcgataatcacgcgcacctgctcgagatcacgcttgacctcgttctcgtggtgctgccgcatcctggcgagcgcattgccggtctcaccgacatagatgcgcggccggtggatgccatgggcgcgttgccgccgtctgacttgagacgtctggttggtctcggcgttggcgccgtcaatcagatatacgaccggccagttcgtcagtttgtcattgagcgtggcgtgcgtctggacatcgtcgatgtcgaacgtgatgtgctcgatgtcaaagtcggtcatactttgcactgcgccccttcgccttctcgacagggtacttctctgccgtcacctgcagcttctcttcgacgatcgtgtctgggtcgaggccgagcgcatccgccagatagaggcagtaggtcagcacgtcggcaagctcgccgcgcacggcatcgtggtcagcctctgccggatctgtcgaccattggaaacactcgagcaactcagcagcctcgatgctgatgctcttcgccaagttctctggtgtgtgaaactgctgccagtcgcgttcagcggtgaaggcccgcagtttctgcatgagctcgatattccccatagatcaggactccctgctgtcaccctcatcgatcagccccagagcaaaccgatcaaagtcgcttatgtactgatgatcttgtacaatccgatacttctcaaactcggtctcagcgtgcagtttggcctgctcatgtgagatacgaccagggcctgtgagtatttcggtctcgttgaactccaagaatccatcgaggcgactggcccaatcttccattgacatgggaatcttgcgagaagcctgtaattctgcgtagtccaagtacatcgaaacaagccggttcaagaagtccagttcagcgctggcgagatagttcttggcgaccgagacatcggaacgcacgatctttccgtgcggagccgctgcccaagtcgtcagccccatccgctctcggtcagcatccgcacgctcgacgatgagttcggctgccgtatgtcggtgcgtagcccagtgcaatttgttctgcacgagtgcaaagaaggcgtgtgttgttgcagcgtcaggatcatagtcgaaagccgttgcatagagatcagtgactttctgatagaacttacgctcggacgcgcgaatctcacggacaaggtcgagctggcgctcaaagtactcatcggtgaacatgtgtccgctcttcagccgctcagcgtccatgacccatccttggatcgtgaagtctttcacgacctgccccgcccacttacgaaactgcactgcgcgagcgttgttcaccttgaatccgaccgcaacaatcgcctggaggttgtagtgcttggttcgatagcgtttgccgtcactcgcagttattcggaaatcccgaataactgctttctccgcgagctcaccgtctttgaagatccgtttcaggtgctcgttgatcgtggacacgctcgtgccatacacctcagccatgagcttctgactcaaccagatgttctcgtcttcatagcgcaactcaaagctccgctcgtcggcccctgttcctccactcgccgcaatgaaggtcagatactccgcagcggatgagcgcacgacgcgctgattcgacgccccatcctcattcccattgttcgccattctccacccatcgatcgcccttcaagattttgacttgttcaatacctcagcctaaactgaccatagcatgcttgtatggtttataaatacaagcacgccactagttgacactttgtattcatgttgggtcgactcgttccctggggcggcagggccctgcgccctgccgccccgaccaggacaatgtctagctcgtcgcgattagttgcgccaccgcacggtccacgcgctaaactcgctgtgaacgagtaacccaataaggcttccttctcggaagcttgatttctccagtgcccccggctcctgtcgggggcacttcgtcttttggatgtcgtacgcacggtatattctgagcagagcttcaagttctgcttcacagctagcgtttcacgccgtcattcatcggtcaccgggggaaactgcatgattactcactttgatagccaaatcaagtatcgaatcggcatcgacgtcggcgaatctggaatcggcaaggctgccatccaagtcgatgatgatggcaatccgatcgccattttgaacgccacagtcacaatcatcgacggtggcaaagacccatccagcggcaagacgccgcagtcacgacttgcggtctcaggcttggcaagacgtactcgcaggctgctgcgccatcgccgcaaacgtatccttgcgttgcaaaagcttctggacgagttgggcatcatagatatgcgtccagctctcagcccctacatcaacccttggcaggcacggcacgacctctatctcaaggatgagaccgattacatccaacggcaagcgaagctacggatcgcgattgagcatattgcccgacaccgaggatggcgtaacccctggtggagcctcgagcgccttcgcgcatctgctgctgaaggccccactgcggctttcgttgcgacccaagaacgggcttctgagacgcttaacgtggcggtcgaagacctgccatcgctcggagcaatcggcgcgctgactcctcctgaggtgccgttgcgtccaagaacaggcaagaaggccctcgcacaaacgaagaagttcagaatcttcgccgaaaagattctgcaagaagaccagctgagagagctcgaagcaatcctcgtacagcagggcgttccagagaaggaccgccagagaatcgtcgcggcggtcttccacaccgaaaagccaactgttccgaaggaacgcgtcggcaaggatccattcgacggattgccccgtgtcccacgcacctcgctcgagtttcaggagtttcgcatccggtcaacgattgcgaatctcacagatcgcacccgcggcaaggatgcccggctgacgaaagcgcaacgcgatgtcatcattgacaagcttctggcgtgggaggatgaggtgtcgccgacgtgggaggagctcgcgtcgtggatcgatcgcgagagctcgcaggtgacgttccccatctctgatgatcctcatctttcctctcctccggttgacaagaccgccgcggttctcgcgcggaaccgaaagaagctcccgagtctatctgtgctctgggaaaagctgtggaccgatgctcagcgcagtgagtttgccgtgtatctcggagagacgaccgcatttgacgaggactctctgattgcagaagacctcactgagcttcctgaaggtgaacgcgaactccttgatcagatcgatgcatttgacaagagccgagcatcatatggcatcgaaaccttgcgcaggctcaacgatcacatgcgcaccagcgagactggctcgctaacggaagcactcaaagaggtcttcaagaaagacccagggtggaagcccgctccggagagtctatttgaccatgtcgaccacccagtcgtcgatcgcgtgctgaccgatgtcggtcgctggctcaagaccattgtggacagatacggactccctcagcaggtgaacgtcgagcacgtgcgcagtgctttcctcggccctgaggcgaaggcggagtacaaccgtgagatcagctcgaaccgcatccgcaacgagcgcgcacgccaagaactgcacgtggctaacgtcgagcacactcgccgatctgaccttcgccgctacgaagcagtgcagatgcagaaccaacagtgtctgtattgcggaatcacgctcaacgttgagcagccggacaaggtgttcaatttttcccaggtcgagatggatcacatcgtgccgagagccggtggtggttcgaacaggcgagagaatcttgtcgccgtctgcaagccatgcaacagtcgcaagtccaacgaaattttcagcgtctgggcaacccgtgaggaacaagaaaggcgccctggggtcagtgtcgcagaggcgttgcaacgagtccgcgactggcaaaagccgaatggcatgacttatgccaggtttcgacagctccagaacagtgttcggctgcggctccgcagaacgacagaagacgcgccgctcgacgaacgcgcaatggcttccaccgcatattctgcgcgcgtcgtcacggaacgtatcgacggtttcctgcgtcagcaccttaaagacatccgacgcaccgatccatctatcctgacaacgatcgacacgtcgactggcgaagtcacacctcttccgatgcacaactgggtgcaggtgtaccagggacgcatcacagcagaagcacgaaaatccagcggcgtcgaaggcaaactgagcctccgagcggcccagcacaagacgcgctttgatcgtagacatcacgcggtggacgccgcggtcatttcgctcatgggagtgaagcctgcccgtgtgctcgcccagcgcagtgagcagcgtgacagcgcacgcctcgccagctccaccgggccagaaaccaaggagtggaagaccgtcggtaacaccgatgacgcgttcatccgctggaggcaggcgatgcaccaactcgcagaattcgtcaagcaagccattgccgacgacgagatcgtcgtcatgcggccgctgcgtctcggccccaacgttggtgcgttacacagcccgaaccccgaaccgctcgtcagcaagccggtcagtgagccgttcacctctcaagaagtgctccgcattgtggaccgtgacctctacgagaccgctgagagatttcaaggcgatatcgatggcatggcagcattacctgacaggcctcataccggcaccatcctcgatgtgcccgatgccagcatcaagctctttcaatcggcttcctcggggttgagtccgaagcttgcgctccgcgacggtgcagctgagatcggtagttctcagcatcacgtccgtgtttatgccttccgcgataagaaggggaagatcatatacgcgcagcttcgcgtgttcgctggggagtttgctcgtatcggattcttgaaatcgggagttgatctgttcactgctccgctgccatcctggtcacaggccatgcgctgcgcaccatcaaaactccgtgaatcaatcaaagatggcactgcacaccaaatcggatggctggtgagaggagatgaactagagttcccggacgctgctgaggtgatgagtatcggtgaggtcagcggcattacttgtggtgtaacccgagagcggaggtggatcgtcaccgggttcgagaccaacgtcatcctgaacttgaaaccagcctacttagctgaggaaggcctccctccggtctcgtccgcacactccagcgaagtgtccgccgagacgaggaaggccatccaacgcggatggcgagcttcgctcaataaagttctgcagatgaacccaacgatcatcaggcgcacggcaagtggttcgccacgctggcgcgacgctcacgacggactgcccgtttcttggaatgtgttgcagtcaacagcaaaggtgtttggtgatggcacagtggcgagttcttgacttccagaagtacgaaggcccaatagctgcgagacagggcaagctcttcgccggagaacggagcgttccactcgccgatatctcgacgattctcacgggcccgcgctgttcgcttcatgcgagcttgctcgatcgagctgcacattttgagatcattctgctcgcatgcgattggcgtggcgtaccgatctcggctgcactcccttggagctcgaatacacgggttggagcaagacacgctgcgcagagccagctgagtgaaggcaggcggaagaacgcgtggatgcaactggtcaaggcaaaaatcgcagggcaacgagcaaatcttcatcctgagtctgccgcgtaccgttcactgcagcggttgcagcaggaagttcgatcaggtgatccttcaaatactgaagcacaagcggcaaagctgtattggaagagtgtatttctcgatgagcctggctttgtgcgagacgcggccatgagtactgatagaaatgcactactgaactatggatacacaatcctgaggggcgccgtgatccgtaacattgtcgctgccgggctctggccgacactggggttctggcatcatcaccgcggcaatgtgtttgcactcgcagatgacttgatcgagccgttccgtcctgttgtggaccacgtcgttcaggggttctcaattgatactgagctgggcgatctaggtgtgcgtgcgagcctcgtcgcaagtctcgacatgccgttcgcgactaatggccatacggtcggaaccatgatcatggaactcgcacagacggtcggcgcatacgttgaaggagagggtacgcgcctgcaagtatcttcttggcgagtggcctaagcggatggctgatccagtgtggctccttcttatgttcgatctgccagtcgtaacgaagtcgcagcgccgagaagcaacccagtatcgcaagatgctgctcgacttcggtttcgatcaggtgcaattgagcgtgtactgcaagtacgtcatcaacgcctctgggctacgcagcatcgtacgcccaatcaagcatcagattccgctagaagggcaggtgcgggtcttgcaactaactgacactcagtgggccagccagtaccgtttttggggccctgcaagtcaggatcccgagaaaaggcccgaggctcttgaactatttgatacttgggacttgcctggatccgcataaaaccgcggatccaggcaagtgctcaagtctagctgggatagtgaacgagtaatcccaacactcagctcggcggtgctccttgctggtcaagtctagctgggatagtgaacgagtaatcccaactatcccacgggttcgttgacgggtcaggcaagtctagctgggatagtgaacgagtaatcccaactccggcatcaagaacatcgagaactttccaagtctagctgggatagtgaacgagtaatcccaacagaggaatggacggtgaccgtcgaggaccaagtctagctgggatagtgaacgagtaatcccaaccggttctcaatgctgcagatggtgatgtcaagtctagctgggatagtgaacgagtaatcccaactttcggcgtacgtgccgatgcgccacctcaagtctagctgggatagtgaacgagtaatcccaacacaaggctgacgtcaatgctcatccgctcaagtctagctgggatagtgaacgagtaatcccaacaaaacgacgagcgactgctcgacgacctcaagtctagctgggatagtgaacgagtaatcccaactcgggcagccgaggaaagcgcgcgctgccaagtctagctgggatagtgaacgagtaatcccaactcgcggaaatgcagaagagcgggttcgacaagtctagctgggatagtgaacgagtaatcccaaccggatcgttgttcaaccgcgccttggtgcaagtctagctgggatagtgaacgagtaatcccaacagcatgctcgggctcttgcgggtctgtccaagtctagctgggatagtgaacgagtaatcccaactgtgcccaatcgtggcggacacccacctcaagtctagctgggatagtgaacgagtaatcccaaccatcgcgtcacgcgcttcgactcggcgacaagtctagctgggatagtgaacgagtaatcccaaccgtggagagggatcggcgagcgttcgatcaagtctagctgggatagtgaacgagtaatcccaactgcccgattcgtcgtcggtgtccgctgacaagtctagctgggatagtgaacgagtaatcccaacgtgatgaagatgacacgctgttttacatcaagtctagctgggatagtgaacgagtaatcccaaccggacggggctgtgcagatgatcgggggcaagtctagctgggatagtgaacgagtaatcccaacccgccggatctgtcgcgaagaacgcgcacaagtctagctgggatagtgaacgagtaatcccaacacgtccgccggtatgacgagtgggctgccaagtctagctgggatagtgaacgagtaatcccaacacgtccgccggtatgacgagtgggctgccaagtctagctgggatagtgaacgagtaatcccaacttggcgcgcatgtggcgcgtctgccggacaagtctagctgggatagtgaacgagtaatcccaacgggctgcagcgcgttcgtggctgcggcacaagtctagctgggatagtgaacgagtaatcccaacaccaggcggatgtcaacgcgcatccgctcaagtctagctgggatagtgaacgagtaatcccaacttgacggtgtgcgatctgcgaccgttggcaagtctagctgggatagtgaacgagtaatcccaacgcagccccgttcggagctagtggcgtgtcaagtctagctgggatagtgaacgagtaatcccaaccgcgtgcagaatgatccggcgaagctctcaagtccagctgggatagtgaacgagtaatcccaacatcggctcgtcgctatggctatggaggtcaagtctagctgggatagtgaacgagtaatcccaacgaaacgacgcggggccgccgggcgattacaagtctagctgggatagtgaacgagtaatcccaactgtggctccggctccggctgcggcgcctcaagtctagctgggatagtgaacgagtaatcccaactacgtcttcttctctctcgtattcgtcacaagtctagctgggatagtgaacgagtaatcccaacccgtccaaacttcgcaccgtcgaccactcaagtctagctgggatagtgaacgagtaatcccaacaaccggtgcggtggcccagcggacaccgcaagtctagctgggatagtgaacgagtaatcccaacccctgtcgaagccaaaactaacggcggtcaagtctagctgggatagtgaacgagtaatcccaactcgtggctgctcggtggcgtcctggctgcaagtctagctgggatagtgaacgagtaatcccaacggaaatacccgtctttgtctcggatctccaagtctagctgggatagtgaacgagtaatcccaactgtccggtttgcaacgcgaagattcaggcaagtctagctgggatagtgaacgagtaatcccaacagcgacgaccgccgacgggcaagacaaccaagtctagctgggatagtgaacgagtaatcccaacgcgaccgcaccggacgccaacgacacgtcaagtctagctgggatagtgaacgagtaatcccaacttatcgcaccgcgcccagccagggcaggcaagtctagctgggatagtgaacgagtaatcccaacgacgtgtcgtgcctgccgcgcgggcaatcaagtctagctgtgatagtgaacgagtaatcccaacgacagatgatacgcgggatgcccgcgcacaagtctagctgggatagtgaacgagtaatcccaaccgatgctcaatgctgcagagggtgatgtcaagtctagctgggatagtgaacgagtaatcccaactagttatggcgcagcgtgagcgctccgacaagtctagctgggatagtgaacgaataatcccaactgccctttctcttgtggtctgcccgtcgcaagtctagctgggatagtgaacgaataatcccaacagcagctgccgttcgatgtcggcgatgccaagtctagctgggatagtgaacgagtaatcccaacaacatccagggtgacatcgcagacgcgacaagtctagctgagatagtgaacgaataatcccaactcagtctcacccgctgcaatgatgtacgcaagtctagctgggatcgtgaacgagtaatcccaacaccgccgacgggtggcagcgcatcctcacaagtctagctgggatagtgaacgagtaatcccaacggcctcatcgggcaccgccaggtcggttcaggtctagctggatagtgaacgagtaatcccaacgggacggaagtgtgctggcgcaggtctacaagtctagctgggatagtgaacgagtaatcccaactgcggtgtaagcttgccggtaacccattcaagtctaactggggtagtaaacgagtaatcccaactcactcacgacgggcagacggtcacgaccaagtctagctgggatagtgaacaattaatcccaacggctcaaccataatcaggttgatcagactcaagtcaagttgaactaatgaatggttagttttatgcggccacatggacagtgccgtcaccgaccctttgaacggcagagacctgcgcatttgcgccaatggctctctgcactaccaagcagctagtggtcccattgaatcttcaatgaaacgcatcgccagcaccgggcacgaacgcatgtgcccgagctgatcggccagcgccacaatctcgtcggcatcatcctgaagtcggctgcgccagagttcaggaactgcagaccagccgtaggaagcacatgccaattacccatcaatggcgccgatccgagctgcggtcgttgccgcttccccggtgcgagtgcggattcaagcccactcgagacctatcctccaggaggagcaactcgtggaactcgaaagccgacgatccctgaacctatcagcattgtgttcagagtatggcactgtactggcctcgctttcaaggctgaagtgtgtcttcgcagcagacagggcagtcaagttcttagtctcgaccaacgtcagcgccaccccctcgacggcaagcgccacccgcgacaatcgaatcattgcgtcattgccggcagagttcgttttggggcatctacagacactaccgcttcacgaattaccgcgaagaccttgagctctcgcggggtctgcactccgacgttttctccctgacaggttaagctgctcacgccatcatgcacccgtaggggcagtcggcgtacgacctttggccgatgcacggctgaccagaatcgaccacatcgctgcctcgatgttcgtgatatatcgcgatcgtcttccacaacaccgcttgctatctgccagattccagagccccttctcgaacagcgggagaatgaaggtagcggcaacgagtagcgtcggtcgacgcctctgtacatctcaggtcagtggcctgtcttaggctgcaaatggatctaaacactgcaagatacgtctacaaggggactaaataatcggcgatgtcgacaacaagcgcattcaacaggccattcgccttgcaggcgaggcccacagcaccgatcgctgaggaactatcagtacatggttcatctcgctctaacagcgaccattgtgcgtgagctctgcggcgatccccatgtggaacaggccgcatggttgcatggtttgatcgaagaccactcagagtttcatgaacgcctcgagtcggagtttccccacctggtcgagagcctcgcaattgattctcgccgcgaagacgagacctaccacgaattcattgatcgcattctcgcgtctgagaatcgcatcgccatcacagtgaagcctgccgatatgagttcaaacctgagcaacaacccgcctcagtacctgcgtaaccgatatgagcgcaatatcgggcgactgtgtatggcagtcaagttatgacgcttcacacgctctgagtaccaccgagcgcaaggaagcccggcacaccgcatgcatgtcctcgctgcgtgcgccagcatccaccaaaaacgcagagaacccgcccgcgcgaccgaagtcacacgagcgggttcttgagtcagacaacgcgctaccgctcagcagcgcaccgctgagcgcgctacattacttccagttcttcttgggcgacgtgccgccgatgcctgcgttgaaggtgttcgtcgggtcgagctctttgaagtgctccaccatcgactcgggcatgtggtacagacgcccgtagttgtgctcggccggcagcttcgcgccgcgagcctcgagcagctcctgaatctggtcgtgcagcttctcggggtcgacgcccttcttggcgacgtagtcctggtgcatcacgtggcagaagaagtgaccgtagtatgcagtcacctcaagctgatcggcgatctccttgggcagcacctcgagccagtcccagtcgtcgcggcgcagagccacgtcgatcggaatcaggcctgcgatgtgcttgcgcttcatgttggcgtagcgagtcgcagcgctggccgcaccgaagcggttcagcgaagcactcttctcttcgtcggcggtgcagacgaagaagtcacccttgtgctcgggctcggcgaagaacgctttgagcatcttctcgctctcgaccttctggtcggcgctcacggtgagcagcaggtggtgctcgaagcggttgcggtactccatcagtcgcttcggcagttggttcggcagcaggtcgaacgcgacctgtgacacggtgtcagcgaaggtcgggccgatgcccgggatcttgccgaagacaccgtttgcccaagtcttgaacgagaacatgcgggtctgcaggccggcgctcatgaacttcaggaacacataggtgtctttgccgtatttctcggccagatcgaaggcgctgcggcccatgtactcacccgagatgggcagcggcatgtcggcctcgaggaacatacggcgaatctcttcgagctcgtgcgtgctgttggtgccgatgtagaacatggtggggttcacttcgagcgggaaggtacgtgtgcgcacggcgaagaccatgagcttgccggctgagcccgacgcctcgaagaggtactcggggttcgcgttgtagcgggccggagtcggctcgatcttgcgcaggtgctcggcgtactcagtctcgctggtgtcagccggtgccggagtgacgtctgcgggcgaccagtcgccgcgctgcagacggtcgagggcgacctcggggtcgtcgccgagcgagatgccgaggtggttgaccagctcgaccttgccctgctcgttcaccctggcgaagatcgcctcacgggtgaaggccgggcccttgcgaatctggctgccgcccgagttgttcgagatgccgccgatgaccgaggcgccgatggatgtcgaaccgatcaccgagtgcggctcacggttgtgcttggcgagctcttcggtcaggtgcgtcagcggggtgccggcgagcgagatggcctcgcgagcgtcgttgatgaggtacacgtcgttgatgcggtgagtcgagatgacgacgatcggccggtcgtagggctggaagcccgggcccgatccgcccgtcagaccggtgttcgacgcctgcgggatgacgatgaagttgttgtcgacgcagacctgcagcgccttccacatctgaaccagcgtggtcggtcgcagcacggcgaagatggggccgccgccgaagcggtagcccttgctgaacggcatggtggcgcgttctgacgtcagcacgttctcggcaccaacgatgctcttaaaggcaccgatcgcctggtgttctgcgcccgttgtctcttgagagggagtcatctcaattctttctgtcgatagttgctcccgcatgacgctttcgacgcgtcattgcaggggagtgttgccgtgcatcgtggtacggccactagcaatcttccggccctgagcatgggctgtcaagcaggggcggcggctgtccgggcactctatatgccttgtggccagaccataggcgggcacggaggtatttctgtgagatacatgttgtatgcaagttcgcgcgtgtcgcgcgaccattgaatacccttcttctctctgggcacactccttgagcgaagacctctcgcaaacaaagtcgcatgtgtactgactatcagtacactaataaccatgccagatgacattcctgccgagcctcgcaagcgcactctcgctcagggccgccccaatgacagcaagtggacacgattcctgctgagattcatcggcccgccggcggtctctcccctctcacccgacgatgtgcgtgccctcgaagaggtcagacgcagaacctccgcagctcagcctgggcaggcacagccgcgcgacgagactccgtcattgtgaatacgccgaatactcccaccgcgcacgacgacgcactctctgacgacgaactccttcgtctggaagcacagctctgcttccccgtcaccgtcgccgcccggctgctggttcaggagtaccggcacgtcctctcaccaatgggtctcacccatccgcagtacctcgtcatgctggcgctctggcagcatgaccacgacgagggggcatccgagagcccgctcactgcgacagagctctcggtcatactcagcatggagactgcgacactcaccggcctagttcgtcgtctcgaagcgcagggattggtcacgcgagagccagacccgcatgacgaccggcgccggcgacttctgctgacgcctgagggccgggctctgcgtgcgcaggcgaagcttgtgcccaggcgaatgctcgaacggctgcgtctggctcccgagcaggtcgagcagatcagagatgccgcatctctgctcgccgccgctctgcgcacctgatccgcctcacacggcgagtcgcagcctgcgcccaccgacaccgacgcgaatctcctgcccccaactcgcggtgagccgatcgctctcgatgccgtcgccgaagacgacgagccgatccgattcgacggtgacgaccaactcggcggcgcctccatcgacggcacccgggctggccgatccacccagcatcccctcgatgaggttcgctccggtcgccggcgacggccaggcctcacgcacgaaccaagcgagactcgcgtcgttcggcgcaggcaggcgtctgcctccgcggtcgtgcgcaatggacgcgcaccacccggtcgccccggtgccggtgccgacgatgaccccagaagacgactgccgctcgcggtactcccccacctgcagcaggtatctggccgactggtgtgacgggtgcccgacgaacacctcgttcagagcgcagagactctggccgtcgtcgagcctcgcctcgacggtggtgagcccggacaccgcggccgattccggtgcccgcagcagcctcagcgcctcgtcagccgagtgccgcaccaacaccccggtgttgacgccaggctccggatcgaccccgatcaccagctgcccgtcgagatacttggccacattcgcaacgagaccatcctgaccgacgacgaccatgacatcctcaggtgccaccagaaagcggctgagatcctcacgctcgacctcggcaagcgcccacccttcgggcagcccgcccgcgactgcagcgcgcgccgccgcagccgggtcgtggcggcgctgcacctcgtcgagcgtgcggccacgtgtgcgcagaaagaactcggcctgtccccgggtgccgtggcgatcgagcagttcatcgagctcggtgcgccggtagacgacgaccgctctgctgcgcatggcattcaccgccttccggtgaaggcgctcagca

SEQ ID NO: 2001 - DNA, 7921 bp, synthetic construct
  source 1..7921: mol_type = other DNA
  misc_feature 1..7921: note = Synthetic
ccgcgttacactctgtagtcataaaggctgcctccttgcctgacataaaactcttcttccaaagcgttttatgccacaagatgcagcctttatctatcccctcggtgagaaatgcgggctaacatcccccggcctgccgggggagaaaggccgctcaagcggcctcggatgacgggatcatcgcatcggaacgcacgaacgtagcgttgtagtgtcaaccgatcgggttcgcccacagggcggcgaggatgaaggcgagcaccgtagcgaaccaaagccagaacgggtgatgcgcgtccacatgaaaacgtccgtgttgaaaggcgaatgccatagtgacacctcgcgtcggaccggagcggcggcgacttgtgcccgccatccgcccccgtccgtctcctaaagcatacaacttagttggtgcggctgccaaggcaatccgcccgaaaatcgtcgcgggtctgagaactggcgaatccccgggctggaactatcatccgctgcatggaggattcgccgctttcagcgatgctgaaccttgcgacggaactggccgtcgaggccggctcgatctccctcgcccggttcggcaaggtcatcgcccgacgcaagccggacgacagcgtggtcaccgacacggacgacgcgatccaagcccgcatcgtccatcggctgtcggaagcgtaccccgatcacgcgattctggccgaagagacgccacgacgcggatgcgaccacggcgacccgacgagcgcgcgctacgtatgggtggtcgatccgctggacgggacgcgaaactatgcctcaggtctgtcgtgctttgcaacgtcgatcgcggtgctcgaaaacggtcgcccggtaatcggcgtcgtctatgagcccaacctgcggcacctctacaccgcttggcgcggcggaggagcttcgctgaacgggcgggcgattcgcgtcgaggagccgccgacgagtcacgaccacttgatcggcgtcccctcgagcaaggatgaactcaccgtgtcggtgctgcgcagttgggttgcgaccaaggggatggtcctgcggaacctgggtgccacgacgttgcacctggcgatggtggcttcgggcgcgttctccgcggcctacgggaagcaatcgaagatttgggatgtcgccgccggggcgttgttggtgagcgaagccggagggcgcctcaccgacccgttcggcgccgagttgctgcccttcgccttggaggccgatcccgaccgagacatcccgttcctggccggagcgccgacgatgcacagccggttgcttcagtccctcgccggaccgctcggttcaccgggtgtgtaacaacttacgccccgccgtcataacagagcgccgctggttgatccgaactcgcccgaccgacgggccaatccgacccgcgagcgccggcgaccggaccccagaagggcacaaggcaattgagcctctcggacgtaccgagacaaaaaagccgcaggtcgtcggtaacgaactgcggcggtcgcccgtaggcggtgcctgcgaatctcacgtcttgttgtgaacaacgccggcacggatcggttacactgccgcgatccgcgccgcgctaatcctgaaaacggtcgcagccgcccacccaaaggtaagcggctgcgagggccggcggaatttcttccttgttatgggaagacccaccggcacggatcggttacactggttgcaccctaaccaataccctctatcctgtcaagcatctttttttcgttttcggaggacgacatgagcacatcactcggcttggacatcggagcgaactccatcgggtgggccctggtgcagattgacggcgatacggagcgatccgtcatcgccgcgggcgtacgggtcttccccgagggcgtggaccgcgatacgaaggggctggaacaatccaagaacgaacaaagacgggtggcccgcggcgtccggcgtatcctagaccgccgacgccgacgccgtcgcaaattggtggcgatcctacaatccgaagggttgttccccacgaccgctgaccatttgacccaactctggaagtccgacccatacaagctccggacgaaagctctcaaggagccgctccccccgttggaactcgggcgtgtcctcttccacctcaaccagcgccggggcttcaaatccaaccgcaagacgggccgcgtcaaggaggacggcaaggtccacaagggcgcgacggacctccaaaccgccatcacccaggcgggcgctcacaccctcggagagtacttgcaccgcgcccacaccaacggtgttcgcatccgaggacaatacaccctccgtcggatgtacgaggaggagttcgacgccctctggaccgcccaacaaccacaccaccgcgaaatcttgaccgacgaactcaaaaaacgcctgcgcgaggaaaccatcttcttccagcgcccgctcaaacccgctgaccacctgatcggcaagtgtccctgcgaacctgcggaacgccgctgcccccgtgccgattggcacgctcagcagttccgcgttctcaaggaagtcaacaacctgaccatccgtagccccgacggcggcgaacagaacctcaccagcgaccaacgtaagaaactcgtccaaacgctaggcacgaagaaggacatgactttcgatcaaatgcgcacgcttcttgatctcctcgaacaccagaccttcaacctggaggaaggtccacgtggcggtcgcggcgatgccaaaaccaagcgggccaagctgaaaggcaacaccatcgaggccgcaatcgtcaaggcgttcggttcccgctggcccgatctgcctgaccccgcgaaggaaaccatccgcgccgcggtcgtcgaaacagaggaggccgacgcactccgagtccttgccgtccaggaatgggggcttgcggcgaaacaggttgacgcccttttggccgtggacctgcccgacggatacgcggcctactcgctcaaagcgatccaaaacatgctcccgtatcttgaacaaggcatgaaggagtatgaggcccgcgaacgcgccggatacaccgtcgatgccctcgctcccgccgcggacttcctgcccttacccgagcgcgacgggaaacccctcgtcaacaaccccatcgtccgccgcgcgctctacgaagtccgcaaggtcgtcaacgccgtcatccgcgaatacgggaaacccgaccgcatgatcgtcgaaatggtccgcgacatgacccgacccgccaaggaccgtgaggccgccgtacgacgcatcaaacacaacgaaagcgaacgcgaacaggcaaggacggtccttgaggccgacttccacgtccccaatcccaagggacccgatatcttcgtctaccgcctatggaaacagcagaaggaatcctgcccatataccgggcgacagatttcgcctgaccacttgagactcttcttcgcgggcgagggcatcctcgaaatcgaccacatcctcccgtacagccgctctctcgacgactcccaaagcaacaagtgtctctgcttcgccgaggccaaccgcgagaaaaaagatcgcaccccccgtgaatggcgcgagggcacacccgagtatgaacaaatgctccagcgcgtcgcgtcgctcaaggaaaccggtatgctctggggaaagcgacgcaagttctcgcaacaagaagtcgagttggacaagttcatcgcccgccagctcaacgacaccgcctatatcgcccgtgaggcgcgaacctacctggaaacgctctacgcgggggaccgatacgaacgcgaccagagggtccggaccacccgagggcaggtcaccggggacctgcgccaccactggggactcaactccgtcctcgacaaggacgggtcgttacagaaaaatcggcaggaccaccgccaccacgccatcgacgccgtcgtcaccgcgctcacaacccacaaacgcctcaacaccctctcacgcaccgaccgtgccctcgggaccgcccgacaaactctccccgacccctggccgggtttccgtgacgaagtcaatcgcataatccagggaatcaacgtctcccaccgcgttgcccgaaaagtcgccggcgccctgcacgagggcaccaactacgggcccaccgagaaacccaacgagttcgtctaccgagtccccgtcaacgaactcaccggcgcgatggtcgagaaaatccgcgaccccatcatccgtgccatcatcgaacaacgcgcacgagagcgctgctgcgatccgccgaccctgggaagcaagaagttccccgcagcggtttttccagacacggacccgccgaagatgccctccggcgtcccgatccgccacgtccggattctcaccacgctcggagacggaagcttcgtgaagctcgacaaccccgacgggcacaagggataccgggccgtcaaactcggctccaaccatcacatcgagatcatcgagaccaccgacaagaagggacgatctcaaaggctggggaaggtggtctcaacgttcgaagccgcgcaacggatccgacgacgccaacccatcatccaacgcgatcacggccccgactccaagttcatcatgtcgctctcgatcaacgagatgtttcttctccaacttcaggatggttctgaagtcttgcatcgcgtacagaagctcagcgaaggcggtatcgttctccgtcctcacaactatgctggaaaagtgagcggttacgatagaccgccgcagattcaacggcgcacggagaatacgctcaggggacgcaaggtcgcggtcgacccgctcggccggattcaagacgccaatgattaagcgcaccctggaaatctccaccgacggacacttcctgtcggtcaagaacgaccagctcgttttgtcgcgggagcgagaggtggtcagcacgattccctgtgaggacgtgggacttctcatcgtggattccaaatccacgatttttacgcacgacgcgctggtgcgggtttgcgaatacggcgggttcgttgtcctgtgcgggagcaaccaccaccccgcggccatgcttgtgcccaccgttgccaacgaaatccagacccaacgcgtccgcctccaggcgaccgccaaactccccctcgtcaaacagatgtggcggcagatcgtgcagaccaaaatccgcaatcagggcggcacccttcccgatgcccaccccgcccgaaccgcattgttcgcgatggtccccaaagtccggtccggtgacccggccaatgtggaggcgcgagcgtcgcgcctctattggccggcgcttttcaacgatgccaaattccgccgtcaaagagaggggcagccgcccaacaaccttctgaattatggctacatggccctccgcgcggcgacggcccgggcggtctgcggtgcgggacttcatccgtcgctggggctctcccaccacaacaaatacaaccccttttgtctggccgatgatctcatggagccgtaccgacccttcgtcgaccgctgtgttgtgaagctcgtcgccgaagggaaaattcagatagatcaggagaccaagcgagaactgctcgccgttctgacccaaactgtgaccgtgggtgacgccgacggaccgctcatggtcgccctgcacaagacggcctcgtccgtcgtcaacgtcctgtccggggaggaggaaagacttgcgctgccgcaaccgtgatcgtcaccggatatcgcaacgtgtggctcatcgccatgttcgacctacctgtagacaccaagcaggcccgcaaggagtacgcccgtttccgcaaggaactgctcaaggacgggttctccatgatgcagttttcggtctacatccgccactgcgccagcgaggaaaacgccgatgtacacttccgtcgcgtacagaacgccttgcccgacgacggcgaggtccgcctgctcgccgtcaccgacaaacagttcgcccgcatgcaggttttctggggaaaaatgcgaaaaccccccatgcccgcgccccagcaactcgaacttttttgacctcggaccgcccctaaccccttgtcctgccgtgggttacgcccagcgaagtgtaaccgatccgtgccggggagcaatccacaacagatgggtgtcggggccctgccgagcgactagtgtaaccgatccgtgccggggagcaatccacaacaaaggagaaactacaatgcgtgtgcacataagtgtaaccgatccgtgccggggagcaatccacaactcaaatctatccggggcgggcgtgccgcgcagtgtaaccgatccgtgccggggagcaatccacaacaaagtcaagcggttgacaacgaaaatcttagtgtaaccgatccgtgccggggagcaatccacaacacgcagagcgacgggaagcccgcgttaacagtgtaaccgatccgtgccggggagcaatccacaacgtccgcgtgttcggtgtcgaaggtggctgtagtgtaaccgatccgtgccggggagcaatccacaactcaggcagcggagaggccgactgggagtacagtgtaaccgatccgtgccggggagcaatccacaacaaacatatccggggcgatcagaaacgagaagtgtaaccgatccgtgccggggagcaatccacaactcggtacgctgtcaagcgcatcggcagcaaagtgtaaccgatccgtgccggggagcaatccacaacaacaatccatgtaggggcatagcgcggaccagtgtaaccgatccgtgccggggagcaatccacaacgccctctactggatagccgacgcggtgcaaagtgtaaccgatccgtgccggggagcaatccacgaccgttggggccacggtccccgcccttagttttgtaattcgtaactcgtaactcgtaattggcgggtggcgatcgccccgcgatcgtcgacccgccgatcaccctgcacgttgtattcatggagccggtgcggtctctgcgcccgctccgcgcccacgatgcgcaagatttgtttcacgtggaacaacgcggcgatgccattgagtggcacggacccgtcggcccggcgccggcggtcgaggtgtcggtcagcgtatgtccgtcgtagggattatcgggcagcagcttggcggccaccatccagttcccgcggttggtgccggccaccgcgaccttctgtccgatccttcgcggctcaggacaagactcgtaacgtttgtgcgctttgcccttgctgatgcactgcacttcaggctcatgcagactgtagagcttatgggcgtcgtgcggttgctgttgccgcacacgatcggcccgctccagcagcgtggccaaggcctcatcaggtgaggcacacggtaagggcgatccctgggttccaagggcccggcgttctcggtcgacgcctcgatccggcgcgcctgcgacgctttcacctccgagagcacaagcccgcgagtcaatcgacaaacgcacatcgacaaccgacaattcgggttcccgcgcaagggacggtgagctttgcaatcttacgaatgtccgatctgtcggaagatcgtggtcgtcgagcggaaggaggacgcaccctttcgccccttttgcagtccgcgttgcaagctggtggaccttggccggtggcttgatggcacgtactctgtgagcgaacccgcctcgccgtccgatctcaagaacctcggcggcgacgagggcgtgacacccgattagtgtgttcccgctcgcggctcgcaggcgtcggccagcacgcggcaaaaccggtcctggatcgctttgtaggggctgctcgatccgggatagccgttgaagagcacggcgaaggcgaagcgcggaccggcgtcggaatcgacgtagcccgcgagcgctcggatgcccttcatcgtcccggtcttggcgtggac

SEQ ID NO: 2002 - DNA, 6545 bp, synthetic construct
  source 1..6545: mol_type = other DNA
  misc_feature 1..6545: note = Synthetic
aaatttcataattatgccagcgtagtgcggccagtggttccaacgtggttgggcatgggcgcagtagtcggtagccagtagacggcggggggcgggacgcggtgagccggtggcggtaggtggtaggtggtagatggtagatggtaagcggtaggcggtaggcggtggatggtggatggtggatggtggatggtggttggtgggtggagcggggagcgtagagcggggagcggggcgagtggcgagggacaaggggccagccttgaaggggggcgcttcttgagttgcagttctctggctctggttttcaaaatcaattaagtggggtgtccccggaactccggaactaccaagtgtggtgtccccggaactccgcggttagggatgcgggctaaaaggacgccccgccttgcggcggggcgttgcctgcgaatttctttgttgtgaaaagaattcgcaagccgggaacgagtacacttccctttatacctgcttgtggtagactgtcaacagccatttggcagaaatcttagatgaccataggaggtccccatgagcaagcgcgtgttgggtctggacctgggttgttcttctatcggctgggccttgctgaaagtcccggacagcgacgatgaggagggtgaagtaaccgctttgggcgtgcgggtttttccggacgcagcggaaaacgagaaggggcgagtacgaacaaggaacacgcagcgccgcatggcccggctggcccgccgaacgcggtggcgccgccgtttgcgcaagaagcatgtcaagagcctgctgcgtgaggcggggctttggcccgcggagggttcgccggcactgaaggcgattctcgagacaaacccaattcaactgcgagcagaggcgctcgacaggaaacttgagccttacgaattgggacgggtactctaccatttgtgccaacgacgcggcttcaagtccaacgcaaagggcggcattgagaaaggccaagcagagacagcaggcaagaagactggaaccggcaagcacgaagatgacgacccgaagaagcttgaagcgaagatggcacagctcgagggcgagatgggtgataggaccctcgggcagttcctttatgctgtctcgaagaattacgaccacgctaagggcctggagaaggagaaaacccgcgggttctggcgcgcgaagcgcgagatgtaccgtcaggagttcgagcggatatgggcagcccagaaaccttactatcaaagcatcctgactgaggacgaacatgggctcaaggacaaagttgcttacgagcaaaacggcatcttccaccagaggccctattccctaccgccggatcaccccaattatggccggcaaatcgggtattgtgaatgcatccccaacgaaaagcgttgccacaagtaccattgggcggcgcagcagttcatcatgctcaagcagattggcgatctgcaaatccgaactcccaaggacggttgctctcgaacgctaaagaatgctcagaaaatgagtttgcgggacgctcttctttggcgaacgagtatgcccctcaaggaagcccacagccttcttggccttgacaaggacgaggcctttaacttcgattttgaggcagcgaaacgaaaacctcgggctcgtcctaagcaagaggccctggaacaggaggggcgtaaggaaaaggccgctgaacgaaagctgcaaggcaacaagtttggttctggagtagcgcatgcaatcggcagagatcgagcgcagttgcttggggaagaggaattgatagccctttccgacgcatggatcctggcacaagaacctgatgattttgtgggagcagtggaaagagtagcccttcgattcggctggtcagggtcaagggcttggtcggcacaggaggcgcggacgttgtttggctattccgaattacgggacggccacctgcgcctatcgctggaggccgtgaaggcgcttcttccttacctgggcaatggcgaatgccccaaggcctttctagacgaatacggagcgcgggaagccgcaggatacgaaaggcgcacttgggcaaggcaaccgagattgccgccgccgcataccgttgttttgaagccgcaacacccgcttgccgcaggcgaaccacaaccgctttacccgcgcctggtcgagggaaagccactcggcgattccctcatttcgtgttccagcaacccggttgtccagaagtcgctctgggaggtgcggaaattggtgaatgccttgcttgagaagtacggcaggccagacgagatcgtcgtcgaactcgctcgcgacgcgcgaatgatgccgaagcaacgagagaaatacctgtccctgctcctggaacgggaaggcgagcgcattgatgcgcgaaagaaactcgcggaatgggggaggccttcctccgaatcgaatattcgtcgctatcgcctgtggctggaaatgggaggttgcaatgcacgttgtccgtacacgggggattcattggcctccccagggacgttcctcgaccccaccttggtggaggtagaccacatcctccctatatccaggtcgtcactcgacagctacgataaccttgtcttgtgtgcggcgcgggccaaccgcgcgcgctcagaccagctaccaagcgaaatggcgaaccacggggatatcctccagcgtgtagaaaagtggcacgaaaacaaatccctgagcgacgaccagcggcgggctgtaagggcgcggatcgaaaagttcgatcaaaagaccgtggatttggcaggcttcctctcccgccaactcaacgacacgcgctacatctcgcgcgttgtgcggaagtaccttcgcgtgctttatgacccggacagcagcagtgatgacccaaacgggacgcgcgccgtcagggcaactcgcggcggcataaccagtatgctccgaaagatttggtggggcccgaaagaaaggagcgaccatcgccaccacgctgcggacgccatcatgatcgctctggcacctccagatgagggtggcttcatccgcaggttgcagacctgcacggaacggcgcagagatggcctgcctaggctcgatttcccttggctcgcttttcctcaagaagcgcgggccaaatgggaaggcattatcgtctcccacaaaccttcgcgcaaactttcaggccccttgcacaaggagatgtttttcgggttggcccgaagggaaactgaaggcaggatagctgaagctcgcgtgccgcgagcgaagaggccagcggaatcggtgcgtgtgtacgtttcaaagtgcaccctcacggacttcgcgaaggcattcaataagactaaggcgaagctccagcaggcaaaactaagagagattcgctacaagaggatcagagagctttttagcgcacgctgtaaagaacaggacggaaagctctttgctgacgcagcgcaattcacgcgcggttctaacaaccccctgcgcctgccggcgaatagagcaaaactcgccgctaacccaagccttcagggcacagccgtatatagcattaggctcctgcacgagtcagcaggcatggtcccgctggaagctcggaagatgagatccgaagagcgcgttcccctgtcctctctcgcaggcaataccgaagcgcgtgaagtacgatacgctgaacctgggagcaaccaccacgtttcaattttcgagcttccacgtagagcagccggaagaccacgacaatatgccgccgacttcgtaactatgttccgccacgcggagcgcgtaatgtggctcgcacgcgaggcaaagaagacgaaacaccagccggagcctcacgtgagccgcacccacccccagcacccgggcgctcatttccgcatgtcactttctatgaacgaaatgctccggctccccaacagctttcttgggctcaagaacgccgccgatggcttctcaatctggcgtgttaggatgcttacaaaagggaagattcacctcttgctccacacgtatgcaggcagagcaaagcaggctgagaacagagttgcagcacggcagataagcccggctgacttgatgaaggtcattgactcctacctagactcgacgcccggccacaagcgggagatggtaggcaaagtatccgttgacccgctggggcgcgtatcggaggcgaacgactaactacagcgccccggcgctttactgaggagggtggccctatgcttaagcgcacagtttctatctccggccccgacacggccctgatggtacactacggccagatcgaggtttcgcgcaacggggagcggattggcactttccccgccgaggatgtcggcgtcctgatcgccgacacgcccacggcccgctacactcacggcacgctcgttgagcttctccgccacaatgccgccgtggtcttctgcgatgagaaacacctgcccgctggaatgctcctgcccgtggaagccaactccgtgcaggcccagcgcttgcacgcccaggccgaagccaagaagccgctccttaaacgcctctggcagcagattattcgcgccaagattcaccgccaggccgcgctccttcaggagttgggccgccttgagtacgccttcctgcgcgaactggcgcgcaaagtccgctctggcgatccgcagaacgtcgaggcgcaggcggcgcgcttctactggccggcgcttttcggcagggagttccggcgcgagcgggaaggcagccctcccaacgggttgctgaattacggctacatggtggtgcgtgccgcggtcgcgcgggcgctgtgcggggcgggtttgcacccgtcgctgggcctgcaccattcgaataagtacaacgccttcgccctggccgacgacctgctggaacccttgcggcccgtggtggaccgcgccgtccagcgcctggttgccagcgggcaggttgacgttgacgccaagaccaagcccgttttgctggggctgctggcggacgaatcggcgctcagcggccccggttcaggcccgctgctggtggccatcgaacgttacgcttcatccctggcggcggtcttttgcggcgaagggaacggtcttgagattccggaagttttcgcttccgtagggagcaaggcagaagagccggaaggcccccgaacgagtcttgagattgcggatgtgttcgccgccgaaggcaagggccttgagaaaccggaacttattgggcgtccaggcccgaatgggccgtcgcgttaatagccggggccggcaggccccggtacgtgggccacgcgatcgtgacaagccctgttaagggcgtccgtaatcaggcattggccttcgcctacggccgcccttgccagggcttcctgcggtctggagcgcatcttttccgggcgctcccgcgcccggctattcacgcgccgccctgccagggcttgggccattgaatgtgtcccgaccgggggcctgcacttgggctgctgttcttccttccggcgaaggctgagcatgcgttatggaaataagcgggtggcggcgcgtgtggctaatggtgctcttcgatctgccggtcaagacgcgggtggaccggcgcaattacaggctgttccacaaggacctgctcaaggatggctttcagatggcgcagttctcggtgtacgtgcggttctgtcccagcgtggagaattcggaggtacacgaggggcgtgtcaaggccgctttgccgccggaggggcaggtgcggctgatggtgttgacggacaagcaatttgagaggatgaagatttttgtcggaaaaaggaaggtggagccggagcaggccccggcccaattgctgcttttttgaggcccgccgggtcacaactcccggcgggccaagggcctacggcggcaccagtgtactcgttcccggcctgcgatcaatccacaaccggcagtgcgcaattcaccatgtccccttcagtgtactcgttcccggcctgcgatcaatccacaaccattggctggcgggcgactccgatagaaccagtgtactcgttcccggcctgcgatcaatccacaaccatcgttcgcagcgccatcaaccctcctccagtgtactcgttcccggcctgcgatcaatccacaacccgccaccatgcacaccccctgaccttcaaagtgtactcgttcccggcctgcgatcaatccacaacgctcgcgcagagcttggagaactgaatagcagtgtactcgttcccggcctgcgatcaatccacaactatgatgccggcatggaaaacatcacgcaaagtgtactcgttcccggcctgcgatcaatccacaacaggataatcactcggtcacccgtcctgagaagtgtactcgttcccggcctgcgatcaatccacaactctggtcgctccgcgcccccgccgcggaaaagtgtactcgttcccggcctgcgatcaatccacaacggcctggagttcgttgacgactccctggccagtgtactcgttcccggcctgcgatcaatccacaacactcgcgcctctgttgtctctgtcattg

SEQ ID NO: 2003 - DNA, 24311 bp, synthetic construct
  source 1..24311: mol_type = other DNA
  misc_feature 1..24311: note = Synthetic
tcagacgcgcacgggcgtcattcagggtgttgcactgcccggtatgacgccgcgcgagcaggtcaccaacagggacgaggctccccaggccgcgccggtgaggcgttccctcaaggaacgcatggcctcggcccaccattcgttcgcggatccgacgccgatgagcgcgacggataacccgctcacccagacgaacgtcggcctgacgacgatgacttcgacggatgctgccttccagatcgcggccgacggtgaagtcacgagcgctgaggccactatcccgatcgccgccgccattgaggtgagcgagcccgccggcgtcatcgacctggacgttgcgcgcgagcatcatctgttcctcgtctccgacgcggttgatcccgccgagctcgaggcccttgcgatctccatgtgggacgaggccggatggatcgccccgggacgcctgcgcctctcctccgacgccgagctggagggcccgtggaccctcgaccagccgacgcgcgcggcgctgggcaccccggcctcgctgtccaacgcgtgggtcctgcgttgcccgcaggcgcccgcccgccagcaaaacaacggcgtcatgggcgagtgggacaaggcgttccccgacggcctgcccacgggcctggagtaccgcgtgctcgaggcgctgcgccgcatggcccgccgcctcgcgggcggactgcgcatcgcgggcagcggctacgtcatggtccccgacgccgactcggccgtgaacctgacggtgtactcgccgcgctggatcaaccccgaggacctgctctccgcgatgcgtgagcgcgccggtttcgagcagatgaaggacgcgcgcgacatcacgcctgaggctcccaagcccgtcccgctgacccccgcgcagatcgcccagatcgagaagctgaaggccgagctgggcccggttcgcaaggacatcgcctccaagatcgccaaggcccgcgaggagcacgaggcacagcgtgacaagccgcaggtcgtcgacggctacgccctcatgagcccgatcggccaccgctcggacatgatgatcgaggtccacgccgtgcccacgccgccgcgcgtcctgcgctgggagccgtggacggccggagccatcatcgaatatcaggtccgctggctgcccacctccgcgccgacgcccggtgttggcacgatgagccgcaccgctcgcctcgagcgcctgcgctcgacccaggacgtggagaaggccgccggaatgatcgcaacgctcgtgggcggcaacgtcatcgacgaggacggcttcctcgtcggtctcgaggaaatctccccggaggacggggaataggtcagctgtagacgccgcgtgcatcgcccggtagtgtgtctgtgtctacatacccgaatgaacgaaagggcacaccatgaagctctctgcacgcaaccagctccccggcaccgtcgttgaggtctctcagggcgccgtgaacggaatcgtcaagatcgaggttgctcccggcctggtcatctcttcgtcgatcacgaactccgccatcgaggagctcggcctgaccgtcggctccaaggccgtcgccgttatcaaggcctccaacgtcatcgtcggcgtcgaggactgattttctttcgttaaagggtggccccgcaggtgttcctgcggggccacccttttgtttgtggggcttgcgtgcggtgcgcactgtggcgtgcgcgccgtgcgcgtgcgttactggccgcgcttgacggactcgagcagcatgacggccacgtcgcgcacctccgggagcttcccgcccgacgaggcagtggccccctcggcgttcgtgccgccctggttggcgtcggaggagacgaagccggcggacgtacccgaggccgagccgagcatctgggagcagaaggggcaggccgtcgcgacgacgtccgcgcctgtggaggcggcctcgacgatgcgggcgtccgcgatgcgggtcccgcgcgtctcctcgaaccaggcgtgcgcgccgcccgctccacagcacatcgcgcggtcgcggttgcgcggcatctcgacgagctccacgtttggcagggagcccacgagctcgcgcggcggctcgtagacgcggttgtggcggcccaggaagcacgcgtcgtggtaggtgaccttcaggggtgcgccgaccgagggagcactgcccgcggactgtgccccggcctcgtccgtggaatccgcacccgtagatgcagcggaagtgggggccaccggcgtgaggaggccgtcgcgcaccaggcggttgaggagctgcgtgtggtggacgacgtcgaatgagccgcccagctccgggtactcgccggcgatcgtgttgaagcagtgcgcacaggagacgacgatcttctggggcttggcttccttgagcgtgtcgatggcctgggcggccagcatctggaagagcgcctcgttgccggcgcggcgggccgggtcgcccgtgcaggactcgcccgagccgaggaccgcgaaggacacgcccgccgtgtgcagcagctcggcgacggcggcgctggtcttcttcgccgtgtcgtcgtaggcgcccgcgcagcccacccagaacaggtagtcgacctcggaggcgtcctcgatgtcctcgccgacgacggggatgtcgaagtccagcttcttcgcccactccatgcgcttgcgggcgggctggttgtaggggttcgccttggattccatgccgcggaacgcgcggcccagctcgcgggggaacgcgccctccatgaggacctggtggcggcgcaggtcgaggatgtggtcgatgtgctcgatgtcgacggggcactgctcgacgcaggcgccgcagttcgtgcagtcccacaggacctcttcggagacgacctcggggaccaggggagcagtcaccgcggagacgccctcggggccggtcgcgcccgacagggacagcgcggacaccaggtcgaaggagtgcggcgaggccggcacgcccttgtcgaggaggacctctccgtcctcgagcttctggtggccctcctcctgctcgacgatctgcacgttggaggcggactccatgtggtcgcgcaggcccatgatgagcagcttgggggagaggggcttctgggtgttccacgcggggcacagctcctggcagcggccgcactcggtgcacgagtacaggtccaggcgggccttccacgagaagtcgtcgatcgtgcccacgccgaggaccgtgtcctcgggcaggtcgtcaaagtcgtcctcgctggtcacgggcttgccgtcaatgagcatgtggtcggccggtcccagggacttcgtgccgtccgcgttgcgacgcgtgtacagattgaggatcgcgacgaagcggtgccaggcgacgcccatgcccgtctggatgccgacgaccgtcagccaggtcatggaggtgatgaccttgagcgcgctgaccagcacgatcgcgttagccagcgaggcggccgaggaggaggccgcggctgcgaagagcgcgccgagccagccggtgagcgggaagtgcagggcgctcgcgtgggcctcgaggcccggggtcacgctgaagagcgcgtattcgaggccgcgcagggccacgacgcacgcgcacacgatgaggatgacccactcgacgaagagcgcctgccagcgggtcgagccgaggaatcgggaggccaggccgcgcggggaggaatcgcgcgggtggggcttggccagggacgagggcggggttccttcggggtcggccgcggcagcagcggcgtcggggtcgtcgttcgagagggccgcctcggcggccgtgccgcgcccggcgcgctggcgcacgaccatcagggcgatgatgccggccagaccgccccaggcgaagacctcggtgagccactcccacggcgtgaagtggccgaggaggggcagcgtgaaggtctggacgcgcagctgggcgtagcccgtgaccagggcgaggaagaggatcgggaaggagaccatgacgagccagtgggcggccttgatccagggccgccccttgaactcgcggtgcgtgagggctgcggagacgacgccccagaggcgcttgcccacgggggtcaggcgtcccggatcgggcgtgcccgccgagaccgtgcgccacatgtgcgtcaggcctcgcgcgaacgacaggacggccacagcgctcaccagcagggcgagtccccacatgatggcgctcagcgtcggattggccacgtttcctcctcaagattgctgcactccattgtgtcatctcgacactggagagaccgattctgccccgcaaagcgtgcgcaattacgcgctgcgcgtcgtgtttgctgggcctgcgtgtgctcgccacaacgtggatatatgccacgaggaggggaaaagtatgggagagtgagagcgtgcttcccgtctcgcagccagacatgacactgtccgcccaggaactcttcggagacgatcacccgcatgatcactgcggggtcttcggagtatgggccccgggcgaggacgtttcccgcctgacctacttctccctctacgccttgcaacaccgcggccaacagagcgccggtattgcgacgtcgaatggcaagcagatcctcgtgtacaaggatcagggcctcgtctctcaggtgttctccgagcagtccctccagggcctgcgcggccacatcgccctgggccacgtccgttacgcgacgaccggcgcggacgtgtggcgcaacgcccagccgaccctgggccccacccccacgggcacgctcgccctggcccacaacggcaacctcaccaacacggtcgagctgcgcgagctggcctccgagatcgccgacgacggcgaggacttcgaacgcggcgcctccaccgacacctccctcgtgaccgcgctgctgggcatggccgaccgcatccccgggccgacccccttcatcgcgtcgccgtccgtgacgccttccgagaccgacggggacgaggccgccccggcctcgtcggttgctgacgacctagagcccgcgcccctcgtcggtgccgccctgaaggtcctgccacgcatcaagggcgcgttctccctggtctttatggacgagaacacgctgtacgccgcgcgcgacccgcacggctaccgcccgctcgtgctgggccgcctggcctctggctgggtcgtggcctccgagaccgccgccctggacctgtgtggcgcgaccttcgtgcgcgaggttgagcccggcgagcttatctcgatcgacgcgtcgggcgtgcactcgcgccgcttcgccgtgcgccgctccaacacctgcgtcttcgagtacgtgtacctggcccgccccgatacgacgatcggcgggcgccggatcgtcgccgcgcgccacgagatgggtgccgccctcgcgcgcgaaaaccccatcgaggcggatctcgtgatccccacgcccgactcgggtacgccggccgcgatcggctacgcgcaggagtccgggattcccttcgcccagggcctcgtgaagaacgcgtacgtgggccgcacgttcatccagcccacgcagtccctgcgccagctgggcatccgcctcaagctcaacccgctgcgcgaggttatcgaaggtaagcgcctggtcgtcatcgacgactcgatcgttcgcggtaacacgcagcgcgcgctcgtcaagatgctgcgcgaggccggggccgccgaggtgcacatccgcatttcgtccccgccggtgctgtggccgtgcttcttcggtatcgatttcccgacgcgcgccgagctcatcgcctcgtcgatgagcgtcgaacaggtgcgcgaatccatcggcgccgactcgctggcctacctgtcgatcgacggcatggttggtgccaccggacagggcacgtccctgtgcatcggctgcttcaccggcgaatacccggagacgattcccgccgggacgcccgtgcccggaactcccgacgccaccccctgctaacctccacgcccgcgacgccacccggcgccgcgggcgctgttctcaccccgtccacccagacacggcctcgtcgagcgccatccgcgaaaggcaccacccatgaccgatacccccctggactacgcgacagccggcgtcgacaccgctgcgggcgaccgcgccgtcgagctgatgaagagcgcggtcgccgccacccacgactccaccgtcctgggcgcgaccggcggattcgccggcatggtcgacgcgtcggcgctgctgggcatggagaagccgctgctcgcgacctccacggacggcgtgggcacgaagatcgcgatcgcgcaggccatggacgtgcacgacacgatcggccaggacctggtcggcatggtcgtcgacgacatcgtcgtgatcggcgcgcgccctgtcctcatgaccgactacatcgcctgcgggcacgttgtccccgagcgcatcgcctccatcgtcaccggcatcgcgcgcgcctgcgaggccacgggcacgcccctcatcggcggcgagaccgccgagcacccgggcgtcatggaacccgacgactacgacatcgcgggcgccgcgaccggcgtcgtggacgcctccaagctgctgggccccgagcgcgtggccgacggcgatgtcgttatcgccatggcctcctccggcctgcactccaacggctactcgctggtgcgctccgtcgtttcccgcgtcggcgcctcgctggagtcccacgtggccgagttcggccgcaccctcggcgaggagctcctcgagcccacccgcctgtacacgcgcctgtgcctggacctggtcgagcgcttcggcgtcggcggcatccacgcctactcgcacgtgaccggcggcggcctggccgcgaacctgtcgcgcgtcctgcctgtcggcgcggtggcgacggtcgaccgctccacgtggaccgtgcccgccgtgttcgactgggtgcgccgcggcggcgacgtcacctgggtcggcatggaggactccctgaacctgggcgtcggcatggtcgccgtcgtctcggcctctgtggcctccgaggtcctgtccgcgatcaacgaggccggggtggccgcgtgggtcctgggctccgtcacgtcggccgccgccgacggaaccgtggccggcttcgggtcggtcgccgacctcggcgctgattcctccggcgtgcgcctcatctccggcacgaagggcgtccaggcgggcgccgtgctgctgcacggcgagtaccgcgtgggctgagctgtgctgcgctgcgcggcgttgagccgcgcgcctgcgctgagtgcgtgaaaggggtcgaggcctgcgggcctcgacccctcgtagcgtgcgcgtgcttttgtgcgcgtgcgggcgggcgtgtctgcgcccgtcagaaatagtggtgtgggcacgccaaagcggcggaccggttctcggtccgccgtgtggctgagccgttacttagtggaggatccacccgtccagaaggactcatcgagctgctccggatcgatgtcgtcttcttccgcgggcatctcggcgaagtcggcgtatttcgagtagaggtcgtcgtcgatcgcatcgtcctcttcgggctcgtccgccggcacgtgtgccaggtacgagtcctcatccgccagctcgcgctgaagtgcgtttaggtcggtgtcggggctgaaatacttcagcttccgagcgactttcatctgcttagccttttgacggccgcgccccatggcgtcgaccccctccgcgtcgttcgggtccgcgtgaagcggttccctgggtgttcaaaatgtttcgtgggaccatcatagctaatgactggccttgacctcaccttggattgggttttgcgcgctcagcggagcggcgcgctgggcgcgtattcccacgaaactggggaaacagaaccggcgcaacccgcggccagtgtggccggagttacgccggtttgcgtcagttgatgcttacagagcctcggtgacgttggacttgagggcctgaagcgtgtgcgcggcggcctcgcgggcggcgcggcgagcctcgcggcgggaacgacgcgacgagcgggtcgccagcaggacgatcacgccgatggcgccgaccacggacagggcgacgacgccgaccttcttgagggcctcggcgttaccgccggcggcgtcctgcagggtcagcgacgcggactccttgaaggatgcgaaacgggcgctggcctcttccttcgcctcctgggcgagggcagcgggctgcacgcgcgcgtacagctggtcgatcgtggcggccagctcggcgcgctgacgctcgaggtcggtggtgatctgggcttccgtgcgcggctcggcgggggcggcctcgccgatggtcacgttacgcgtatcgaggttggtgctcacttgcccagtcccttctcgatggcttccttggtggcggcgaccgacgcggccgggtcggggcggtgggcctgcgcgctcttcagggagctggcgcccacgagcgcgaggatcagcacgatcaggaggaggatgccgacgacgatcagcgacgctgcccacgcggggacgacgagctcgagggcgacctcgatcgtgtggaagacccaccccagcaggtagagggcgaagaccgcggcggccacgaggaggccgatgcccttaccgctcttggacgcgaaggcgcgcagcttcgccttgttgagctcgatctcgccgcggatgatgctggagatctggctggtgaccgacgcgaagagggcgccgatgctgggacgcgcctcgccggcggcgggtgcgggggcagcgggcgggtactgcccgggctggggggtgggctgagtcatggatgctcctgcgcgtacgggtgaacgaggcgatgcctcgcctgatacgcctagtgtctcacgaagaatggcggctcgcagtgaccgttacgttactcctgcggggcgatcgagccgggcaggtcggagaggatcttgcgggcgcgcactaccaggtcggagacctcgggctcggctagggccgggtcctcggcttcgacgacggggatgccgcgcatcgcggtctcggtgcggggctcgggcgaggcctgggggacctcggtcgcctgggttgcttgggcgggggtggcctccacgcgggtggtcgccgcgtcgagggcggcctcggctgcttcctcgggttcgggggcctgctgagtgtccgaggtctgcgccccggcctcgtcggcggtgccgagcgggtgccacgcgggggccgaggcggagccggtgggggagatgacctcgtcgaaggaggcgggcagcgccgaggggatcgggccgaggagggccttcgggtcctcggggttggcctccagggaggcggcgatgatcgcggccgaggggttgggtgcgtcgagcgcgacccggccgttcgtcaggaggatcgcgcggtcggaggcggccgcgacctcggcgttcggggtcgcgatgacgaccgcgcagcccgcgtccgcgagggaacgcaggagggggccgagttcgtcgcgcgcggcggcgggcagggagaccgggtcttcgatgaggaagacctcggcgccggacacgatcgcgcgggcgatgagggccttgaagcgctcccactcggagagctcggaggggtggacctcgacgcgctgggcgaggcccgtgatctgcagggcgcccacgaggttgtcccagtcggcgacggagcccgtcgcggacaggggagcgaggatgttctggcggatcgtcagggactcgtcgagcggggagtctgcccggatcagcgcgaccgagccgatgcggcccgcgaggcgcgcggccagcgagcgagagggcgcggcgacgatgcggccggcctgcggctcctcgaggcccgcgaggatcaggaaaagggcgcgggcgcgacggcccgttgggtccaggatcgcgctcagcgagcgggcgcggaagcccaggtcgatgtcggcgaggaggaccgcgccggtcacgtggtccgtgtaggtgatgcccaggccggcgacctggacgcggccaccgcggcccttcgcggagaaggaacggcgcgagcggtaccaggggcgcggctcggcgggcggcaggtgcacgggggcggcgagggcgttgttggcgttcgttgccgcgctgttgcctgtggtgttggcgctgttggcgggcgtgagcttctgggcaggctgctgcggcgcggcctgcggggttgcggtctcgggcgcgatgtcgctggcggtctccgatgtgttctccgctgctgccgccgcgtcggtcgtgagcgcggcgggggtggcctcggcctcgtcggttgtgacgaggggggtggaggacacgagggtctcctgcaggtcctgtgcgccgtcgtcggcgagcgtttctgcgggggtgtcggcgatgggggcgtcggcctcgtgggtggtgccgctgaggatctcctcgaacgacgagagggcgctgcgcggggcgggtgcctcgtcggaggtgtgggcgggggtcgaggcggctcgctcggcgccggcgcgcgcggcgtcggccgtcacgtcggccagctcctggctgtccgagccatgcaggttttcacgcgggtcattcgacatgcccccattgtttcaggatcgcgccccttgtgtcgcagtggcgcgcggaagtgggtggggtggccctgccgaaaagtccttgcggatgtggcttgcatctctggaattggagatgtatgctatgaagcgactgaatcttaacaagggccgacatgttagcggttctgaatgctcactgctttgcagtagaccgggtctctccgtgagaggctcggtatctttcgaaacagacacaaatgtgtgtgcgttgtgccactatgtgtgcatgagtgattattcggcaaatgtgcagcatcgtcgctaccgcatcgggatcgacgttggcctcaagtccattggtttctgcgcgatcgaagtcgacgaacgtggaactcccatcaagctcctcaattcgaccgtacatctgcacgatggtggtgttgagcctggtgacgggaaagaccttagccgaaagaaagtgtcgggcatcgctcggcgaaccagaaggcgtaggcgctcgaatgagaagcgtctagcggatctagattcatacttgtcgcagcaattgggttggcagcttcctaatcttgaagagttcgacgatccgcacgaaccgtggcacgtgcgtgcggagctgctcgactcctacgtgtcagaccctgcggagcgtgcggaaatgctagcgatcgctgtcaggcatatcgcgaggcatcgtggttggcggaattcttatacatcggttgcatcgttgactcgggctacttacccgagcaaagcgctcattaaggtgaacgaaagggtctgtgaggctctggggacgaagattgtcgccgaggctacgcaggggcagctggcctctgcctacgtcgcagatgaacgctatgcccttcaggcactgcgtggcacgcaaggtctattccgaggtcgacagtaccagagcgatacctaccacgagctcagtcgaattcttgagctccaacacattgatcgtgctcaaatcaaggagctgacagagatagttttccgagtgactcaccccaggaatggggcgcgacgaaacatgcgggttggccacgatcagttaccggggcaggaatcgaaatggcgggccgaaattgcacatccggcgtttcagaagttcagaatcgttgcggcactagcgaatctgagggttcgttctggtggccaggagcggaagttgaatgccaatgagctgcgacgagtaacgcgatatgttttggatagcgccctcaaggtcgaggatgttgaatggtttgatattgcagagcagctcggcattgaacgggattgtttgacgggcaccgcgaaaccggtattcgaaggagagcccgctctgcgccgtccgccgactgatgctgtcagtgtcattgtcatgtcgagcaagttgacgaaattgaagcgctggtggaagtctgcgaatgacgaggatcgtgcggacctcgtaaagtttatggctaactcgaccctcgctgagggagaggagtttgaaaacgatgaggttgatggtttcctggcttctctcacagatgatgacctggcaaagctagaggaacttgcattgccatctggccgcgctgcgtattccctggacagcctgcagagactaacggatcgcatgcttgctgatggatgtgacctgcacgaagcaagaaagcgtgagttcggggtgagcagctcctgggtccccaaaccggaccctatcggcgctcctgttggcaatcccgctgttgaccgcgtcatgaaggaagtgagtcgatggctgaaggtggccgttgatcgctggggtgttcccgaggcagtgaacatcgagcacacgcgtagcgggatgatgtccgctgaaagcgccaagaaactgacaagcgcgaataaggcgaggcggcgtcagattgaggtcttggcagagcgattaggtggacaggcatgtgctggtggaaagttgaatcaggtaacaaagatcaggcttttagcgctacagaggcaaaaatctaagtgcttgtactgtggtgcgggaattcgatttgaaaccgcagagatggaccatattgttccacgttcaggcctaggatcaaccaatgatcgaaataatctcgttgcagtctgtcgtgagtgtaacgcgagcaaagggagtcagctgttctctgagtgggctcaatcaggaagtcgcaaagataaggtttcgttcgacgatgtgatcgaacgtgtttggtcatggggacaggacccgggggtgagtccgaagcagcataagaagttccaagctgtcgttgttgcacgcctgaagtcgaagaagccggatcaagagtttgatgcacgatcgatggaatcggtggcatggatggcggttgagctaggcaagcgcatcaggggatacttcgcatcagcatcctctgcaaatgaaggggcagtagttccctcagttgggctgtatcgaggccgtattactgcggcagctcgggtcgtttctggatttgagggctgtgtacgcttcactggtggcaatggtaagacgcgtcttgatcgtcgacaccatgcaatggatgctctcgtcattgcgctacttgatgatcgcatcgcacaattacttgcactacgtgataatctgcgttttgcgcagcttgttactagtggggctgatgagtggagacggtatctgcattctcatccgtcggaaaatgctctgatgtatgactggtctcagcatatgcaagttgcggcgaagaagtttaatgactcgctcgagagtggcatggtgcggttcaccatgaatcagcgtttacgccttggatcgagcagagcgcacatggacagtgttacatcttttgagcatgcgtatctagaccggaatggtgatcgtgttccgaagcttgacaagaatggaatgcgtaaagtcaaagaacatggagagtttcgtctgttgtctgatccgcttcctgtggatctcattgatcgggcggagacgcctgctctatgggcggccctcgtgaaggatgaacagttcgatccgcagacggggctccctgcggaccccaaacggacaatcacgatccatggcagaaggatcggccctatggagcgaatccgcttctttggagcgactcccgccgggaaatggtcagcgtcactcgcggtccggggcggttatgtgtcgatcagtaatacgatccatcacgtccgtatctacaagattgctgaagagccggcaaagtatgcaatgctgcgtgtctatcaggttgatttgcggcatgcgcatggaaaggatcttttctcgttctcaattccagcaagctcaatctcaatgcgtacggccgataaagtggttcgcaaattccttcgcgacagcacgaaaaagccgtacgcttggcttgtcgctggtgatgagttaagggtaaatccaaagttctacgatgaaggtaaaattggtgaattcttcaaagaggaaggctatggtgatgtagtcgagtggcggatcgtcggttttgaaagcgcgacgcaagttaatctgcgtcccctgcgtatttcagaggaaggattcaatgacgaaactccacaagctgtgaaggatatcgcaggtaggagcaaatcttggcgcgtcaccattggtgcattgcttgaagcgggtggtgttgcagtgatccgtcgtaatgttctgggcgaagagcgttggaagtcgaaagatgacagactcccatgtagcaaggtttttgagtgacaatggacggcagctggcgggttatagacctctctgcatttgatggagagctgcggtcatgttgcggcggtatcgaagtgcatttggctggtggtggcgtgcagatcgttcctgtggcggatgtggcggttgtcctcatcggtctgcaggtggtgttgagcgcctcggttcttcaccgcctgtgtgaggccgatgtcgcagttctgttttgtgactggagaggtataccggaaggcggctgctactcgtggtccgatcatggccgagtggcagcccgccaccgagctcaggcggaggtatcgctgcctcggaaaaagaatgcgtgggcgcgtctggttcgagcgaagatcgaggggcaggcctcggttctggaaaacctcaagattcggggcagtggtgagctcctcgcgctcgcggaccaggttcgttcgggtgatcctggaaatgttgaggcccaggctgctcggctgtattggtcacgcgccctcggaaagggtgtcgggcgtcaaccggcagccggccaactgatcggtgcgaatgcctgtttggattatgggtactcagtgttgcgcgggcacctgatgcgcgctgttctggcggcggggctggcgcccgcactcggagtcttccatcgaggccgaggcaatgcctttgctcttgccgacgatctgatcgaaccgtttagaccggcgatcgatgaggttgccctgcagctcccgcccacggcatctccttcggatcgcccggtgaagcagctattggtggctgccgcgtcgcagcgtttcgatttggatggacatggtattcctgccgttgccgaggccttggcccagtcgttcgggcgctacgtggagggcgatatcgatcgtctgaacgtgctgtcgtggcaggggccatcggttgtgagcgtgggagattgaaatggcggatgatgcaatgtggtgtttggtcatgttcgacctcccggtggagacgaagaagcagcgccgggaggcgacgagattcaggcatgatttgttggattggggtttttcaatggtccagttcagtgtgtatgtgaagtattggcctctgggtgggcaagatcatgcgacgttgcgggcgattaagagtcacttgccgagtgggggaaaagtgaaagtcctggggctcacggatcggcagtgggccagtggcctgcattttgtgcgtgcggagcgtaaggatgacggtcaggcacccgagcagctcatgattttctgatgtgttttcatgagaaaacgttgcgattttgggtaaaacctatccacctcaagtatatcaaggggatgggtgactgaatcccagtgactcgccgccgatctggtgctggtgaccaagtatatcaaggggataggtgactgaatcccagccgatgaagcgggacgcggcgaagcggttcaagtatatcaaggggataggtgactgaatcccagccagggaaaccatgcgcgtcacgcgctcacaagtatatcaaggggataggtgactgaatcccagcccgtcgcgcacacgcccaacaccacagccaagtatatcaaggggataggtgactgaatcccagccgttcggtggtccgtggggcctcgctgccaagtatatcaaggggataggtgactgaatcccagcttctgatctctgactggatcgaggcccgcaagtatatcaaggggataggtgactgaatcccagccttgcggggccagggggcgatcatgctgcaagtatatcaaggggataggtgactgaatcccagcaccgagcagatggacctcttctccgagccaagtatatcaaggggataggtgactgaatcccagccattcgccgacgacggcggcggcggcctcaagtatatcaaggggataggtgactgaatcccagcgtgtaggtctcgtgcggacggtgcgccgcaagtatatcaaggggataggtgactgaatcccagcacgagtcgattcagacgacggtcgacgtcaagtatatcaaggggataggtgactgaatcccagcagcgcgcgcgtcttgcgtgatggcctgacaagtatatcaaggggataggtgactgaatcccagctaaccggcacgatcgtcacggtgtactgcaagtatatcaaggggataggtgactgaatcccaacttctcagcgtcggcgagtagctgcacctcaagtttatcaaggggatgggtgactgaatcccagctacctgacacttttgtcagtcagccccacaagtatatcaaggggataggtgactgaatcccagcctttaggtaggggtgagctttgaggttccaagtatatcaaggggattggtgattgattcccggtctgagcggagataatccgtgatcggaaattgcctaatcaaaatgagcaaacaaagtgctcctgaacgatgttcaggagcacttgaaagcgagaggagatcttggtacatggggtctttacagcccgaagctgagggcagtcccacacccgaagccgctgaagcggcttcctttgaacgtctgttaccagacgcccgacgcatcctctcgctaggtcgatactagcctaaaagctgagttttggtcaatgaggacatgaacaacgctctcttgctgactgacgccggttgatcatagtttcccgctctgagcgggagtgatcatcttcgaaatagtgctggggtgcgcacgagggtggcagccagcccacctgggagtgatccccgggcaggcgggccaccctcgtcgttgatacgggccgcctgcacgatgcagacggtcgcaccctcatcgcccttggcattctcgaggcggtcgaagcctgcacccgcgcctccgagatggtcgaacgcctcgacggcacctacatcctcgacgatgactgggacgcgatcgagccctgatgcgtttcggtcgtcccgagagaggggtaggagggcggtcgtggcgcgcccggatggaccgagagggccgcgcaaaagttcgccgaaaattcatcatccaaacgcgcccgcgagaatccgatgcctgttacgctagtcactgtttcttccgggtgctttctcctgttgaaacgttctgtgtaaacggacgcgcccacgcgaccgctcgccgccggtttctctcacactttcccggcaatgacgagccccgcgtgggcgcgttcgcacatgacttcgccccgacctcgtcgatccgaggccggggctcagtgcgtcagatgcgcgccctcacgcggagggcggggtggtcaggcctggcgtcggcgagccgccaccgccagcgcgcccagcaggcccagcatgccggcaccagcgaggacgccagccatgtcggcgcccgtgcgggccagctgcttcggcgcgggagtcggaggagtgggcggcgtggccgggggagtggacgagcttggcgtcgagggcgccgacggggtcggcgtggccgaaggagtcggggtggtcgacggcgtcggctcgggagtgggcgtcaccgacggggtgggcgtggaagacggcgtgggcgtcggagttgaggtcggcgtcggagacggggtcacggacggggtcgggctcggctctggagtgggagtcgtggaaggagtcggctccggagtgggagtcgtggaaggagtcggctccggcgtgggcgtcggctccggagtcggcgtcaccgacggggtgggcgtcggattcgcgtcgccgttcgcgtcacccgagccgtccgagtggatgtccacgccgcccgtgtacagcttcgcgttgatgagcgcgtcgttgtggaaggtaacgccgttgcgcacggtcgctacgttgttgatcgtggcctcgtactgaaggacgtaggtgccgttgttcgtcaggcgcgggaatgtcgcggtgaacccggtgccgtccgcgctggcctccatcgtgaaggtgccgtcgccgatcgacgcgccggccttgagggcgggcgcctgctcggcctggtattcggcgtcgttgttgtagtagtagagcttctccgacccgggcaccagcgagtagccgccggagctcatgtcgaaggtgtcaacgatctcgaccgcggtcgcaccctcgggcagctgggatcccttgatgtcgatctcccagatgattcgcgaggagtcgccttgcttgggctggccccacttctgggtgttgcgcaggatgcgctcgtacgtgccggagatcgagccgccgggcaggtccacgacaatggcggtgccgttcaccgggaaggatacagtcgacgaggccgtggcgtgcaccgccttcgtgcgcacggtgccgtggccgatgatgctgtggtggtccttcgcgtactcgccgaaggtgcaggtcatggagacgccctcgcccgcggggacggagcagtcgacgaccgggaccttgtcgtcgttgagcatgctgaagttcagcgtcgagctgcccgagtccgagacgatctcaagctccggcggaatctgaatggtgaacgtgtcgccgggcgcgacgtccttaccggttgtgtcgatgtcgaaggacatggtcatgacgtggatgccgaccgtgggagcggtggtttccttgtcctcgcgcgccagcgagatcttggtgacgacgccgacggagctggcgtaggagggggcgatcgcgatgaacgcggccagcaggccggcgacgatcagcccgacagcgagcgggaaaaggcgtccgatactgcgtgggtgcacgtgagtctccattcgtcatggatgggggacgaggccgtggcgtgcgcgtcgggtgtccgcccatccgctcgggttagcaagtaatggtgctgatgggaaggctacgcctgtccgtcacagtccgcgccttcaatttcgtctatttgtccacgttatggagggtttgttttggtcgtccagcaattcatcaaccattaagccgggtggaaatgtgagcattcgggcggcgttctggttgttcggtaattaattaactggcgctactattttttgtcgcccagttatgttggtggcgaagctcatatgagctgcttcgttttcggttaagcggcgttaggtgtagcgcgcatgcctgcctcggtcctggtggctgcgtcggtgcaatgggcaaaacaaaaaccccgaagcgaatgcttcggggacttgctggtggctccgaccggcgtcgatccggtgacctttcgattttcagtcgaacgctctaccaactgagctacagagccaagacctgaaccaaaaggtctggtcggcgaccccgacgggacttgaacccgcgacctccgccgtgacagggcggcgcgctaaccaactgcgctacggggccttacaacaggtaagacctattgaattgttccaatcacgattgcgaccggtggtacccccaacgggattcgaacccgtgtcgccgccgtgaaagggcggtgtcctaggccgctagacgatgggggcctgcttggccgtcgaactggcgtccgaagacgggagatagtttaggcagaacgcgcacggcacgtcaaaacgaaatcaagtgacagctaacacattaccgaaaaacgttgcaattgtgcggaattcccaggaattcatcagctctccgacctaggcttgatgcatgactatgacaccagcactcggtgcccttgcccaggcctcggacgccctcatgcgggctgctgccgaccctcaatccggggcggaggccgccgtggccacgaccatcgacctcaccctcctgatcctcggcccgatcgtcggcgccttcgtgggccttgtcatttcggtcgtcatgtccgccctcgcccgaaaggcgttcgcgaaggctgccattgcctcgtcgatcctggcgcgtgtgcgccgcccgggtcacttcacctttgcggcatggggagcgtgggcggggcttggtatcgcgctggtcaacccgcacctctccgactggaacggcacgtcgatcacgacgttcctcatgcacgtgctcctcatcgtcgcgctcgcgtgcctgacatggatggcctacgcagccgcctgggtattcgaggacgccgccaaggcccgtcaggaatctgaccaggggcgttcgcgtcgcttcgagacgcaggctcaagtcctgcgccggctcacgcagtcgatcatcgtcctcgtcggcgtggtcgccatcatcggtacctttgaggtcgcccgccaagccatgaccaccgtgctggcctccgccggtgtcctctcggtcatcgccggtcttgccgcccagcagaccctcggtaacgtgttcgccggcctgcagctggccttcaccgacgcgatccgcgttggtgacgtcgttgtcgccggcgacaagcaggagaccggttccgtcgaggaaatcaccctctcctacgtggtcgtgcgcatctgggacgagcgccgcctcatcattccgtgccgctacttcacgcagacgcccttcgagaactggacgcgccgcgccgccgcgcagcttggcaccgttgagttcaagctcgactggtcggcccccatgaccctcatccgcacgaaggtcgagcagctcctgaccgccacggacctgtgggacgggcgcacgtggggcgtgcagatcaccgactccgacgagtacacggtgaccgtgcgcgtcctcgtctccgcgaagaactccgggcacctcaacgacctgcgtgcctacctgcgtgaacaggtcatcgcgtggatcgtttccgaagagccgtgggcgcgccccgcccagcgcatcgagccccgcgagaccgtcaccgtcgaaaaggacatgagccgcgaacgcatcgcgcgcctggccgccgaactcgctgggatctccggcacgaacgaggccgtggccgccacgggcacgtcggcttcccacacgggtacggccgcgtcgaccggtgagcagtccagcgccgcgacgggcggcgccgcctccgcgatctccgcgtccggcgccacggctgccgcccccaaggaccccgcccacgccgcgcgcatggtcgccgcccgccgcaaggccaagcacgcccgccgccgcgccatggccgaccgccagcgcgaactcgccgagggtggccccagcgcctcccgcgacgaaacccaggtgatctccaagagcgctctgcgcaagatcatcgaggccgctggcaacgcgaacccgcagctcacccagactctcaccgcgacctccatcggccgaggcgagcgcttcttctccggctccgccgaagccgaggcccgcgccgccgccctcgagggcccgggtgaagaggtctacgccgagcgcgaggccgaggcccgtcgcgcgcaggaacgccgcgaggcccacaagcgccgcgaagccgaggccctcgaccccgaggccaccctcgccctggcggccgtcggcgtcgagccggtcgttgccgacaacgaggcgcccgaaaacgaggagcccgaggctgctcagggtgtggcccccgattctgcgggtgtggccgccgattctgcagaggttgcgggtgctgagcgcgcggacgatgcgaccgtgaaggacgctgcggctgactctgtcgcagacgattccgccgacgagaagcccgacactgctgacgccggatccgaaaccgctgacgaccagaccgaaggcgtgaagcccgaggccgccgcgcagtctgccgatgccgcttccactgaggaacaggccgccgacgtgcaggctgcccccgcgcagggcgaggcccccgaggacgcggccaccgacgctggcgcatccgccgattccagcgaatcgcgcgccgacgattcgcaggaggacagcgcccccgtcgaggacgctgagcatgagggcgcacccgcccccgacgcgcccgaggaaacgggaggcgaggaggaggcccaggcctcgtcggacgtccaagtgtccccggacgagcaggaaaccacgccgatccccgcgcgtgaaacatccgtgaaacatcccgtgcaggtgcccccgcccgtgcgcaccggtcgacccgtcatgaccgacacggtccaggcgatcgcgcccgcgctcgtgccgccgcccgcgccgacccccgccgagatggccgtatcccgcgcgcccgaggaggagaccgacgagcccgccgtccaccccggctggtacgcggtcgcggaagaggcgcgcctcgacgcggaaacccgccccacgcccacggtgaagcccgcgcgcgtgtccatcatggacttcttccccgctgtcgcccccaccggcgccgaggccgatatgctgcgcgccgtcaccggccagatcccggccgtcgagccccgggaacccaagcccgagaacgccgagtctgtggtgatcgaaaaggccgcgaccgacgaggccacgaccgacgaggctgtggcgcctgagagtgcgcccgcggaggactcggcccccgaggtggaggttgccgaggttgaggctgcgcagaaggacgccgccgacgaacccgctgccgacgcgaccgtcgtcatggatcccgtggaggccgaagaggccggcgcgctcgattccgacgccacgcaggtcctgccctccgtcgacgagcccgtggacgagaccctcgtgatgcccgcggcggccatcgccgagccggcgtctgagggtgtgaatgctgaggacgccgccgcgacagacgtcctcgcggcggaagaggaagccccggcgaagaaggagcccgccaagaaggcggcctccaccaaggccggcgcgaagaaggctcccgcgaagaaggcggccactaagaaggcctcgaccgcgaagaagggtgccaaaaagtcctccgccgcggccacaaaaaccgtgacggacggcgccgctgctgataaggcagccgacacgacccctgcaaaggacgcgaaggctcccgccaagaaggtcaccgcgaagaagcccgccgccaagaagggtgccgccaagaaggcggctcccaagaaggcagcggcaaagaagacctccagcgcagggcccgccaccaatgagtgatggggacaggtgaacgggccacggcctcgtcactgaggccagcgcgaggaaaacggaccgcccgcgcccacgcacatatgtgcacgggcgcgggcggtccgcgacaatagaggcatgactgctcccgatcccaccggccacagctattcttcggcaaacgcgggtccggagaggtgaccgcggactgagcccccgcctcgtccatggatccgcacgaggagagccgccgcacgcgtgcgagggcgcgggcggcgcgggacaatagagtcatgaacgcaactgatcccgctgcccgcaccgacgccgagtggaagaaactcctgagccccatgcgctaccacgtgctgcgcgaggccggcaccgagcgtcccttcaccggtgagctcctcgacgaggcgcgcgtcggcacctactcgtgcgcggcctgcggatccaagctcttcgactccgacgcgaagttcgactcctcctgcgggtggccctccttcttccaggcccacgatggcgcgaccgttgagagcgtcgacaccagccacggcatgatccgcaccgaggtgcgctgcgcgacctgcggctcccacctcggccacgtgttccccgactcgcccgatcagcccaccggcatgcgctactgcatgaactcggcggccctcaccttcgcgcccgcgcagtgaacgcgcccgcgcagcgccccgtcaccgaccgcatcccgccccagctctacatcgtcggctccggcctcatccagtacgtgggcgcggcgctcgcggttattgccttcgcgtccgtcgaacccgcctccgtcgcctggtggcgcgtcctgaccggcgcggtcgttctcctggcctggaagcgcccgtggcgcggtggtctcacgcgctccgacctggcgatttccgcgctgtttggcgtcatcatcctgacgatgaactcctcgttctacgagtcgatcgcgcgcattcccctgggtaccgccgtgtctatcgagttcatcggccccgtc

SEQ ID NO: 2004 - DNA, 13221 bp, synthetic construct
  misc_feature 1..13221: note = Synthetic
  source 1..13221: mol_type = other DNA
aagccggcggacgtacccgaggccgagccgagcatctgggaacagaaggggcaggccgtcgcaacgacgtccgcgcccgtggacgcggcctcgacgatgcgggcatccgcgatacgggtcccgcgcgtctcctcgaaccaggcgtgcgcgccgcccgcaccgcagcacatcgcgcggtcgcggttgcgcggcatctcgacgagctccacgttcggcagggagcccacgagctcgcgcggcggctcgtagacgcggttgtggcggcccaggaagcacgcgtcgtggtaggtgaccttcaggggtgcgccgaccgagggggcgttgcccgcgggctgtgccccggcctcgtccgtggtgtccgcacccgtggaggaagtgggggccaccggcgtgagcaggccgtcgcgcaccaggcggttgaggagctgcgtgtggtggacgacgtcgaaggagccgcccagctccgggtactcgcccgcgatggtgttgaagcagtgcgcgcaggagacgacgatcttctggggcttggcttccttgagcgtgtcgatcgcctgggcggccagcatctggaagagcgcctcgttgccggcgcggcgggccgggtcgcccgtgcaggactcgcccgagccgaggaccgcgaaggacacgccagcggtgtgcagcagttcggcgacggcggcgctggtcttcttcgccgtgtcgtcgtaggcgcccgcgcagcccacccagaacaggtagtcaacctcggaggcgtcctcgatgtcctcgccgacgacggggatgtcgaagtccagcttcttcgcccactccatgcgcttgcgggcgggctggttgtaggggttcgccttggattccatgccgcggaacgcgcggcccagctcgcgggggaaggcaccctccatgaggacctggtggcggcgcaggtcgagaatgtggtcgatgtgctcgatgtcgacggggcactgctcgacgcatgcgccgcagttcgtgcaatcccacaggacctcttcggagacgacctcggggaccaggggagcggtggccgcggagacgccctcggggccggtcgcgcccgacagggacagggcggagaccaggtcgaaggagtgcggcgaggccggcacgcccttgtcgaggaggacctcgccgtcgcccagcttttggtggccctcctcctgctcgacgatctgcacgttggaggcggactccatgtggtcgcgcaggcccatgatgagcagcttgggggagaggggcttctgcgtgttccacgcggggcacagctcctggcagcggccgcactcggtgcacgagtacaggtccaggcgggccttccacgagaagtcctcgattgtgcccacgccgaggacggtgtcctcggggacgtcgtcgaagtcgtcctcgctggtgaccggcttgccgtcgatgagcatgtggtcggccggtcccagcgacttcgtcccgtcggcgtttcggcgcgtgtacaggttgaggatcgcgacgaagcggtgccaggcgacgcccatgccggtctggatgccgacgaccgtcagccagatcatggaggtgagaaccttgagggcgctgaccagcacgatcgcgttcgccagcgccgaggccgaggaggaggccgcggagacgaagagcgcgccgagccaggcggtgagggggaagtgcagggcgttcgcgtgggcctcgaggcccggcgtgacgctgaacagcgcgtattcgaggccgcgcagggccacgacgcacgcgcacacgatgaggatgacccactcgacgaagagcgcctgccagcgggtcgaacccaggaaacgggaggccaggccgcgcggggaggagtcgcgcgggtggggcgtggccagggacgagggaggggtgccttccgggtcggccgcagcggtagcgccgtcgggatcgtcgttggagagggccgcctcggcggccgtgccgcgcccggcgcgctggcgcacgatcatgaggagaatgatgcccgccaggccgccccacgcgaagacctcggtgagccactcccacggcgcgaagtggccgaggaggggcagcgtgaaggtctggacgcgcagctgcgcgtagcccgtgaccagggtgaagaagaggatcgggaaggagaccatgaccagccagtgggcggccttgatccaggggcgccccttgaactcgcggtgggtgagggccgcggagatgacgccccacgctcgcttgccgacggggctcaggcgtcccgggtcgggcgtgcccgccgagaccgtgcgccacatgtgggtcaggcctcgcgcgaacgacaggacggccacagcgctcaccagcagggcgagtccccacatgatggcgctcagcgtcggattggccacgtttcctcctcaagattgctgcactccattgtgtcatctcgacactggagagaccgattctgccccgcaaagcgtgcgcaattacgcgctgcgcgtcgggtttgctgggcctgcgtgtgctcgccataacgtggatatatgccacgaggaggggaaaagtatgggagagtgagagcgtgcttcccgtctcgcagccagacatgacactgtccgaccaggaactcttcggagacgatcacccgcatgatcactgcggggtcttcggagtatgggccccgggcgaggacgtttcccgcctgacctacttctccctctacgccttgcaacaccgcggccaacagagcgccggtattgcgacgtcgaatggcaaacagatcctcgtgtataaggatcagggcctcgtctcgcaggtgttctctgagcagtccctccagggcctgcgcggccacatcgccctgggccacgtccgctacgcgacgaccggcgcggacgtgtggcgcaacgcccagccgaccctgggccccacccccacgggtacgctcgccctggcccacaacggcaacctcaccaacacggtcgagctgcgcgagctggccgccgagatcgccgacgacggcgaggacttcgaacgcggcgcctccactgacacctccctcgtgaccgcgcttttgggcatggccgaccggatcccggggccgacccccttcatcgcgtctccgtccgtgacgcccgggcacacgggtgcggacgaggccgccccggcctcgtcggttgctgacgaccttgagcccgcgcccctcgtcggcgccgccctgaaggtcctgccgcgcatcaagggcgcgttctccctggtcttcatggacgagaacacgctgtacgccgcgcgcgacccgcacggctaccgcccgctcgtgctgggccgcctggcctccggctgggttgtcgcctccgagaccgccgccctggacctgtgtggcgcgaccttcgtgcgcgaggtcgagcccggcgagctcatttcgatcgacgcgtcgggcgtgcactcgcgccgcttcgccgtgcgccgctccaacacctgcgtcttcgagtacgtgtacctggcccgccccgacacgacgatcggcgggcgccggatcgtcgccgcgcgccacgagatgggtgccgccctcgcgcgtgagaatcccatcgaggcggacctggtgatccccacgcccgactcgggcacgcccgccgcgatcggctacgcgcaggagtccgggattcccttcgcccagggcctcgtgaagaacgcgtacgtgggccgcaccttcatccagcccacgcagtccctgcgccagctgggcatccgcctcaagctcaacccgctgcgcgaggtcatcgaaggcaagcgcctggtcgtcattgacgactcgatcgttcgcggtaacacgcagcgcgcgctcgtcaagatgctgcgcgaggccggggccaccgaggtgcacatccgtatctcgtccccaccggtgctgtggccctgcttcttcggtatcgatttcccgacgcgcgccgagctcatcgcctcgtccatgagcgtcgaacaggtgcgcgaatccatcggcgccgactcgctggcctacctgtcgatcgacggcatggttggtgccaccggacagggcacctccctgtgcatcggctgcttcaccggcgaataccccgagacgatccccgccgggacccccgtgcccggaacccccgaagccaccccctgctaacctccacgcccgcgacgccacccggcgccgcgggcgctgttctcaccccgaccacccagacacggcctcgtcgagcgccatccgcgaaaggcaccacccatgaccgacacccccctggactacgcgaccgctggcgtcgacaccgctgcgggcgaccgcgccgtcgagctgatgaagagcgcggtggccgccacccacgactccaccgtcctgggcgcgaccggcggattcgccggcatggtcgacgcgtcggcgctgctgggcatggagaagccgctgctcgcgacctccacggacggcgtgggcacgaagatcgcgatcgcgcaggccatggacgtgcacgacacgatcggccaggacctggtcggcatggtcgtcgacgacatcgtcgtgatcggcgcgcgcccggtcctcatgaccgactacatcgcctgcgggcatgttgtccccgagcgcatcgcctccatcgtcaccggcatcgcgcgcgcctgcgaggccacgggcacgcccctcatcggcggcgagaccgccgagcacccgggcgtcatggaacccgacgactacgacatcgcgggcgccgcgaccggcgtcgtggacgcctccaagctgctgggccccgagcgcgtgaccgacggcgacgtcgtcatcgccatggcctcctccggcctgcactccaacggctactcgctcgtgcgctccgtcgtctcccgcgtcggcgcctcgctggagtcccacgtcgccgagttcggccgtaccctcggcgaggagctcctcgagcccacccgcctgtacacgcgcctgtgcctcgacctggtcgagcgcttcggcgtcggcggcatccacgcctactcgcacgtcaccggcggcggcctggccgcgaacctgtcgcgcgtcctgcctgtcggcgcggtggcgacggttgaccgctccacgtggaccatccccgccgtgttcgactgggtgcgccgcggcggcgacgtcacctgggtcggcatggaggactccctgaacctgggcgtcggcatggtcgccgtcgtctcggcgtccgtggcctccgaggtcctgtccgcgatcaacgaggccggggtggccgcgtgggtcctgggctccgtcacgtcggccggcgccgacggtgtggtcagtgggtttggcccggtggccgacctcggcgcggattcctccggcgtgcgccttatctccggcacgaagggcgtccaggcgggcgccgtgctgctgcacggcgagtaccgcgtcggctgagcgttgcgtggcctgagctgagcttcgctgagcggcgcgcctgctctaagtgcgtgagaggggtcgaggcctgcgggcctcgacccctcgtcgcgtgtgcgcgctcagaaatagcggttcgggtacgccaaagcggcggaccggttctcggtccgccgtgtggctgagccgttacttagtggaggatccacccgtccagaaggactcatcgagctgctccggatcgatgtcgtcttcttctgcgggcatctcggcgaagtcggcgtatttcgagtagaggtcgtcgtcgatcgcatcgtcctcttcgggctcgtccgccggcacgtgtgccaggtacgagtcctcatccgccagctcgcgctgaagtgcgtttaggtcggtgtcggggctgaaatacttcagcttccgagcgactttcatctgcttagccttttgacggccgcgccccatggcgtcgaccccctccgcgtcgttcgggtccgcgtgaagcggttccctgggtgttcaaaatgtttcgtgggaccatcatagctaatgacgggccttgacctcaccttggattgggttttgcgcgctcagcggagcggtgcgatgggcgcgtatgcccacgaaactggggaaatagaaccggcgcaaccctcggccagtgtggccggagttacgccggttcgcgtcagttgctgcttacagggcctcggtcacgtcggacttgagagcctgaagcgtgtgcgcggcggcctcgcgggcagcgcggcgggcctcgcgacgggaacgacgcgacgagcgggttgccagcaggacgatcacgccgatagcgccgaccgcggacagggcgacgacgccgaccttcttgatggcctcggcgttgccgccggcggcgtcctgcagggtcagcgacgcggactgcttgaaggacgcgaagcgggctctggcctcttccttcgcctcctgggcgagggccgcgggctggacgcgcgcgtacagctggtcgatcgtggcggccagttcggcgcgctgacgctcgaggtcggcggtgatctgggcttccgtgcgcggctcggcgggggcggcctcgccgacggtcacgttacgcgtatcgaggttggtgctcacttccccagtcccttctcgatggcttccttggtggcggcgaccgacgcggccgggtcggggcggtgggcctgcgcgctcttcagggagctgacgcccacgagcgccaggatcagcacgatcaggaggaggatgccgacgacgatcaacgacgccgcccacgcggggacgacgagttcgagggcgacctcgatcgtgtggaagacccaccccagcaggtagagcgcgaagaccgcggcggccacgaggaggccgatgcccttaccgctcttggacgcgaaggcgcgcagcttcgccttattcagttcgacctcgtcgcggatgatgctggagagctgtccggtgaccgacgcgaagagggcgccgatgctgggacgcgcctcgccggcggcgggtgcgggggcagcgggcgggtactgcccgggctgaggggtgggctgagtcatggatgctcctgcgcgtacgggtgaacgaggcgatgcctcgcctgatacgccctagtgtctcatgaaggaggtcggctcgcagtgaccgttacgttactcctgcggggcaatcgagcccgggaggtcggagaggatcttgcgggcgcgcacgaccaggtcggagacctcgggctcggccagggccgggtcctcggcttcgacgacggggatgccgcgcatcgcggtctcggtgcggggttcgggcgaggcctgggggacctcggtcgcctgggttgcttgggcgggggctgcctccacgcgggtggtcgctgcgtcgagggcggcctcggctgcttcctcgggttcgggggcctgctgagcgtccgaggtctgcgccccggcctcgtcggcggtgccgagcgggtgccacgcgggggccgaggaggagccggtgggggagatgacctcgtcgaaggaggcgggcagcgccgaggagatcgggccgaggagggccttcgggtcctcggggttggcctccagggaggcggcgatgaccgcggccgaggggttgggggcgtcgagggcgacccggccgttcgtcaggaggatcgcgcggtcggaggcggccgcgacctcggcgttcggggtcgcgatgacgaccgcgcagcccgcgtccgcgagggaacgcaggagggggccgagttcttcgcgcgcggcggcgggcagggagaccgggtcttcgatgaggaagacctcggcgccggacacgatcgcgcgggcgatgagggccttgaagcgctcccactcggagagctcggaggggcgcaggtcgacgcgctgagcgaggcccgtgatctgcagggcgcccacgaggttgtcccagtcggcgacggagcccgtcgcggacaggggagcgaggatgttctggcggatcgtgagggactcgtcgagcggggagtccgcgcggatcagcgcgaccgagccgatgcggcccgcgaggcgtgcggccagcgagcgcgagggcgcggccacgatgcggccggcctgcggctcctcgaggcccgcgaggatcaggaacagggcgcgggcgcgacggcccgttgggtccaggatcgcgctcagagagcgggcgcggaagcccaggtcgatgtcggcgaggaggaccgcgccggtcacgtggtccgtgtaggtgatgcccaggccggcgacctggatgcggccgccgcggcccttcgcggagaaggaacggcgcgagcggtaccaggggcgaggctcggcgggcggcaggtgcacgggggcggcgacggcgttgttggcgttcgttgccgcgctgttgcccgtggtgttggcgctgttggcgggcgtgagctcctgggagggctgctgcggcgcggcctgcggggtcgcggtctcgggcgcaatgtcgctggcggtctcggctgtggtctgcgctgctgtcgccgcgtcggtcgtgagcgcggcgggggtggcctcggcctcgtcggttgtgacgaggggggtggaggacacgagggtctcctgcaggtcctgcgcgccgtcgtcggcgagcgtttctgcgggggtgtcggtggtgggggcgtcggcctcgtgggtggcgccgctgaggatctcctcgaacgacgagagggcgctgcgcggggcgggcgcctcgtcggaggtgtgggcgggggtcgaggcggctcgctcggcgccggtgcgggcggcgtcggccgtcacgtcggccagctcctggctgtccgagccatgcaggttttcacgcgggtcattcgacatgcccccattgtttcaggatcgcgcccctcgtgtcgcagtggcgcgcggaagtgggtggggtggcctcgccgaaaagtccttgcggatgtggcttgcatctctggaatcggagatgtatgctgtaaacgactgaatcttagcaagaaccgacaagttagcggtttcgaatgctcactgctctgcagtaggccggggtcctcaattgaggagcccggtatcttttcaaacagacacaaatgtgtgtgctttgtgccacgatgggtgcatgagtacttattcggcaaatgtacagcgtcgtcactaccgtattggcatcgatgttggtctcaagtccattggtttctgtgcgatcgaggttgatggacgcggaactcctaccaagctgctcaactcaactgttcatctacacgatggcggtgctgagcctggtgatcgaaaggaagttagccgcaagaaaacggctggtattgcgcgccgagcgagaaggcgagggctcaggaacaagaggcgcctgagggaactggatgcctacttgtctgaagagctgggatggccgcttcctgacctcgaagaattcactgaccagcacgaaccttggcacgtgcgtgcagagctgctcgactcctacgtgtcagatccggcagaacgcaaggagatgctcgcaattgccgttaggcatatcgcgaggcatcgtggttggcggaactcatatacatctgtggcatcgttggctcgggctccttacccgagcaaagcgctcattacagtgaaccaaagggtctgtgaagcccttggggtaactattgacgccgaagctacgcaaggacagctggcctctgcctatgtcgcagacgaacgctatgcgtttcaggcgttgcgtggtacgcaaggcttgtttcgcggtcgacagtaccagagcgatacatatcatgagctcacgcaaattctcaggttccagcgcgtggaatcctctcagattgatgagttgatgaagcgggtgtttcacgtgattaaccctcgagatggggtgcgacgaaatatgcgggttggctgtgatcagctaccggggcaggaatcgaaattccgggctgaaattgcgcagccggcgtttcagaagttcagaatcgttgcggcactcgcgaatctgcggattcgttctggtcgacaggagcgtaagctgagcgccgatgagctgcgacgagtgacgcagtatattctggatagttccattgcgctcgaggacaacgactggtccgatattgcggaacaactcggtattgaatgaaactctttgaccggtactgctaaagcggtgtttgagggtgagcccgctctgcgtcgcccgccgactgatgctgtcagcgttattgtcatgtcgagtaaattgacgaaattgaagcgctggtggaagtctgcaaccgaagatgaccgtggggacctcgtaaagttcatggctaactcgaccctaggtgagggagaagacttcgagaacgatgaggttgatgggttccttggttctctcaatgatgaggacctcgcgaagctcgaagagattacttttcctcctggtcgcgcagcgtattccttggatagcctgcagaggctgacggaacgcatgctcgctgatgggtgcgatctacatgaagcgcgaaagtgtgagtttggcgtgagtgactcatgggttcccaaacctgaccccatcggtgctcccgttggcaatccagcggttgaccgtgtcatgaaggaagtgaatcgatggctgaagatggccgtcgatcgctggggtgttcccgaggttgtgaatatcgagcatacgcgtagtggcatgatgtctacggaaaaagcgcgtgaattgatggactcgaatgctgcgagacagaagcgtattgaagccttggcgcaggaactaggagcgcaggcgtgtggtagtggtaagttaaatcaggttacaaaaattcgactcttagctgttcagcgccagggatgcaagtgtttgtactgtggagatgcaattagttttgaaaccgccgacatggatcatatcgttccgcgttcagggctgggatcaaccaatgatcgaaacaatctcgttgcagtctgtcgtgagtgtaatgagagcaaaaggaatcagctgttctctgagcgggctaaaacgggaggacgcaaagataaggtttcggtcgacgacgtgatcgaacgtgtttggtcatgggaacgggacccgggggtgagtccgaagcagcataaggcgttccgagccgaggttgttgcacgcctcaagtcgaagactccggatcaagagttcgatgcgcgatcgatggaatccgtgggatggatggcggttgagctgggcaagcgtatcaggggattctttgcgtcggagtattcggtggatgacgggttggtgcctccctcggttgggttgtatcgaggccgcattactgccgccgctcgcattgtttcgggtttcgaaggttgtgtgcgtctcactggtggcaatggtaagacgcgtctcgatcgtagacaccatgcaatggacgctctcgtcattgcgctacttgatgatcgcgtcgcacaattgcttgcactgcgcgataacctgcggtttgcgcagctacttactagtgggtcaaatgaatggagactgtatctacagtcccacacttcggaaaatgctttgatgcacgcctggtctcagcatatgcaagttgcggcgaagaagtttaatgccgcgctcgagagtggcatggtgcggttcaccatgaatcagcgtttacgccttggatcgagcagagtgcacatggacagtgttacctcttttgagcatgcgtatcttgatcgagatagtgatcgaaagccgaaggttgataagaatggagtgcgaaaggtcaaagagcatggagagtttcgtctgttgtccgatccgcttccagtagatcttatcgatcgggcagagacgcccgctctatggacggcccttgtgaagaatgagaagtttgatccgaagttggggcttcctgcagactctgagcggacaattgtcgttcatgggaggagtgttggtcccatggatcgaatccggttcttcggagctactcctgatgggaaatggtcagcttcaatggcggttcgcggcggttatgtgtcgattagcaatacgattcaccatgtccgcatatacaagattgctgacgagccggcgaggtatggaatgctacgtgtctaccaggttgatctgcggcgtgcgcgggggaaggatttattctccttcccgattcccgcatgctcgatctcaatgcgtacggccgataaggatattcgggaagcgcttcttgctggtacagcagaggagattggctgggttgcagtcggtgacgaattaagggttaactcagcgttctacagcgagaacaaaattggtaaattcttcaaggaatatcctgaagcagtcgaatggcgcgttgttggattcgagggtcccacgaaaattaaccttcgccccatacgcatttcagaggagggtttcgatgaagcgactcccaaggaggttcgggacattgcgggaagcagtggttcctggcgtgtcgctattagcgctttgttggggtgtggaggagttaccttgattcgtcgcaatgttctgggtgaagaacggtggaagtctcgttctggtctcccatgctgtactgctttggagtagcgatggacggcagctggcgtgttatggacttctctgcatttgatggagagctgcggtcatgtcgcggcggtatcgaagtgcattcggctagtggtggcgtgcagactgtccctgtggcggatgtggcggttgtcctcatcggtctgcaggtggtgttgagtgcctccgttcttcaccgcctgtgtgaggccgatgttgcagttctgttttgcgactggaggggtattcccgaaggtggttgctacttgtggtccgaacacggacgtgttgctgcccgtcatcgtgcgcaggcggaggtatcgctgcctcggaaaaagaatgcctgggcgcgtctggttcgggcgaagatcgaggggcaggcctcggttctgtaaaacctcaagattcggggaagtggtgagctcctcgcgctcgcggaccaggttcgttcgggtgatcctggaaatgttgaggcccgggctgctcggctgtattggtcacgcgccctcggaaagggtgtcgggcgtcagccggcagccggccaactgatcggtgctaatgcctgtttggattacgggtactcagtgttgcgcgggcatctgatgcgggctgttcttgctgcgggtttggctccggctctcggtgttttccaccgtggccggggcaatgcgtttgccttggccgacgacttgatcgaaccttttagaccagcgattgacgaggttgctctacagctgccaccgactgcttctccttctgatcgctcggtgaagcaacttcttgtggctgctgcgtcgcagcgcttcgatggagatgggcatggtatccctgcc

SEQ ID NO: 2005 - DNA, 9754 bp, synthetic construct
  misc_feature 1..9754: note = Synthetic
  source 1..9754: mol_type = other DNA
gcaggttttcacgcgggtcattcgacatgcccccattgtttcaggatcgcgccccatgtgtcgcagtggcgcgcggaagtgggtggggtggcctcgccgaaaagtccttgcggatgtggcttgcatctctggaatcggagatgtatgctgtaaacgactgaatcttagcaagaaccgacaagttagcggtttcgaatgctcactgctctgcagtaggccggggtcctcaattgaggagcccggtatcttttcaaacagacacaaatgtgtgtgctttgtgccacgatgggtgcatgagtacttattcggcaaatgtacagcgtcgtcactaccgtattggcatcgatgttggtctcaagtccattggtttctgtgcgatcgaggttgatggacgcggaactcctaccaagctgctcaactcaactgttcatctacacgatggcggtgctgagcctggtgatcgaaaggaagttagccgcaagaaaacggctggtattgcgcgccgagcgagaaggcgagggctcaggaacaagaggcgcctgagggaactggatgcctacttgtctgaagagctgggatggccgcttcctgacctcgaagaattcactgaccagcacgaaccttggcacgtgcgtgcagagctgctcgactcctacgtgtcagatccggcagaacgcaaggagatgctcgcaattgccgttaggcatatcgcgaggcatcgtggttggcggaactcatatacatctgtggcatcgttggctcgggctccttacccgagcaaagcgctcattacagtgaaccaaagggtctgtgaagcccttggggtaactattgacgccgaagctacgcaaggacagctggcctctgcctatgtcgcagacgaacgctatgcgtttcaggcgttgcgtggtacgcaaggcttgtttcgcggtcgacagtaccagagcgatacatatcatgagctcacgcaaattctcaggttccagcgcgtggaatcctctcagattgatgagttgatgaagcgggtgtttcacgtgattaaccctcgagatggggtgcgacgaaatatgcgggttggctgtgatcagctaccggggcaggaatcgaaattccgggctgaaattgcgcagccggcgtttcagaagttcagaatcgttgcggcactcgcgaatctgcggattcgttctggtcgacaggagcgtaagctgagcgccgatgagctgcgacgagtgacgcagtatattctggatagttccattgcgctcgaggacaacgactggtccgatattgcggaacaactcggtattgaacgaaactctttgaccggtactgctaaagcggtgtttgagggtgagcccgctctgcgtcgcccgccgactgatgctgtcagcgttattgtcatgtcgagtaaattgacgaaattgaagcgctggtggaagtctgcaaccgaagatgaccgtggggacctcgtaaagttcatggctaactcgaccctaggtgagggagaagacttcgagaacgatgaggttgatgggttccttggttctctcaatgatgaggacctcgcgaagctcgaagagattacttttcctcctggtcgcgcagcgtattccttggatagcctgcagaggctgacggaacgcatgctcgctgatgggtgcgatctacatgaagcgcgaaagtgtgagtttggcgtgagtgactcatgggttcccaaacctgaccccatcggtgctcccgttggcaatccagcggttgaccgtgtcatgaaggaagtgaatcgatggctgaagatggccgtcgatcgctggggtgttcccgaggttgtgaatatcgagcatacgcgtagtggcatgatgtctacggaaaaagcgcgtgaattgatggactcgaatgctgcgagacagaagcgtattgaagccttggcgcaggaactaggagcgcaggcgtgtggtagtggtaagttaaatcaggttacaaaaattcgactcttagctgttcagcgccagggatgcaagtgtttgtactgtggagatgcaattagttttgaaaccgccgacatggatcatatcgttccgcgttcagggctgggatcaaccaatgatcgaaacaatctcgttgcagtctgtcgtgagtgtaatgagagcaaaaggaatcagctgttctctgagtgggctaaaacgggaggacgcaaagataaggtttcggtcgacgacgtgatcgaacgtgtttggtcatgggaacgggacccgggggtgagtccgaagcagcataaggcgttccgagccgaggttgttgcacgcctcaagtcgaagactccggatcaagagttcgatgcgcgatcgatggaatccgtgggatggatggcggttgagctgggcaagcgtatcaggggattctttgcgtcggagtattcggtggatgacgggttggtgcctccctcggttgggttgtatcgaggccgcattactgccgccgctcgcattgtttcgggtttcgaaggttgtgtgcgtctcactggtggcaatggtaagacgcgtctcgatcgtagacaccatgcaatggacgctctcgtcattgcgctacttgatgatcgcgtcgcacaattgcttgcactgcgcgataacctgcggtttgcgcagctacttactagtgggtcaaatgaatggagactgtatctacagtcccacacttcggaaaatgctttgatgcacgcctggtctcagcatatgcaagttgcggcgaagaagtttaatgccgcgctcgagagtggcatggtgcggttcaccatgaatcagcgtttacgccttggatcgagcagagtgcacatggacagtgttacctcttttgagcatgcgtatcttgatcgagatagtgatcgaaagccgaaggttgataagaatggagtgcgaaaggtcaaagagcatggagagtttcgtctgttgtccgatccgcttccagtagatcttatcgatcgggcagagacgcccgctctatggacggcccttgtgaagaatgagaagtttgatccgaagttggggcttcctgcagactctgagcggacaattgtcgttcatgggaggagtattggtcccatggatcgaatccggttcttcggagctactcctgatgggaaatggtcagcttcaatggcggttcgcggcggttatgtgtcgattagcaatacgattcaccatgtccgcatatacaagattgctgacgagccggcgaggtatggaatgctacgtgtctaccaggttgatctgcggcgtgcgcgggggaaggatttattctccttcccgattcccgcatgctcgatctcaatgcgtacggccgataaggatattcgggaagcgcttcttgctggtacagcagaggagattggctgggttgcagtcggtgacgaattaagggttaactcagcgttctacagcgagaacaaaattggtaaattcttcaaggaatatcctgaagcagtcgaatggcgcgttgttggattcgagggtcccacgaaaattaaccttcgccccatacgcatttcagaggagggtttcgatgaagcgactcccaaggaggttcgggacattgcgggaagcagtggttcctggcgtgtcgctattagcgctttgttggggtgtggaggagttaccttgattcgtcgcaatgttctgggtgaagaacggtggaagtctcgttctggtctcccatgctgtactgctttggagtagcgatggacggcagctggcgtgttatggacttctctgcatttgacggagagctgcggtcatgtcgcggcggtatcgaagtgcattcggctagtggtggcgtgcagactgtccctgtggcggatgtggcggttgtcctcatcggtctgcaggtggtgttgagtgcctccgttcttcaccgcctgtgtgaggccgatgttgcagttctgttttgcgactggaggggtattcccgaaggtggttgctactcgtggtccgaacacggacgtgttgctgcccgtcatcgtgcgcaggcggaggtatcgctgcctcggaaaaagaatgcctgggcgcgtctggttcgggcgaagatcgaggggcaggcctcggttctggaaaacctcaagattcggggaagtggtgagctcctcgcgctcgcggaccaggttcgttcgggtgatcctggaaatgttgaggcccgggctgctcggctgtattggtcacgcgccctcggaaagggtgtcgggcgtcagccggcagccggccaactgatcggtgctaatgcctgtttggattacgggtactcagtgttgcgcgggcatctgatgcgggctgttcttgctgcgggtttggctccggctctcggtgttttccaccgtggccggggcaatgcgtttgccttggccgacgacttgatcgaaccttttagaccagcgattgacgaggttgctctacagctgccaccgactgcttctccttctgatcgctcggtgaagcaacttcttgtggctgctgcgtcgcagcgcttcgatggagatgggcatggtatccctgccgtagctgaggttctcgcgcagtctttcggtcgctacgtggagggagatatagatcgtctgaatgtgctgtcgtggcaggggccatctgttgtgggtgtgggagattgaaatggcggacgatgcaatgtggtgtctggttatgtttgatctcccggtggagacgaagaagcagcgccgcgaggcaacgaggttccggcatgatttgctggattggggtttctcgatggtccagttcagcgtgtacgtgaagtattggcctctgggcgggcaggatcatgcgacgttgcgggcgattaaaagtcacttgccgagtggaggcaaggtgaaggttctggggctgacggatcgtcagtgggccagcggcctgcattttgtgcgcgcggagcctaaagatgatggtcaggcaccagagcaactcatgattttctgacgtgcttccgtgagaaaacgttgcaattttgggtaaaacctatccacctcaagtatatcaaggggataggtgactgaatcccagcacgcggacgcgccagcgtttgtggcgtgcaagtatatcaaggggataggtgactgaatcccagcacaggcgacgcggtggtggtctcgcctccaagtatatcaaggggataggtgactgaatcccagcgaccatatgatgcccacgcggcttgcagcaagtatatcaaggggataggtgactgaatcccagcagggcgactatcgtcctatgctggcgctcaagtatatcaaggggataggtgactgaatcccagccggcggtcaggttaccgacgagggtgatcaagtatatcaaggggataggtgactgaatcccagcgcgcgggcagcgtcggcttctcgtcgcccaagtatatcaaggggataggtgactgaatcccagcatcgccgaccagcatctccccatgcctccaagtatatcaaggggataggtgactgaatcccagcacggccacaccgcacggcttccaggcgtcaagtatatcaaggggataggtgactgaatcccagcttctgccttatacggcatccgcgcacatcaagtatatcaaggggataggtgactgaatcccagcttctgccttatacggcatccgcgcacatcaagtatatcaaggggataggtgactgaatcccagcttctgccttatacggcatccgcgcacatcaagtatatcaaggggataggtgactgaatcccagcgtgttcgtcgaatgacgtgcagaagtgacaagtatatcaaggggataggtgactgaatcccagcaggggcttgtcggcatgcagcagcacatcaagtatatcaaggggataggtgactgaatcccagcttcgtcgacgaaaacggcgaacgcgtgacaagtatatcaaggggataggtgactgaatcccagctaggtgcggtcggtgcggtgggcgcgtccaagtatatcaaggggataggtgactgaatcccagctggacctgaccgcgcccgatccctcgcgcaagtatatcaaggggataggtgactgaatcccagctgatctgtccgcccagcgcatcaatgaccaagtatatcaaggggataggtgactgaatcccagcacctccttacttggtacttggttgtctccaagtatatcaaggggataggtgactgaatcccagcgtgggcgaaacgaacgtctcccagtggccaagtatatcaaggggataggtgactgaatcccagcagggcgttggcaaggtggaaggtggtcacaagtatatcaaggggataggtgactgaatcccagctaaaacgccgttgcgtgacgttgtgcgccaagtatatcaaggggataggtgactgaatcccagcgccccgaggctgtggcgcgtatgaacgccaagtatatcaaggggataggtgactgaatcccagcgggatgccaaacatgcgtccgaccgagacaagtatatcaaggggataggtgactgaatcccagcgacgccgagcgcgccgaattcatcgccgcaagtatatcaaggggataggtgactgaatcccagctgaggatcgtgatgaggaccgacaggatcaagtatatcaaggggataggtgactgaatcccagcgatgccagatgcgaggcggccggtatcgcaagtatatcaaggggataggtgactgaatcccagccccatctggacgtcccgcactgcagcctcaagtatatcaaggggataggtgactgaatcccagcacgctggttgtgcgttcgcgccgaaggaacaagtatatcaaggggataggtgactgaatcccagcgggtcttgtcggcgagggcggcgcgctgcaagtatatcaaggggataggtgactgaatcccagctaatggggccgtgggtagttgcagctaccaagtatatcaaggggataggtgactgaatcccagctgcccgagggacacgtgaccggcgaggacaagtatatcaaggggataggtgactgaatcccagctccatgttcgaggcgatcaagacgctaacaagtatatcaaggggataggtgactgaatcccagctccatgttcgaggcgatcaagacgctaacaagtatatcaaggggataggtgactgaatcccagctccatgttcgaggcgatcaagacgctaacaagtatatcaaggggataggtgactgaatcccagcgcaatgtatctgggaacgtaccgcgacgcaagtatatcaaggggataggtgactgaatcccagcgtcgaacggcgtgactcgatcgcgatggacaagtatatcaaggggataggtgactgaatcccagctggggaccgtttcccctgccgacatctacaagtatatcaaggggataggtgactgaatcccagtgaaaacccacgtcttcccgctctgagaacaagtatatcagggggataggtgactgaatcccagcaggtcgatcagggtgccgatctcgtcgacgagtatatcaaggggataggtgactgaatcccagcgcgagaccttccgaacgagcgaagccaccgagtatatcaaggggataggtgactgaatcccagcagcatcatcggctggctcggaagcgggccgagtatatcaaggggataggtgactgaatcccagcctaaagctcgcagccgcactcattgcagcaagtatatcaaggggataggtgactgaatcccagcctcgcggggacggcctgccagcaggcgccgagtatatcaaggggataggtgactgaatcccagcgatgacattgcgggagagtgcggctttgcgagtatatcaaggggataggtgactgaatcccagtgcgctctcgcgtcagaacgaggcgcgtgcaagtatatcaacgggataggtggctgaatcccatttcgtgtccgatgaagccaccgcgcaatccaagtatatcaaggggataggtggctgaatcccagttcgcgacgttggtcgtgatggcctgcagcaagtatatcaaggggataggtgactgaatcccagctcccatacgtctggggtggctcagcaatcaagtatatcaaggggataggtgactgaatcccagccggtgtaattcgtcccgagcggatgacccaagtatatcaaggggatagatgattgatttacagtggtttctcgcgtgagcggaatgagctccgatccggaatcgcgcaatttaattgagcatacaaaatgctcctgaacatcgttcaggagcaaatgatagcgagaggacatcttggtacatggggtctttacagcctgaagctgaaggcagtcccgcacccgaagctgctggagcagcttcctttgaacgctctgttaccagacgtcctaccgtatcctctcgctgcgtcgatactagtctcaaggttggtttcggtcaagaaagacatgtaaacaacgctctcctgctgacactggttgatcatagttttcccctgagcgcggggatgagcctttgagctatatgaagtgaggacatcccagctgcccgaaggggctgcctaatgtcctcaccgctagggtaccgcactcatggaatgcggacaatatttcctgcgtggttttccccgcgtgagcggggattagcctgctgtgaggtcggttcttgccaagtcgttgcatgttccctacgtgagtggggatgagcccgagccggggtcaaacgaggtgatggccttcccgttttccccgcgtgagcggggatgaacccctcaccggccgtcagaaagtttgggtaatggtttgttttcccgcgtgactgaggccataccaatggggcaggtccttgcgccctccgctctccctgccgtatcctgctcggctacccacaagcagatgaaggagaaggtgagggcatgaacgaggcaaaggtgacgccgttaggtgatggtgagccgatggcgatgtgtgaggagacaggtgtggcacaggttacgcagcggaagggtgtcgaggctgtgaaggcgcaggttcacgcgcgcatcacgcacgtgggtagcgagtatcgcaaggacgtcacctcgggcacctgcgagctctgcatcgccgactggagcgcccgcattcgcgacatctccttcgagctcacggataccaacaccggcgccacgtggcaggcgaccacccccaccctccacgtcggccggtggaacgacgtctgggaactccgcgtgaaccccttccacctctccaaggccctcgcgcacgtcaccctcgtcgttgatacggaccgcctgcacgatgcagacggccggaccctcatcgccctcggcatcctcaaggccgtcgaagcttgcacccgcgcctgccagatggtcgaacgcctcgacggcacctacatccacgacgacgactgggacaaggaacaattcgtcctcgagccctcgcgcatcgcgggtgactctgacgaacggtagaagtcctttcggcggtgctctggcaggcgcaaacagccgcgcaaaagttcgccgaaaattgatcatccaaacgcgcccgcgagaatccgatgcctgttacgctagtcactgtttcttccgggtgctttctcctgttgaaacgttctgtgtaaacggacgcgcccacgcgaccgctcgccgccggtttctctcacactttcccggcgatctcgagccccgcgtgggcgcgttcgcacatgacttcgccccggcctcgtcgatacgaggtc

SEQ ID NO: 2006 - DNA, 9103 bp, synthetic construct
  source 1..9103: mol_type = other DNA
  misc_feature 1..9103: note = Synthetic
agccatgcaggttttcacgcgggtcattcgacatgcccccattgtttcaggatcgcgccccatgtgtcgcagtggcgcgcggaagtgggtggggtggccctgccgaaaagtcctcgcggatgtggcttgcatctctggaattggcgaggtatgctgtaagcgactgaatcttagcaagaaccgacaagttagcggtttcgaatgctcactgctctgcagtaggccggggtcctcaattgaggagcccggcatcttttcaaacggacacaaatgtgtgtgctttgtgccacgatgggtgcatgagtacttattcggcaaatgtgcagcgtcgtcactaccgtattggcatcgatgttggtctcaagtccattggtttctgtgcgatcgaggttgatggacgcggaactcctaccaagctgctcaactcaactgttcatctacacgatggcggtgctgagcctggtgatcgaaaggaagttagccgcaagaaaacggctggtattgcgcgccgagcgagaaggcgagggctcaggaataagaggcgcctgagggaactggatgcctacttgtctgaagagctgggatggccgcttcctgacctcgaagagttcactgaccaacacgaaccttggcacgtgcgtgcagagctgctcgactcctacgtgtcagatccggcagaacgcaaggagaagctcgcaattgccgttaggcatatcgcgaggcatcgtggttggcggaactcttatacatctgtggcatcgttggctcgggctccttacccgagcaaagcgctcattacagtgaacgaaagggtctgtgaagcccttggggtaactattgacgccgaagctacgcaaggacagctggcctctacctatgtcgcagatgaacgctatgcgtttcaggcgttgcgtggtacgcaaggcttgtttcgcggtcgacagtaccagagcgatacatatcatgagctcacgcgaattctcaggttccagcgcgtggagtccgctcagattgatgagttgatcaagcgggtgtttcatgtgattaaccctcgagatggggtgcgacgaaatatgcgggttggctgtgatcagctaccagggcaggaatcgaaattccgggctgaaattgcgcatccggcgtttcagaagttcagaatcgttgcagtactagcgaatctgcggattcgttctggtcgacaggagcgtaagctgagtgccgatgagctgcgacgagtgacgcagtacattctggatagttccatcacgctcgaggacatcgactggtccgatatcgcggaacaacttggtattgaacgaaactctttgaccggtactgctaaagcggtgttcgagggtgagcccgctctacgtcgcccgccgactgatgctgtcagcgttattgtcatgtcgagcaagttgacgaaattgaagcgctggtggaagtctgcaaccgaagacgaccgtggggacctcgtaaagttcgtggctaactcgaccctaggtgagggagaagacgtcgagaacgatgaggttgatgggttcctcggttctctcaatgatgaggaccttgcgaagctcgaagagattgcttttcctcctggtcgcgcagcgtattccttggatagcctgcagaggctgacggaacgcatgctcgctgatgggtgtgatctgcatgaagcgcgaaagcgtgagtttggtgtgagtgactcgtgggctcccaaacctgaccccatcggtgctcccgttggcaatccagctgttgatcgcgtcatgaaggaagtgcatcgatggctgaagatggtcgtcgatcgctggggtgttcccgaggttgtgaatatcgagcatacgcgtagtggcatgatgtctacggaaaaagcgcgtgaattgatggattcgaatgctgcgagacagaagcgtattaaagccttggcgcaggagctaggggcgcaggcgtgtggtagtggtaagttaaatcaggttacaaaaattcgactcttagctgttcggcgccagggatgcaagtgtttgtactgtggagatgcaattagttttgaaaccgcggacatggatcatatcgttccgcgttcaggactgggatcaaccaatgatcgaaacaatctcgttgcagtctgtcgtgagtgtaatgagagcaaaaggaatcagctgttctctgagtgggctaaaacgggaggtcgcaaagataaggtttcggttgacgacgtgatcgaacgtgtttggtcatgggaacgggatccaggggtgagtccgaagcagcataaggctttccgatccgaggttgttgcacgcctcaagtcgaagactccggatcaagagttcgatgcgcgatcgatggaatccgtgggatggatggcggttgagctgggcaagcgtatcaggggctacttcgcatcagcgtcctctgcaaatgaaggggcagtagttccctcagttggtttgtatcgaggccgcattactgccgccgctcgcattgtttcgggtttcgagagttgtgtgcgtctcactggtggcaatggtaagacgcgtcttgatcgtcgacaccatgcaatggattctctcgtcattgcgctacttgatgatcgtatcgcacagttgcttgcactgcgcgataacctgcggtttgcgcagctacttactagtggggcaaatgagtggagactgtatctacagtcccacgcttcggaaagtgctgtgatgcacgcctggtctcagcgcatgcggatcgctgcagagaaatttaacgctgcgctggagaatgggcaggtcaggttcaccatgaatcgacgtttgcgcctcggatcgagcagggcgcatatggatagtgtgcattcttttgagcatgcgtatcttgaccgagatagtgatcgaaagccgaaggttgataagaatggagtgcgaaaggtcaaagagcatggagagtttcgtttcgtgtccgatccgcttccagtagatcttattgatcgggcagagacgccggctctatggacggcccttgtgaagaatgagaagtttgatccgaagttggggcttcctgcagactctgagcggacaattgtcgttcatgggaggagtattggtcccatggatcgaatccggttcttcggagctacttccgctggaaattggtctgcttcgatggtggttcgtggtggttatgtgtcgattagtaatacgatccatcatgtccgcatctacaagattgctgacgaaccggcgaagtatggaatgcttcgtgtctacgaagttgatctgcagcgtgcgcgggggaaggatctattctccttcccgattccagcatgctcaatctcaatgcgtacggccgataaagcggttcgcgaattccttcgcgacagtacgaaagagccgtacgcttggcttgtcgctggtgatgagttaagggtaaatccaaagttctacgatgaaggtaaaattggtgaattctttaaagaggaaggctatggtgatgtagtcgagtggcggatcgtcggttttgaaagcgcaacgcaagttaatctgcgtcccctgcgtatttcagaggaagggttcaatgacgaaactccacaagctgtgaaggatatcgcaggaaggggcaaatcttggcgcgtcactattggtgcattgctcgaagcgggcggtgttgcagtgatccgtcgtaatgttctgggcgaagagcgttggaagtcgaaagatggcagactcccatgtagcagggtttttgagtgacaatggacggcagctggcgggttatagacctctctgcatttgatggagagctgaggtcatgtcgcggcggtatcgaagtgcatttggccagtggtggcgtgcagatcgttcctgtggcggatgtggcggttgtcctcatcggtctgcaggtggtgttgagcgcctcggttcttcaccgcctgtgtgaggccgatgtcgcagttctgttttgtgactggaggggtattcctgaaggtggttgctactcctggtcggaacatggacgtgttgctgcccgtcatcgtgcgcagtcggaggtgtcgcttccacgtaagaaaaatgcctgggcgcgtctcatacgagcgaagatcgaggggcaggcctcggttctggaaaacctcaagattcggggcagtggtgagctccttgcgctcgcggaccaggttcgttcgggtgatcctggaaatgttgaggcccatgctgctcggctgtattggtcacgcgccctcggaaagggtgtcgggcgtcaaccggcagccggccaactgatcggtgcgaatgcctgtttggattatgggtactcagtgttgcgcgggcacctaatgcgcgctgttctggcggcggggctggcgcccgcactcggagtcttccatcgaggccgaggcaacgccttcgctctttccgacgatctgatcgaaccgtttagaccggcgatcgatgaggttgccctgcagctcccgcccacggcgtctccttcggatcgcccggtgaagcagctattggtggctgccgcgtcgcagcgtttcgatttggatggacatggtattcctgccgttgccgaggccttggcccagtcgttcgggcgctacgtggagggcgacatcgatcgtctgaacgtgctgtcgtggcaggggccatcggttgtgagcgtgggagattgaaatggcggatgatgcaatgtggtgtttggtcatgttcgaccttccggtggagacgaagaagcagcgccgggaggcgacgagattcaggcatgatttgttggattggggtttttcaatggtccagttcagtgtgtatgtgaagtattggcctctgggtgggcaagatcatgcgacgttgcgggcgattaagagtcacttgccgagtgggggaaaagtgaaagtcctggggctcacggatcggcagtgggccagtggcctgcattttgtgcgtgcggagcgcaaggatgacggtcaggcacccgagcagctcatgattttctgacgtgttttcatgagaaaacgttgcaattttgggtaaaacctatccacctcaagtatatcaaggggataggtgactgaatcccaacatagtcagcgctacaacgagtaccgctgcaagtatatcaaggggataggtgactgaatcccaacgggcatccaatggaaggtcgacgccggccaagtatatcaaggggataggtgactgaatcccaacagtagatgttcacggtgttctcctcacacaagtatatcaaggggataggtgactgaatcccaacggagcatgatgcttacgggcattctcttcaagtatatcaaggggataggtgactgaatcccaacttgattgcgttggcgagctggttggggccaagtatatcaaggggataggtgactgaatcccaacctgcgcgacgtaacgtgcgtcttgtcaacaagtatatcaaggggataggtgactgaatcccaactgcttggtgtcgtcgagcttgccgtccgcaagtatatcaaggggataggtgactgaatcccaactgtcgctcgaggagtgcgtgcctgtcttcaagtatatcaaggggataggtgactgaatcccaacaattcctcggccgtgatctggccttggccaagtatatcaaggggataggtgactgaatcccaactcgtcaggcaggcccgcgacgctgggcgcaagtatatcaaggggataggtgactgaatcccaacgcgctcatcttgtctagccgccgggcttcaagtatatcaaggggataggtgactgaatcccaacggcgcagcgttcaggacggtgccctcggcaagtatatcaaggggataggtgactgaatcccaacggtctcacgcatttagaacgcccgtgcgcaagtatatcaaggggataggtgactgaatcccaactccttggtacgacggtggacggcgtggtcaagtatatcaaggggataggtgactgaatcccaacgccgaagcgaagaggtggaaggcgctctcaagtatatcaaggggataggtgactgaatcccaacgacttgcgcgtggattcgccgcgcctgtcaagtatatcaaggggataggtgactgaatcccaacgtgtcgagcatgtcggcaagctcggcctcaagtatatcaaggggataggtgactgaatcccaaccagccggtgtcaccaacgcccccgccgccaagtatatcaaggggataggtgactgaatcccaacgtaacgacatggacctgacgacggtcaccaagtatatcaaggggataggtgactgaatcccaacaggtggtctggccgtcgatgggctgcgtcaagtatatcaaggggataggtgactgaatcccaacggtgacacaaaggtcgcagcagagcttccaagtatatcaaggggataggtgactgaatcccaacgacgtgaaacgcggcctgaacccgtggacaagtatatcaaggggataggtgactgaatcccaaccttcatgtcatgaaggaagagcaatacacaagtatatcaaggggataggtgactgaatcccaacaacgttggcgtcggcagtgagacggtgtcaagtatatcaaggggataggtgactgaatcccaacacggtaggcgttgagccttcttcgttgacaagtatatcaaggggataggtgactgaatcccaactgatgtggggcttgattgttcggagggtcaagtatatcaaggggataggtgactgaatcccaacgctgagacgtgccggaagggcgacgggacaagtatatcaaggggataggtgactgaatcccaacttcttccaggctgcccagtcgccggggtcaagtatatcaaggggataggtgactgaatcccaacttgtggaaggtcttcgcgaaggggaccgcaagtatatcaaggggataggtgactgaatcccaactatgacgatgcgaccatgccgggcactgcaagtatatcaaggggataggtgactgaatcccaaccgtatgttgagggtttggcggcggcggccaagtatatcaaggggataggtgactgaatcccaacataatggggcgcatgagtgtcacagcatcaagtatatcaaggggataggtgactgaatcccaacaagttggccctccagagcatgaactcgtcaagtatatcaaggggataggtgactgaatcccaacagctgacacgcggttgcatactcggtggcaagtatatcaaggggataggtgactgaatcccaacctgatgtaccgcgcgcgagtcggcgacgcaagtatatcaaggggataggtgactgaatcccaaccaaccgggcctaatccgcgcaccccattcaagtatatcaaagggataggtgactgaatcccaacacgtacaacgtcgcgcaatgggtgcgctcaagtatatcaaggggataggtgactgaatcccaacgaggacgagggcgacatgctcatctcgacaagtatatcaaggggataggtgactgaatcccaaccggacgcctcggactccgccgcggtatccaagtatatcaaggggataggtgactgaatcccaacgctcctaggccggcgttgtaggcggctacaagtatatcaaggggataggtgactgaatcccaactcggccttgggttcgggcttcggggttgcaagtatatcaaggggataggtgactgaatcccagcagtctcaacgtaaacggcaggcgttccccaagtatatcaaggggatacgtgactgatttacagttgtttcccgcgcgagtgggatgagtcccgatcgggaatctgcaatcgaagtgcgcattgaaaaagctcctgaacatagttcaggagcaaaggaaagcgagaggaccaatggcagtaaggggtctttacagcctgaagctgaaggcagtcccgcacccgaagctgctggagtagcttcctttgaacgctctgttaccagacgtcctacagtatcctctcgcggcgtcgatattagtctaaaggttggttttggtcaagaagggtatgtgaacaacattcttggactgagactggtttgatcaaagttctcctgtgagcggggataagcctcgatcaggaaatgctcaaacaaagtgctcctgaacatcgttcaggagcacttgaaagcgagaggacttcttggtacatggggtctttacagcctgaagctgaaggcagtcccgcacccgaagctgctggagtagcttcctttgaacgctctgttaccagacgtcctacggtatcctctcgctgcgtcgatactagtctcaaggttggtttcggtcaaggaagacatgagcaatgctctcttgcggacaccgattgatcagagtttcccctctgagtggagatgactcgttcccgaaatagtgctagggcgcgtacgaggggggcagccagcccacctgggagtgatctccgggcaggtgagcccccctcgtcgttgacatggatcgccttaacgacgaaggtggccgcgccttgagcgccctcggcatcctcgaggccgtcgaggcctgtacccgcgcctccgaaatggtcgagcgcctcgacggcacctgcatccacgacgatgactgggaagaggagcaattcatcctcgagcccgagtgcatcgcgggtgactccgacgaaagatgaatagtccctcgttgacgctcggaacgtccgagagggctggtcgtttctgtcaagaaaagcgcgaaaagcgaagcgagaatacgtcgaaaaatgatcgcccaaacgcgcccgcgacaaccccgcgcctgttactctgatcactgttccttaggagttctctatctctctatctctggctcctgtgaaacatcctgtgtaaacggacgcgcccacgcgaccgctcgccgccggtttctctcacactttcccggcgatcacgagcgcgcgtgggcgcgttcgcgcaagactgagccccgacctcgtcgatatgaacgaggccggggctcagcgcgtcagatacgtaccctcacgcgggggggcgagacggtcaggctccgcgtcggcgagccgccaccgccagcgcacccagcatgcccagcatgccagcgccagcgaggacgccagcc

SEQ ID NO: 2007 - DNA, 7376 bp, synthetic construct
  source 1..7376: mol_type = other DNA
  misc_feature 1..7376: note = Synthetic
gcgggggtcgaggcggctcgctcggcgccggtgcgcgcggcgtcggccgtcacgtcggccagctcctcgctgtccgagccatgcaggttttcacgcgggtcattcgacatgcccccattgtttcaggatcgcgcccctcgtgtcgcagtggcgcgcggaagtgggtggggtggccctgccgaaaagcccttgtggatgtggcttgcatctctggaattggagatgtatgctacggggtgactgaatcttaacaagggccgacaagttagcggttctgaatgctcactgctttgcagtagaccgggtctctccgtgagaggctcagtatctttcgaaacagacacaaatgtatgtgcgttgtgtcactatgtgtgcatgagtgattattcggcaaatgtgcagcgtcgtcgctaccgcattgggatcgacgttggcctcaagtccattggtttctgcgcgatcgaagttgacgaacgtggaactcccatcaagctgcttaactccactgtgcacctgcatgacggcggtgctgagcctggtgatcgaaaggaagttagccgcaagcaaaaggcaggcatcgcacgccgggcaagaaggcgagggttcaggaatgagaggcgcctgagggaactggatgcctacttgtctgaagagctgggatggccgcttcctgacctcgaagaattcactgaccaacacgaaccttggcatgtgcgtgcagagctgctcgactcctacgtttcagacccggcagaacgcaaggagatgctcgcaattgccgttaggcatatcgcgaggcatcgtggttggcggaattcttatacatcggttgcatcgttggctcgggctccttacccgagcaaagcgcttattaaggtgaatgaaagggtctgtgaggctctggggaggaatattgtcgccgaggccacgcaggggcagctggcttctgcctacgtcgcagatgaacgctatgcgtttcaggcgttgcgtggtacgcaaggtctattccgaggccgacagtatcagagcgatacctaccacgagctcactcgaattcttgagctccaacacattgatctttctcaaatcaaggaactgacagagatagttttccgagtgacccaccctaggaatggggtgcgacgaaacatgcgggttggccgcgatcagttaccggggcaggaatcgaaatggcgggccgaaattgcgcatccgatgtttcagaagttcagaatcgttgcggcactagcgaatctgagggttcgttctggtgggcaggagcggaagttaaatgccaatgagctgcgacgagtgacacgatatgttctggatagcgccctcaaggtcgaggacgttgattggtttgatattgcagagcagctcggtattgaacgggattgtttgacgggcaccgcgaaaccggtattcgaaggagagcccgctctgcgccgtccgccgactgatgttgtcagtgtcattgtcatgtcgagcaagttgacgaaattgaagcgctggtggaagtctgcatatgacgaggatcgtgcggacctcgtaaagttcatggctaactcaacccttgctgagggagaggagtttgaaaacgatgagattgatgggttccttggctctcttacagatgatgacctggcaaagctagaggaacttgcattgccatctggccgcgctgcgtattccctggatagcctgcagagactaacggatcgcatgctcgctgatgggtgtgacctgcatgaagcgcgaaagcgtgagttcggggtgagcaactcctgggtccccaaaccggaccctatcggcgctcctgtcggcaatcccgctgttgaccgcgtcatgaaggaagtgcatcgatggctgaagatggccgtcgatcgctggggtattcccgaggttgtgaatatcgagcatacgcgtagtggcatgatgtcaacggaaaaagcgcgtgaattgatggattcgaatgctgcgagacagaagcgtattgaagccttggcgcaggagttaggggcgcagacgtgtggtaggggtaagttaaatcaggttaccaaaattcgactcttagctgttcagcgccagggatacaagtgtttgtactgtggaaatgcaattagttttgaaacagcggacatggatcatattgttccacgttcagggctgggatcaaccaatgatagaaacaatctcgttgcagtctgtcgtgagtgtaatgagagcaaaaggaatcagctgttctctgagtgggctaaatcgggaggtcgcaaagacaaggtttcgatcgacgacgtgatcgaacgtgtttggtcttggaaacgggacccgggggtgagcctgaagcagcataagaagttccaagctgccgttgttgcacgcctgaagtcgaagaagcctgatcaagagttcgatgcgcgatcgatggaatcggtggcatggatggcggttgagctgggcaagcgcatcaggggatacttcgcgtcagcgtcctctgcaaatgaaggggcagtagttccctcagttgggctgtatcgaggccgcattactgccgccgctcgcattgtttcgggtttcgagggctgtgtgcgtctcactggtggcaatggtaagacgcgtcttgatcgtcgatatcatgcaatggatgctctcgtcattgcgctacttgacgatcacatcgcacaattgctagcactacgcgataatctgcgttttacgcagctgcttactagtggggctgatgagtggagacggtatctgcagtctcacccatctgaaaatacattgatgcattcctggtctcagcgcatgcgagttgcggcaacgaagtttaatggcgcgctcgagagtggcatggtgcggttcaccatgaatcagcgtttacgccttggatcgagtagagcgcacatggacagtgttacatcttctgagcatgcgtatctagaccggaatggtgatcgtgttccgaagcttgacaagaatggaatgcgaaaagtcaaagaacatggagaggttcgtctgttgtctgatccacttcctgtggatctcatcgatcgggcggagacgcctgctctatgggcggccctcgtgaaggatgaacagttcgatccgcagacggggctccctacggaccccaaacggacaatcaagatccatggcagaacgatcggccctatggagcgaatccgcttctttggagcgactcccgctgggaaatggtcagcgtcaatcgcggtccggggcggttatgtgtcgattagtaatacgatccatcacgtccgtatctacaagattgctgaagagccggcaaagtatgcaatgctgcgtgtctaccaggttgatttgcggcatgcgcatggaaaggatcttttctcgttctcaattccagcaagctcaatctcaatgcgtactgctgataaagcaattcgcgaagtgcttcgtgatagttcaaaagagccgctcgcttggattgttgctggtgatgaattgagggttaatccaaagttctatgacaccgataaaattggtgaattcttcaaaaagtatcccgaagcagtcgagtggcgagtcgttggatttgaggggccaacgaaacttaaccttcgtccgttgcgcatatccgaggagggattcgatgatgctacaccacaggaggtgcgcgatattgctggagatagtggatcgtggcgggtatcaatcggtgctttgctgggcccaggaggagtatctgtcattcggcgcaatgctctaggtgaagagcgttggaagtcgaaagatgacagactcccatgtagcaaggtttttgagtgacaatggacggcagctggcgggttatagacctctctacatttgatggagagctgcggtcgtgtcgcggcggtattgaagtgcattcgaccactggaggagtacaacttgtcccagtcgctgatgtggcggttgtcctcatcggcctgcaggtggtgttgagcgcctcggttcttcaccgcctgcatgtgcaggccaacgttaggggcggcaagtatatcaaggggataggtgactgaatcccaaccaccccgtcgccggcctgtccgtcccaccaagtatatcaaggggataggtgactgaatcccaacacggtgccatgctgagcgaggaatatgacaagtatatcaaggggatgggtgactgaatcccagcgagccgatcagatcgccaacgccgacgacaagtgtatcagggggataggtgactgaatcccaaccccgggaagcgcacggcgttctcacgctcaagtatatcaaggggattggtgactgaatcccaacttccgacggtggggctggatagctcgctcaagtatatcaaggggataggtgactgaatcctagcgtggcgcgccgtgggtcaactgaaatgtcaagtgtatcaaggggataggtgactgaatcctagccagttgacgacggtttcgagggtgcgcacaagtgtatcaaggggataggtgactgaatcccagcacctcagcgcgggcgagctttgcctgcgcaagtgtatcaaggggataggtgactgaatcccaactcgtgtccgatgaagccaccgcgcaatccaagtatatcaaggtgataggtgactgattcccagtgcggattggaggatgggagtgagctcggcaagaactgggaggtacgcgtcaaccccttccacctctccaaagccctcgcccacgtcaccctcgtcgtcgacacggaccgcctgaacgacgaaggtggccgcgccctgatcgccctcggcatcctcgaggccgtcgaagcttgcacccgcgcctccgagatggtcgagcgtctcgacggcgcctacatccacaatggtgactgggacgcggttgagccctgatgcgtttcggttatctcgagcgaggggaggagggtggtcgtggcacgcccggatggaccgagaaggccacgcaaaagttcgccgaaaattgatcatccaaacgcccccgtaacaactcgacccctgttacgctagtcactgtttcttccgggtgctttctctctgttgaaacgttctgtgtagaaggacgcgcccacgcgaccactcgccgccggtttctctcgcatttcccggcaatggtgagccccgcgtgggcgcgttcgcgtatgactgagccccgacctcgtcgatacgaggcggggactcttgttgggcagcacattgactgcgtcacctttttcgctcagttctgtgagtggttaaggtcgcgtattcggtcttgctctcgggatatggagcgcggcgtgttgatgactgcgcgcgggtgggggttttgcagcattaggagctggctttcggtgtgtcgtcggcgtgtcgtgcccctaatggtgcaattccccccgttgggtggcggtgaggctgtggcggcatgcctcgcagtctccagaaatttcgcacgtaattcccttgagggtgcttcaaactgtgaacgttgatcgttgggattgcaacgttttctggtgcgcttgaaaaatgaccgttggaaattatgtgcgacatttgtctgggcgcgcgcatgtggggccgcatgcggggcgtccggggcgcagtgctgtgaggcgactgcctcgagcaaaaggggaattccgcctcgccgcgggcaaaacaaaaaccccgaagcgaatgcttcggggagttgctggtggctccgaccggcgtcgatccggtgacctttcgattttcagtcgaacgctctaccaactgagctacagagccaagacctgaaccaaaaggtctggtcggcgaccccgacgggacttgaacccgcgacctccgccgtgacagggcggcgcgctaaccaactgcgctacggggccttacaacaggtaagacctattgaattgttccaatcacgattgcgaccggtggtacccccaacgggattcgaacccgtgtcgccgccgtgaaagggcggtgtcctaggccgctagacgatgggggcctatttggccgtcgaactggcgtccgaagacgggagatagtttaggcagaacgcgagcggaacgtcaaaacgaaatcaagtgacagctaacacattactgaaaaatgttgcaattgtgcggaatttccaggaattcatcagctgtccgacctaggcttgatgcatgactatgacaccagcactcggtgccctcgcccaggcctcggacgccctcacacgggcgatcgccgacccgcaatcgggggcgcagaccgccgtggccacgacggtcgacctcaccatcctcatcctcggcccgatcgtcggtgctctcgtgggtgtcgtcgtctcggttgtcctctccatcgtcggacgcaaggctctcgcgaagtccgccatggcctcgtcgatcctggcgcgcgtacgccggccgggtcacttcacctttgctgcgtggggcgcgtggatcggcctcggcattgcgctggtcaacccccacctgtccgactgggaaggctcggccatcactgccgtgctgatgcgcatgttcctcatcatcgccatcggctgcctcacgtggatgggctacgccgccgcgtgggtcttcgaggacgccgccaaggcacgccagaacgctgaccagggccgctcgcgccgcttcgaaacccgcgcgcaggtgttgcgtcgcttcacccaggggctcatcgtcctcatcggcgttgccgccgccatcggcaccttcgaggccgcgcgccacgccatgacgaccatcttggcctccgccggtgtcatctccgtcatcttcggtctcgccgcccagcagaccctcggcaacgtcttcgcgggcatgcagctggcgttcaccgacgcaatccgcgtgggtgacgtcgtcgtcgccggcgagaagaaagaaaccggctccgtcgaggaaatcacgctgtcctacgtggtcgtccacatctgggacgagcgtcgcctcatcatcccctgccgctacttcacccagacgcccttcgagaactggacgcgccgcgcctccgcgcagctcggcaccgtcgaactcaagctcgactggtctgcccccatggcgctcatccgcgccaaggtcgaacagctcctgaactccaccgacctgtgggacgggcgcacctggggcgtgcaggtcaccgactccaccgagaacacggtcaccgtgcgcgtcctcgtctcggcgaagaactccggacacctctccgacctgcgcgcctacatgcgcgagcagctcatctcctggatcgtggccgaacagccgtgggcgcgccccgtgcagcgcatcgagcctcgccagaccgtcaccgtcgagcaggacatgagccaggagcgcatcgctcgcctggccgccgagctcgccgggatctccggcacgaacgag

SEQ ID NO: 2008 - DNA, 23609 bp, synthetic construct
  misc_feature 1..23609: note = Synthetic
  source 1..23609: mol_type = other DNA
gcgccccgacaactaaaaaagatagaagattaaactttttcatattttccgaataattggttcgatttttgttaaagccctcaacagcctgccatttatattgggcaattaatatgccggtttaaaaacttacgcctgaaaattttccgttgtttttcctccagagaatgtcgtcgttggcatttacttctccatctaaattataatccgtcagtaaatagcgcgcaaatttcccgttgtctaagcgccacgtgcttgagtcattagcatttatctcagcaaaagaagatttgtttgaatcccccgcaaataagcagtgaatagctccaacctgaagctgccccgacgcaggtgcattggaaggaatataggactgttgctgggtaaaatcgtacgtaatcttattgcttgcaatggctacaggtgtatgagacgccgccccaacgtgcgttcggtgttctaccaaaacataataagactgcgacgtggacaaagtagggcaagctgccaccaaggtcacattaccatttttacgaagtaaacccgcagttcgatagaccgttgaggaggtattggttacatccgttcgtagtgaaatcaacacccaatctaccacatcgctgtcgtaagaacttaccgtctctgtgcccaaataattccaaggggctgttttataaggttgaccagcaggagtagctactccaaaggggcttacgggtgtttggccaggcaatagcccttgttggttgagcgtcgttgacatttcagtacttccccaaacaccttccaaatatatttttatggttgggcacgccacagaggttgacgtagaagtaacgtttacaacgatggttgcccgtgggctttcacacgaatttaccgtttgggatacataatagttggtggttcccactgccgccgtcgatggtgtgggggctgtcgtattaaatgttcctcccgttgggaccgtgtaccattttaaagacgtacccgtagcggttaatgggcttgctgtttgtccttgtgtatagttaattggcgacgtagctgtaggagcagcaggcgtagccgtcacattcacatcaatttttgtacgactactttcgcagccacttaccgtttgagatacccagtaactggctgtacctgccgttgtcgttgatggcgtcggtgccgtggcgttacccgtaccacccgtccctgcggtgtaccaaagcaaattactgcccgtggccgtcagcgctaccgccgtttggttttggcaatagttaatcggtgtcgttgcggtaggagcacttggcgtagctgtaacgacgacatctatttttgctcgggtactactaccacaactgcccaaggtctgagatacccaataactggttatgcctgcggtcgtcgttgaaggcgtcggtgccgtggcgttgcctgtacctcccgtcgctacggtgtaccaaagcaaattactgcccgtggccgtcagcgctaccgccgtttggttttgacaataattaacaggagttgttactgaaggcggaggtggcgtagaactcacaacaacgtcaatttttgtgcgattgctttcgcagctatttaccgtttgagatacccaataactggttgtacccactgtcgtcgttgatggggttggcgcagtcgaattgcctgacccacccgtcgataccgtgtaccacagcaaattactacccgttgcactcaacgctaccgccgtttggttttgacaataattaattggcgtcgtagcggcaggagaacttggcgtggccgtgacaatgacgtcaatttttgtgcgactactttcgcagctatttaccgtttgagatacccaataactggttgtgcctgcggttgaagtcgatggggttggcgctgtagaattacctgttccacccgccgataccgtgtaccacaacaaattactgcccgttgccgtcagcgctaccgccgtttggttttgacaataattaattggcgtcgtaacggcaggagcgcttggcgtggccgtgacaatgacgtcaatttttgtgcgactgctttcgcagctatttaccgtttgagatacccaataactggttgtgcctgcggttgaagttaatggggttggcgctgtggcgttgcctgtaccgcccgtggataccgtgtaccacaacaaattactgcccgtggccgtcagcgctaccgccgtttggttttgacagtaattaattggcgtcgtagcggcgggagcacttggtgcggccgtgacaatgacgtcaatttttgtgcgactactttggcaaccacttaccgtttgagatacccaataactggttgtgcctgcagttgaagttgatggggtcggggctgtcccgttgcctgacccacccgtggctaccgtgtaccacaacaaattactgcccgtggccgtcagtgccacggctgtttggttttgacagtaattaattggcgtcgtagcggtgggagcacttggaatgctattgatggtaaaggttgcgctgtttgaacccgttacactcggtgaaacagaattgacgcgaaccctgtagcccgttccacttaacgttccagcaggaattgttgcggttaatggactacttgttcccgttgttggaatatcaacaaaattatttccagccgcatccgacagctgaacgacgtacgaagtagaggttaaattggaagttgtgaaactaacactgacactttgaccagcacatacggtactcggcgtgacgctaccagtcgtaatagagggcggcgacgcccctgagaccattaagctataatcttcggcttctccataatttaagttaacgcaaggatcggtaactgcactacccgaccccgagttataacttgaccttacccgcattcgtaccattccgcttgccgtcactgggattgtgaaagagttggttgccgtagggttcatccttgtcgaagaaatatccgtactttgatataccctttcggatgcttcaaagaccccatcttggtcataatcaagccatatcgtaatatgttggtcaaaataagtaccaacgccccctgaagtagccctcgccgtaaacgtgtaagtactacctgcggttacgttgtaaagcgtggaggtgtaatctccaaaattacctggcgaacaattggagttgacgttgttaatgatggttgtggctccctgtctcaagataaaatcatcaatcaatacttggagcgtcgaacatggcgtagtgtaggttggagtacaatagttaagccctgtagtgatgctatatacagcgctgtaatcggtcgaagaattggatgcctttacgcggtaataataagtcgtaaacgcggtggttgtttggtctaagtaagtcgtaacgttgggtgcaataccgccaataggtacaaaacccgcggtagcggaggtcgttgagcgctcaatgataaaccctgactcgttagaagaattgtcggtaaatgtcagcgttactcccgatggccctagtattcctgctaaattacttggcacattagctcctgtgacggtagaaccacaagtgagtgaatattggtttgcaccatcagttcgtaacaaaacccctccgctgattcggttcatttgccctgccgtaaaagtatttccgcacgcaatcggataatacgacatgatgttggaaagcgacggattgtacaactgattttggggatctcgtgccgttccagtataactacagccgagcaagcttaccgaatctcgtccgtaaggatcggcaggggtgtcacaaaccaaatctccttttgttgcacagttgcctccctgaaccaattcacggttggctaaattggggtctgtgcttccttggaaagtatgtaataaattaaaatagtggcctaattcgtgcgtaaacgttcgcaaatcggtagcattactggcctgtacaaaaagtcgattagtgcttgccaaagtactcggaaagtacgcgtatcctgacactgccaaactgccaaactgtatggtattgggaaaataaacgttgatggcgttcgtcacatcgttggcattacagaggggagactcttcggtattgtcgtaatcgtagaaagtggtgttattgacgtaattgggagaaccacaaaaataaaattggagcccgctacctacgttgatataatacgaattgacttgggcaagcgcgatgttgagatctgcgatgctaaggccgcctgtaccatctgttcttcttagtatatgcgcttttattgggatatactgaaccgtttgaatggcggctgttgcgtactgttcggcaaacttttgttttagctgaatgactcggctttctcggcgctgaatttcgtccgcattttcgtggggagttccgcagggtacagcctgagtgtgtgcttcaaaatgaagcagccacgcggcccaaaacaccgcacacccaataatgcgtaaaacatttcgaatcatgcccctactacatcgttaatacttgttaaaatgacgttacagcttcgcaacccacaagagggcaactctgtgataatcaattatttaagtttacgtagggtaattggtatagtataattttacaggcaataattatgccaaaagttgatatatctagtagaatatacttttctaccgatacaaaaacaatctaaaacacacataatgagccacttacaagaaaatttaactcagaaaataagcatattcttacagttttgcggtataatctcggcccaacattcgcatttggcgagctatttgctgtgtacgtctcagcgtataactcgacgggtttttaattgaaaaacgtaaagggcttggcaataccgctgcgatacgggctgcttcagtacgagttagattggccgacgatttttgaaagaaacgttgagcagcagcctcgtacccaaaagtcatattgcctgtctcagctacatttaaatatacctctaagatacgttcttttccccaaatcacctcaattaagagcgtaaaatatacttctaaaactttacgaacgtaactgcggccttgccacaaaaagacgtttttggctacttgttgcgaaatggtgcttgcgcctctgattttttttcccttcaaattggattgaaatgcgttgcccatggctttaaaatcaaagccccaatgctcagggaaaagttgatcttcggaagctactaccgacaacggcgcctcttttgacatgtcttcaatgggagtccaatccgaataaattttactactacgaccatccgtaatagcctccacttttcgtacaagcatgaaaggcgtaaaccaaacgggcacaaacttgagcactgtcacccaaatcaccgacccaaccaaaaaatacaatatgctctttaacacaaaacgcgttagaatcgatttccaactttttgttttgggcaagggcgctgatgcaggggtgttagggcgaattcggttaacagccatagaggactaaaaggtgattagcaaatagtgtgacagattagatgtaacaaaaatcgaaaaaggaattcaattgttcaaactaaaaacaaatcagacgcaattcggtcggcaaataatttccccttgtcggtgagaaacagtacattgtttcgtacttctacccaatttttttcaagaaatttttcaacgtactccttttgttctttcagcaagtcaactttccctatgtcccagataaccgccaaatcacagccccaaatcgtcctaagactggtcaaaatatagtcatttacttggtcaaagactgacaattcttctagttcaaaaacaggctttttcgcctgaataccaataagatacatagcgttgttagacacgttgtattgcctcgaaacaccattgaatgaatgcgcgctcggcccaacgcctaggtacggccgccgcttccagtagctgctgttgtggcgggcatattggccatttttagcaaagttggaaatttcgtattgctcgtacccagcctgcgtcaaggagcgaaccatctgctcaaaatgccgcgccgataactcttcgtcaacgggttttatttttccttttttgagccaatttcccaacgccgtttttggctcaatggtcaggttataggccgaaatatgcggcgtttcgagtgccattgctttgtcaaggtcttgttgccagagttgttcgtcactgagggttggaaccatccccaaatgcgcttggctcatgccataaatcaggtcaatcgtcaggttatcaaagccatgatcttgggccaactttacacattgctccgactcttgcgcgttatgcgctcggttcataaaacgtaggtaaggctcataaaacgactgcaaaccaatgcttaaacggttcacaaacagtttcaacgcacggagtttttcagatgttaaatcatcgggattggcttcaagggtaatttccgcccctggctctactttaaaaaaacggtgaatggtttcgaggatttgttccaattcgttttgggtcaaaatggagggcgttcctcccccaaaatagacggtttcgagcattcgcgttggcaaatagtcttgttgtagctctatttctcgacaaatagccgccaccatttccgtttttgacttcagttgggtactgaaatgaaaatcgcaatagtggcaggcttgtttgcaaaaaggaatgtgaaggtataagtgcatgggtatttactccagcgacgctgggttcttaggtgatttcgatgccctttttcgtttcttgagcgcatcacttagcacgtattcgatttggccgttagtacttctgaactcttcttgagcccattgttccagctctttgagcatttcggggctgattctgagtacaaacgcctttttttcggttgccattgaataaaaagataatggtaaataacgcaaaaaaggaatgttcagacaagtatctaaacattccgtaagaccaatcggtctgactatcgtctgacctgggtgccactaattctacaaaagcctgattgtataatttatcggtctgactatcgtctgacctagggcttaattgtacaacgttcccgcattgactacggggctcaccgatttttcgccgcaaagcacaaccaataaattgctcaccatggctgctttacgctcttcgtctaagtgaacaatctctttctcagagagtttggccaaagccatttcgaccattcccacggcaccgtccacaatttgtttacgggcagccaccacagccgacgcctgctgacgctgaagcatagcccctgcaatttcgggggaataggccaagtgactgatacgcgcctcgatgacttttacacccgcccgcaccaagcgttcgttcaattcatgctcaagcatgtcgtttattttacccgaaccgtcgcgcagggtaatgtctgcatcttcgtcttcgatgttatcgtaggaataacttcctgccaatttacgcaccgccgcttccgactgaatctcaacaaacttctgataatcatcgacttcaaataccgcctgagccgtatcttctacattccaaacgacaaccgctgcaatttcaatcggatttcccattttgtcgtttactttcagtttttggccgttcaggttgcgcgctcgcaagcttattttccgacgacggtacaagggattgacccaacgcaatccattttgtttcatggttccaacatactctccaaagaaagtggagacagccgcttcattggggttgatgactgttaaacccacaaacataatacatcctagaaaaaacagcagtcctgctaacaggcccgtttgggcacttgccatcattccgcccaaaatccatagggcgaatcccacaccaataaatgcgtagccagaggctgaggtaagttctttttctttcatcgttttttgatattaaaatgatattacaatactatctcaataataccaaaaaatcacccattatcggactaacggccgagggaatttataaacggtaatggggcatttcgtaaaatgggattgaaggaataaatggagatggactgggttctgggcagcgacccgctcggtgttaaatctttctaacaatttttcatcgcttagttttagataatgtttaaggagcactaagccaaaatagccccgtttaggaagccatgagggagctttaaccatcgttttttaggaagtagttcaactaaagacgtccaatcaatagtttaaataaatagaccctaaatcagtccgatttagaggcatttacagcattaaggtcgaaaagtgtatcttgcatttgtacttcagttttgtcgcaaaaacaaaacatacaaaaaacccgaaagtggccaattttgactctctttcgggtttaatttatttataaaaaactgtatatcaaaaggttaagcctaaaaaggaaagcctacttataaagaggcacttctgccatccagttgtttacttcttgttttacggcttcgatttttgcttcgttttcagcgttcattaataccgcatccatcaaatctacgatacgctccatatccgcttctttcaaaccacgggttgtcatggcaggcgtacctacacgcatccccgacgttaccattggcgacttggtatcaaatggaaccatgtttttgtttacggtaatgtcggctttgataagcgtattttcggccaatttacctgtcaaacctttgctgctcaagtcgatgagcatcaagtggttgtcggtgccgtttgagataatcttatagcctttatcgacaaacgcttttgccattgcttgggcatttttgcgaacttggtgagcgtattctgtgtagtcatcactaagtgcttcgccgaacgcgacggccttggctgcaatcacgtgctcaagtggcccgccttgtgtaccagggaaaacgccagaatccaacaacgaagacatcatacgaatgtcgcctttcggtgttttcaagccaaatgggttttcaaaatcgttgcgcatcataattaccccaccgcgaggcccacgaagcgtcttgtgtgtcgtagtcgtgacgatgtggcaatgctccagtggatcgttcaataatcctttggcaatcaagcccgctgggtgcgagatgtcggccaacaacaacgcgccgatttggtcagcgatggcacgcaaacggatatagtcccagtcgcggctataagcagatgccccgcaaataatcatttttgggcgctctttcaaagcggtagcttctactttgtcccaatcaataagaccagattcttgttctacaccgtagaaaaacggctggaagtatttacccgaaatattcacaggcgagccgtgtgttaagtggccaccgtgtgctaagttaaaacctaaaattttgtcgccaggctgcaaacatgccaagaaaacggccgtgtttgcctgtgctcccgagtgcggctgcacgtttgcccacgtagcaccaaacagctccttgaggcggtcaatcgcaatttgttcgatttggtccaccacttcgcacccaccgtagtagcgtttgcctggaaggccctcggcgtatttgttggtcaatacgcttccttgcgcttccattacttgcggcgaagtaaagttttcagaagcaattagctcaattccagactcttggcggtggtgttcttgggcgattaaatcaaaaatttgggtatcgcgggcaatcgtggtagaaaccattgtatgtacgattttgggatgatacaaaatacgatttggaagaaattttcggcaaaggtactgcttccgaaccacatagacacacccaagcttgagaaaattagaattttgtaggcttctcttgaaattttacagaaattagatttttagtatcattgtcttactaaaaaaaagcccaacgggcgaaccgaagggcaggcgaagctcgcctaaggaataatccttattgtgataagctttcagaagcaaagatatgttttaaacgccaatttatcaatcaacatgcactacacgatttctcttgacgcgggtacaaattcaattggttttgccctcttagatagcaccaacaccctattagaactaggcgtagatactttcccaatgggaaataaagaagaaaagggtgttgaaaagtcaagaagtgccgagcgtcgggggtatcgtagtgcacggagaaatcgttttcgctatcacttacgtagagcgcaactcaatacccttctaaagccattaggaatgatacccgattggtctcacaagattactgcatttgatttgtacaagatgcgcaaagaggcagttgagcagcaaattacgctacaagaactaggtaggattttatttttattcaacaagtaccgaggttttaaaagtagtaggaaggaggtgggaaaagacccagagaaggaaaaagaggagggggcgattcaaagcgaaattagctggctcaaaaaccgaatgtctgctcataattgtaaaactgttgggcattactttttcaaaatgtttgaaaaaagccacgaactccaacagcgtggtgaatggcataatcccgacgaaccctacgacgaaaggggcctggatggtgcagaaaagttctcactggtaaattcacgcggtattcgtcgagaagggcgacaccttgaaagaacactcattgaagccgagttcgacctgatttggcaaaaacagcgtacattttaccctgctattttaaccgatagcaactatcaccaaattaaaaatcgttgcattttttatcaacgactgctcaagtcacccaaaaaattcatcgggaaatgtagctatgagaagtccaagccttgtgcaccattgagctctttaccattccaagaatttaggctactgaaacaacttcttgacattcgtatcacggacgaaaaaaatccagagatgtttaatgtgtctctcgacgacgaacaacgaggaatgctatttgaagaacttcaaaatcgcaaaagtctgagttttggcgatgctaaaaagctattgaaactacctaaaaatgtaaaatttaacacagatgagcttggtaaagacttgatgggtaataagacccgtgcttctttacgtcaggtattgggagaagggctttttcaagagattgaacaacaaggccaacttgaaaagctttggcatatcatttatatgcaccaagatgaggcttggcttcgcgaaaagctcgcccaaaaatgggagtttagccctgatattatcaacgctataacagaaattcacttggaggaggggtacggaagctactctactacggtgcttcaaaagctactgcctgaactacgtaagggagtacatgagcgcgatgcgctgaaaaaagcaggttacgaagtagagcaaaacgccgcgaaccgcccccttaaacctagaatcagcgagctcaaaaacaatgagctgagaaacccagtagttgaaaaagcaaccatgagagtgattcgcctagtgaatcaactcattaaaaaatacagtatcaatcccgaacaacttacgattcgagtggaatctacccgcgagttgaaaaaaccaaaacaagaacgtcaaaaaattagaaaccaaaatttggacacagaaaagcgtcgtaaagagtacgcagcttttcttaccaagtacggaaagtttggtatcgtatatcccaacagtgccgtcatcaataaatttgaactttggcttgaactaggggaaaatcaggaaaatttgaaagattttcagaagtttattcttgattcaaaaggctttgaccttcactttgaaaagtatcgtttatggttggaacaaggcatgaaatgcccttatacttttaaaacgattccactagctgatttgatgagcccagaaatcgagatagaacatatcattccatacagccgtagtatggataattcattcgttaataaaaccctttgctttacggaagcaaataaacagaaaagcaacagtactgcttttgagtttatgagagacaaaggggaagggactcttatcgcttttaaagagcacatcaaaaaagtattttcaaaaagtcccgaaaaacagaaacgtttcttgcaagaagaagtaccgccgagttttcgcccagaccagcttaccaatacgtcgtacattgctcggcaaattcgctcaaaacttcaagaagtaagtcgtgatgtgcaatttacgacgggggctgccacctccgaactgaggcgtatttggcgaatcggtagtttgcttgaagaagtaatgtatgaagaagcgacgggtatagaaatgtggcgtcactttgcgaatcgagccgacgaaaacaacaaaattgaaatagagaacttcaaacagtggcaagctcagtttggcaagggtaaaaaccgctccgaccaccgtcatcatgcccttgacgccttggtgattggcttttgtacgcccgctatcgttcagcaaatcagcacatttcacagagtgagggaagaattgaagattgcaaatgccgaccacgatggcttgctttttagcaaagaattggaatatcgcttacctcgtttgcctattcaaaaatcatccattagagaagcactcaaacaaattttggttgcgtctcaggtgaatcaacgcttattggttgcccagcaaaatcatagtaaaaagaaaggaggaaagcatacgcaagccgttcaaagtgtgcgaggggctttgtttaaagaaacgttttttggtaaaattcagaaaccccaccctaatgcctttgacaaacatgaggtatttgtgacgcgaaaagcactcactcctgaattaatcaaaagttcaaaagacttagaaaaaattgtggacgtccaaatccgagaaattttaaaacaaaggcttgcacaatatggcgataggggagacaaagccttttcggaagaggaaatgcgacgaaaccctgtctatatgtacagcctgaacgactatccgaatcgttcgacgaaccccagcagtaaaaaaggaaatacgcttcccgtcattaaaaaagttagaaccatcagtaagaatgtacgcagttttgtggcgattcctgccaaagatgccgacggggtcattgttgcttctaatcggtatgctgaaaaaaatgaaaactatatcatggctttttaccagcttctaagcaccaacaaaaaaggcgaaacgaagcgtatatgtgattttaaactcctttctactgttgaagcggtgcgcaaacgccaacaaggtgaacctctttttgccgacgaacttaccaacgaaaaaggagagacacttccgcttaatccgctctgtccaaatctaaaaaaaggcgatttcgtggttttctatgaaaatacccccgacgaaattcagtggaatgaccccgaggatttatccaaacgactgtatcaagcaacaggactgagtgaaggaataaaaagcaaaatctatctttttggctatgtctcttttgccaaacataaccattcgcgttataatgcaagttatgaaagcaaggagttctcgcttagtgaatctatgccttttctaatgatgtcacacattcagctaaaggctgttaaagtgaaggtaagccaacttggtgaagtaactgtttaaatttattttacccgcagaagaccgctgaatagtataaacgcagattttcgctgaaaaggtattttatgaagctattcgtcagcgtttatctgcggctatcaatctgcgaaatctgcgggtaaaaatttgaaaaaatgtatttcagatttatgcgtaccactcttttattcttgaaaataacgtctaaacaacttactcttttttaatttgtcaaaacttggcaacttgttgatttactgaacgataaataacgttctgttgtgttaaatatcgtcaatgttcaatttgaaagcaaaccacaacccgtgagcttattgtactccgacaccagcggttgtgttaaatatcgtcaatgttcaatttgaaagcaaaccacaaccgagcgtagcggttaatcttttactcgaaggttgtgttaaatatcgtcaatgttcaatttgaaagcaaaccacaaccggccatggctttctctaaaatctctcttgggttgtgttaaatatcgtcaatgttcaatttgaaagcaaaccacaacaagctgacgtttttcctgactgctgagtaagttgtgttaaatatcgtcaatgttcaatttgaaagcaaaccacaacctttcagggtcttcgatagtgtacccaattgttgtgttaaatatcgtcaatgttcaatttgaaagcaaaccacaaccagaaatgtatcctttgcttagcggcggcagttgtgttaaatatcgtcaatgttcaatttgaaagcaaaccacaacgcacaatgactatgttcgttgtctgcacaagttgtgttaaatatcgtcaatgttcaatttgaaagcaaaccacaactctcttagtttttttggagttagttcgtcggttgtgttaaatatcgtcaatgttcaatttgaaagcaaaccacaaccgattcgtactgcatagctaagcagaagaggttgtgttaaatatcgtcaatgttcaatttgaaagcaaaccacaactacttccgacgcctccgaaaccgcccccccggttgtgttaaatatcgtcaatgttcaatttgaaagcaaaccacaactgtttgggcgcataagttcttgctcaagcgttgtgttaaatatcgtcaatgttcaatttgaaagcaaaccacaacttagaatctagcccgctaaaaagttggacacaaattagggtacaacttttaaatttgtgattcaatgggaaaacatcaaaaatcatggagtcaggaggaaaaactgaccatagtgaagtactacaaagaacacggagctgctaaggcttctaaggagtttaacgtctccagtgcgaacatttataactgggtctcccactacgaaaaaggaggtttttcaaacccatcgggtgttagtaactctaataaggacaaagaaattcttcgctttcagcgggagattcaagcttataaagagatcatcgctgagaaagaattatcacttagaatcaaggatgctttgttaaaaaaaagcctttaagtaagcaaattcgcttggaagtagccaatgaatttattctttcaggaggtagtattaaaaccgttctaaaatcctgttttatcgccagaagcagttattattacaaagctactttaggcaaatctgggcgcaaaccatatgccgaatttctcaatgaagaaggtggtaaaatagaggcatatcatgtgattgaaacgttgaaagaactgtttgaaaaaccctttgttgattatggttattacaaagcctatatctacctgagagatgaattaggttttagagtaagtaagcattctgtttataaactaatgaaagagagtggtttacttcaaagcaggtacgctattagttctaaaatggggaagcgtaattgggtaaaaaatttgattccacagactcaaatcccattcgattactgggagttcgatataaagtatgtctgggtatcagggaaaaagagaagtatgcaggtattgacggtgttagatgtaaattcaaggtggaatttaggccaatattgtgcttttaccatcaggaaagaggatgtcatttcattatttgatagcctctttgaaagttacgaattacctacaggagtctgcgtaaggagtgataatggcagccagtttgtagccactgaagtccaaaaatattttcgagataaacaagttaaacaagaattcacaaaacctgcaacaccacaacaagatgcgcacatgagactgtaaactgaactctgtctaaaagttttaactttaagacagaacaatggaaaagacagaatttgaacagatgcgcgacaaagcgctggagcagttaatgaagggacaatcattaactggcaagaatggggttttcgctcccttacttcaacaatttttagaaagtgcgctagagtcggaaatgaatgctcatcttgatgaacaggagcgagaatcaggcaacaagcgcaatggcaaaggcagcaagcgtctcaaaaccacctctggtgagattattttgagtactccccaagatcgaaagagcacatttactcctcaaatcgtcaagaaacgcgaaacagttttagctgataaccttgcccctcaaatcatcggactctatagtaaggggatgagtttgcgagatatatccgatcatatccaacaaatgtatgatgtggaaatatctcattctaccctttccgagattaccgaacgtgtaattccgcaggtcaaagagtggcagagtaggcctttggaaagtctctataccattgtttggttagacgccatgcactacaaggtaagggaaggtggtcgagttgttactcgtgctgtttataatgtattgggagttaatcgacatggctacaaagatttgattggtatgtatgtctccgaaagcgaaggtgccaatttttggttatcggtgcttacagatttaaaatccagaggggtaaaagatattttgatagcctgtacggataacctcgctggcttctcggaggcaatattggcttgtttccctcaagctgaggttcagacttgcatcattcaccagatacgcaactcgcttaaatatgtggcctccaaagaccaaaaggcctttatgcaggacttaaaaacagtctatcaggctcctaccaaagacaaagctgaattggaattgaaaaaacttgaagataaatggggggtaaaatatccagtcgtgcttaaatcatggcagaagaactggcataaattatccacctattttgcttatgatgagcatattagaaagctcatctataccaccaatgcagtagaaggatttcacaggcaagtccgtaaaattaccaagaccaaaggcgctttcccaactgacatggctctacttaaattgatttacttggccgttgaaaatataagccgaaaatggacgtctcctttgcaaaattgggcacttaccgcccaacaattacacattaagtttggtgatagaatgcgaatagacctgtagttttcctttcaattgtaaaacgcaaaaatagcctgttattggatttgtcaagggtatataaacggcctcgtacctcagccgcccttgacaaatccaataacaaatcaaaaaagcatttgaaatcgaaaagaaaaactaaatttgacccaaattaaccactagacagagtttatattacactcccgcgcacatcgaagcctatcattccattatggaaagttgtgtctgtcaaaggtttgagtttaacgatttgaagcatgctcgaaaaacattggaagactttagaaacttctataattttgagaggatacatggaggaattgctttccaaagtccttacaagtatttgctcaaacataacattgatatgaaagaattaacgcaaaataagactaaaatctgtgcttacagtctctaactttctatcatttacgtgtccaataattagcggttagcacacttaaatgggcatcctccgacgtaaaaacagttgtgttaaatatcgtcaatgttcaatttgaaagcaaaccacaacttattacagcgtttgtagtgcatccttatgttgtgttaaatatcgtcaatgttcaatttgaaagcaaaccacaactcgcgaattgcttctactttctgcccttctgttgtgttaaatatcgtcaatgttcaatttgaaagcaaaccacaactagtcttatgctcttacgtgcgcttcgcctgttgtgttaaatatcgtcaatgttcaatttgaaagcaaaccacaaccaacttctgtaattctgaataaggccctgttgtgttaaatatcgtcaatgttcaatttgaaagcaaaccacaacccagaacatttcgtaaaaagcttccattgagttgtgttaaatatcgtcaatgttcaatttgaaagcaaaccacaactcgcgaattgcttctactttctgcccttctgttgtgttaaatatcgtcaatgttcaatttgaaagcaaaccacaacctacccacggttatgttctgcgaggttgcggttgtgttaaatatcgtcaatgttcaatttgaaagcaaaccacaactcaaccttctctattgtagttgaaagttttgttgtgttaaatatcgtcaatgttcaatttgaaagcaaaccacaacaaagcacttcatcattgcgaagtgacagtggttgtgttaaatatcgtcaatgttcaatttgaaagcaaaaattacaacaatcgaaacgacatccgatggtaagaacagggaccaaactctcgaatgcctgcccgatgcacgggcgtggggtagcctacatttctttcccaaccatagtgcggaaactccaccgcgaggcgctccatgaggtcgtcgcggtaggttttggccagtaccgaagccgccgcaatgctcataaacttggcgtcgcctttgacgatgcaggtgtggggtaaaaacgggtaaggcgtaaagcgatttccgtccaccaacaaatgctcggggcgtagcgccaactgatccacggcgcggtgcatggccaaaaagctggctctgaggatgttaattttgtcaatttcttcgttagaaacttccgcgatggcccaagccaaggcggcctcttgtatgtcgttgcgaagggcttcgcgttgatttttattcaactgcttcgagtcgttaagcagttcgttggtgtagtctttgggaagaatcacggccgctgctaccacaggacccgctaggcagcctcgccccacttcgtcgaggcccgcttcggtgagttcggcatggtagaaaggttttagcatacatcgggtattttggacaggcgggcaatttacgtatttttgtttcgaggttatccctcctcactattttttgctatgcgttttatcgttttgcttctgcttttttgtggccctctgtacgcccaaaaaagcacctcagataccacaaaacctactcagacgattggtgttcagtctgagttgttgtcagatacaacagagtaccgccttaaacctggagatcggttgcgcatcagaagcctcaacgcgcttgagattatttttccgcaaagtggcaacatcgccgtggcttccacgcccatgtcgtcgggacaagcaggggcttctgcgtatttgattaccgttgatcgtcatggtcaaatcgttttaccacaagtgggacgcgtcaaagtggcaggactgaccaaaacggatgccaccaaggccattgaacagtattacaaagacctcatcaacgaccctatttttgacattgagatttccaacctacaaatcagggtcttgggctcggtggcgaagcaaggcatgatttatcttgataatgaaaaattgaccctgggagaggtcattgccatgtcgggggggattgattttgcgacggccgaaaaaaccattaagctcatacgaaaacgctcaggcgtgcagcaggaagtcaattatgacatccgtaacctcggcgaccccgccgtggccaacattcccgtttttgacggagattacgtctttgttccgccttctaaatggagccttaggattgttaaaaaccaaagattctccagtatattatctccagtggttattggactcaacgccgttgcggttgttttagggctataccttacacttaaatagcagcagatgttttcgttttttaagaaaaaatcttctagcgcaacggctcctttttcacttgattttatggaaagtgactggcattgccacgtgcttcctggcatcgacgacggtgcgctcgacgaaaacgtaacgttggcaatgttgcaggagtacgtacaaataggcatcaaaaaaattgttgccacgccgcacgttcgggccgattattttaaaaataccgtcgataccatccgagccgccgccgcaaaaaccaacgccctcattgaaacccattcgcttcctttgttgctagaagcatcggcggaatattatgctgacgaaaattttgtccaactcattcaagaaaatcagctgctacccatcgagggccagtatattctatttgaattttcgatgcaggcgcctagcctttgggggcacaaactgattgaaaaaattcaacaaaaaggatacacgcccttgctggcgcatcccgaacgctaccgatactggcacggcaagccgagggaatggcaaagtctaaaaaacaggggggtttcttttcaactcaatttgctgtcgttggtggggcagtatgggtcggcagagcggaaagcggccgaacaattgatagaaaaagggtattatgaggcatttggtaccgatgcgcacgggattcatcacttacaaaaattgaaggatttgggccgaaacccgcactttgacacgttacaacaattacctttgctcaatcgtttggggtaaacaaattagagggaaacagctattatgcaaaacggaaactggagccaatcacaagatagatacaccgaagtgtctgctgacattgacgttaagcggattcttaaagtcattctaagtcgttggtattgggtgattggagcattggttttgaccgttggtgggtgtgctatttttcttcaagtggcccatcctcgttacatggccgagatggtgttaaaatacaacgataaacaaactgagctcgacgaacttaaccgcctcattcagtctgatgaatccaatttagaataccttaccgaactgtatgtcattaaatcggaagaggtcatcaacggagcgattaaaaaactcaattatccgtttactttttatcgtgagcttacctttcgtcatgatgacgtgtacccttaccagcctttcacgtcacaacttatctcttatgaccccaataagtttcagtttgggctttttgaaatcaaacaatcaggcgtaatcacgtacaaaaccaaagacgaaaccgaaaatctaactttcgatttgtcaaaagataccctcgtttcggtacgaggactttcgtttagtgtcaaatctgtagagaggctttcgcaggattatgtattttcttacaatgacctcaatgacctgcgtgggcgtcttgacggtggaattaaagtaaccgaagagggagcgagtttacccattttaaacgtttcgttttcgtattacaaccgacagtttacgcaagattttcttcaaaaactcattgaatcgtacgaagaatataaccttgaacaaaagaagaggtcgtctaacctgacgattaattttattcaagaacaaatcaaaatctacgcgacggcgcttcaaaaagcatcgtcggagttagaacgttacaaacaacgcagttcggtgcctagtttgcaagcctctatgtcggacgttatggggcaaatgacgcagcttgaagcgcaaaaaaataccctagaaattgcaaagtcgtacatcaatttgctcgaacaaagcctgagcaatcgttttgagcccgtcaatgtgggtagtctaggactggatggtaccagcgacggtgttcttctcaagttagtctcggatctcaatcgcctcattcttgaccggaaagcgtatataattggtaaaaacctgagtgtcaataacccaattgtaaaaactgccgacgacgagattgatcgcgtgcgggagcagattctcaccaacatcaaggtacagcgccaaaaaaatgagagtacattgggcattatcagtcaaaatttggcgctaattaaaagccgaatgaatgccctgccatcggtagagcgagagcttgggtatcttcaaaacgaccgtgatgttaacgaaaaaatataccttttgttgattaacaaagagattgaaacctccattgtaaaagcaggtgttttgccgtcgtttacggtacttacccgcagtaatgcgtaccagacttacccacaagcgccgcgtcttatttcagtgtcgctcgttttgggattattgattgggtttggttctatttttttggcccgttttgccaacgggaaatttaccgaaatttccaaaattggtgcttctgagcacgtcaacttgctagggctcatccagcgatttccgcacaaaatctcccaaaatgaaaaagatttgttgcactttttggaaaaccgttcgttgttttctgaatcggtcaacagcattcgtaccaacctcagctttttgaccgacgttccgagtcagcaaggcaaattgctggtgattacatctgaactttcgggcgaaggcaaatcgtttgtgacgctgaatttggcgacgtctttgaccaaaattgggaaaaaagtgctggtggttgtgtcagacttacggcggtcgaacatgcaccgttattttaaccacaacaacaaaattgggcttagcacgtacctgtcgggaaaggcagatgattttcaccagacgattcatcactcggtcatcgaaaacctcgactttattcctgcggggccttcgccttttaacccgactgaacttattcaaaatgagcgatttgaggcatttattgccaacgctcagcaagagtatgattttgtgttggtggatactgcccccgttggtttggtgtcggacaacgtgcctttattgaagaaaagcgatttggtgatttacatcattcgttggctgtactcgcacaaagaatcgtatttgttggtcaaccaaattgcggaagaatataaaatcaaaaacgtaggcgttatcatcaatgatttttacaaagatgacctgtacgccaacctcatgccagcggcttattattcgtcgaaaggctacgggtacagctacaagcagacgtacgattattacggcaagaaaaataattactaccacaacgagacgccatccaaatctatttggcgaaaaatgattcgttgggtcaaaaaagaacagtaaagaatgggcagattttggctgtttttttgttctgacgaaatttttggcactgttgttgtcgagcaaaagaacgaagtcacttaaataggcgctcaatccgtataaaaaatagctgagttctttttgagtttcaagagttttcctaattttgcactccaatttgaaaatcaatagtaatgagcaataaagacacagattcggggcttgattttttagagagcccagaaggtttggcaggagagttaaccaaatttgaaaaaagcatcgaaaaaaaccgcaatatctttgtgattgcggggggagcaattgtcgttgcactagcaggatggttcggatataactattacgtaagtagccaagatgagcaagctcaagctgctttgtacgctcctgtttttgcctttgaatccgattcgcttaacaaagcgctcaaaggtagcggtggtaacccaggtttggcgactatcgctgacgaatacggtgcgacaccagcaggtaaccttgcgcagttttatgcaggtacggctcttttgaagcaaggtaagtttgacgaagccattgagcgtttgaaatctttcagctcgtctgatttgttggttcaagcccgcgcttactcattgattggtgacgcttacatggaaaaaaatagcgtagaggatgccat

SEQ ID NO: 2009 - DNA, 24254 bp, synthetic construct
  misc_feature 1..24254: note = Synthetic
  source 1..24254: mol_type = other DNA
aaatgatgagatagcacaggttaaaaagactatagaaaacaatgaaactgtgacaggccatttgggctatcttgatgctaatgacaagcgtgataatgatgactggtttaagatcaataccagcaagttgtctgcttacatggttattaatgcggtatgtgacactgcttccacactctcattccaatatgtggaacttgtcaccaagaaaggtgaacaagtaaagaccgttacatcatcgtggtacacaaaaactgtcgttctttcggttcaagaaattgatgagaatgctgaatactatgttcatctacatcgaggtgatggtaacggtggctatgctttggcattaggtgctgttgaacgcttagaaacttcgaaagtacgtgttcactatattggacaaaacagcacgcgtctcggcatccctagtccattccaagtgacaatagagaatatcgacagccagccaagcggttcgttcttcttggtgattcctgcttctgacgatgtgaagctgctctatgcagaatgtccttgcgacacgggtattgtgcgttatactatggatgacctcggaggcgtggataccaactgtgctacctttgtagttcctaacttggatccatacgagagctataccttcacgatgtatgcagagggacgtgtcaataacaagaatgttcctggaggtcctaagcatctgattctctcgggtacagttatcgctgtgggtgcatacgtcggcactattgctctcagcatggcaacggacaaggtggttgaatacttgacagagaaagccaacaagaagttgatgccagaagaacgtctccaggactatgcacgaacctatagtctcacgatggatcagttgagagaacagaaagaaaagtacaatgttgttactcatggcatcaagaccatggcgaaaaatgctggagaaaacgtgatgaaggctgtgccaggtggagctcctttggcaaccacaatgggagttgttgagaacgtgaatggagtggctccatcattgcgtcgctggttcttctatacatttggtcgtgcaaaggctatcgacgatgcacttgctgaggatgtgccagtgagcacacttgatgcaaaagttggtgcaactcgtaaggttacttcttgggaccctaacgaaatgtgtggacctataggctacggagaagaaggatacattggcgaaaccaagaacttcaactaccgcattctcttcgaaaataagaaggaagcatcagctcctgcttatcgcatccgtatcaccgacgtgctggatgaaaactttttcgacgttagtagcgtacgcttcggaaccaccagtcatgatggtgacaattacaactggaaggtgaaccgcaatggtaacatattgacatgggacatcgaaggaatcgaactaccacctaatgtcaatgctccaaagggcgaaggctttgttagcttctctgttgacttgaagccaggcttggctgatggcacgaaaatcaagaacaaggctaccatcatcttcgactacaacgaacctatagaaaccaacgagtacctgaatacgctcgacctcgtggctcctacttctcgtattcgtgacgtatctgtcaatggtaatgtgatgactgtcacagcacgaggaaaggatagtggctctggtgtaggtttataccgatactattattctacaaatggtcaagacttcatcctctacacggagagcaattctgaagaatttgagtttcctatcgaagcgggtaagaaagccgacgactataccttctacattgtagctgttgataatgtaggcaatgagcagctggttgaacctgaacactggaacgtactgactggcatagaaactatttcaacaacaggcaatagcgatggttggatggttactcgtcttgatggtcgtgtggtggcttctggcaagggcacaccattgctgaatctgccttcaggcatctacatcgttcgacaaggcaaccaagctcggaaggttgtagtgaaataagcagataaaattgtaatcaagtaagttcaaataatacctttctttaattattttctggcttcctctcttgctgtgatggcggagaggaagctgctttttggctttctatgatagatgcttatcccctcactgattattgatagaccgcttttttcttgcttatcatttgtttgcccttctgtccatttagcgggcaggcaagaatcagtaatgataaaaaaaacgcccacttgcaaggggtgcaagtgagcgggctataaaagcaaatgatgagtagttgggttgatatcagataatgtgttgttatccttttcgtagagaagagtgtcttagaaaccttatcttcttctggacctttttcttgtcgttgcttttcggctactgcttctgctacttgacttgacagtagtctttgactttgtgtttgcttgagcaatttcagcagtggtttgacgctgttctgcctccatgcgatgggtagtgcttgccactgcacgggatccaccataagcttgtcttgttgtgaagaagtcgctcacaatgtcttggtgttcaaagtcgaacatctgtgcagggttgatagctgtaccagccaagcgagtttcgaaatgaaggtgagaacctgttgaacgtcctgtgttgccaccgagaccgattggttcgcctgccttcacgatttggtcttcagaaacaatctgtttgctcaagtgaccatagagtgtttcaagaccgtttggatgacgaatcacgatgtattttccatatccacgtctgtcaccctcgtttttcactacacgcacttttccatcaaatgcagcataaatcgtatcaccgatatagactttcacgtcgatgcctgcatgttggcgtccccatcgaggaccgtagttggaagttactttacgacttgtagtaggcatagcgaaaccgcgaaggtcaatgcgcatgttggcaggagcgtaacctgaaacattccaaactccgccgttgtcccagtcggcatatatatcggctgcggggtttgcaaggttgacggttgataaagtactaccaattttcacattgtgaacatctttcattcgtcggtcggctggtgcctgtcttgctatgaggtcctgagcaattgagcttgaggccacaaaggagaacaagacaactccgagtgttcgtttgattgttgtaagtttcaaaataaaaggtgtttttgatataatgaataaaaataaacaattaaaatcttcctcttttaagttctggttttcggatgtttgtgtttagttagaaaaataaactcattcaagacaaaactttaacctctaaacctaaaacttgtcatcccttttttctttcagtaggtggatgtgtcggtaagctgaacaatttgttcgaagctttgctgtgtggatagtcttcgtttttggatgctggatagatgaggcatccacgaaaccaagacttatttagtattcgtcgttagcgtaaaggaactggaatggagcttggttgtagtcgaagatttcttctggcttgaagaaacggttcagttcgacaactgcattctcaggagagtcggaggtgtggatgatgttttcttggaaactcataccgaagtcaccgcggatggtgcctggagctgctttgcgcgcattcgttgaccccgtcatggcacgaactgtttctacagcatctactccttcatagcagcagcaaatcacaggtgcagccatcatggagtttttgatgcgctggaagaaaggctttgaagccaagtgagcataatgttgatcgagcagttcgtcggtgagttgcatcattttcatgcctgcaagtctgagtcccttacgctcaaaacgtgctgttacttgaccaacaattgcacgctgaactgcgcaaggttttaaaataacgagagttttctccattgattttttgggtcgttataatgttttcgttgcaaaaatacggaaaaatcttggtttttccaaagaaacgttgtgtgatttagtttttcttcacaattcgctgcgaaaaacatgacgtatcacaagaaatgttcatgttttttgtaaattcgtcatttctttgcaaagtcgagtttgcaatgtgtgctcgcaaacaatttgcaaaaaaggtgaaataaaacaagtttaattggtgtttatgttggcgttagttttttccattcggaaggaaagctaaagccaaaaccattatttctcatcaagaattgttttcacctcgttttccactttcgtgagtttttccttgcagaagttcacgagttctttggcttctttcagattgtcggtaagggagtcgatgtccatttctccactttctatttttgccacgatttcttcaaggcgctgcatggcttgcgtgtagttgagttttttgtccatcttatcagtttaaatctatttccttattaattagttttatgagtcgattgagatagaggtgatttcaccatctgtcagtgtggttttgagaaggtcgcctggcttcacctgcttggcactggtgacagcttctccgttgatgcgtgtgatactaaatccaagtcggagcagacgttttggattggcaccattgatttgcgtttctgctatgtcaagagaatgatgagccgtagtgagtagtttgtcggtggaaagtcggagtcgctgttcagaaatgtcgatacgagactgacgctgagtaagttgcgaacggatggcagtcacaactcgtgtcaactgttggagcatttttgcttcctccatcgtctttctcacgttgaaaagtgatggaatacgggacgccatgcgttccaaatgcgattgttcagtttggagtttgaagttgacgaattgaacgatggtgcttgccatttcctcaatgtggttgagttggttcaactggtgctgaataatgaattcggctgctgccgttggggttttcacacgtgtatgcgacacgaggtcgataacggtgtcgtccttctcatgcccaatacctgtaataataggaagaggaaactgagccacattttccgccaaaagaagagtgtcgaatcctgtgaggtcggcagctgctccaccgccacggataatcactacggcatcccatcgttccatctcgttggcaatggcattgagcgcgttgataatgctctgttccacttgcgttccttgcatcacagcagggaaaagttgagtttggaatgccaagccatgcgggttgttttgcaactggttgcagaagtcttggtagcccgccgctgtagcagctgaaatcactgcaatgcgctgcaggagtgtgggaagttcgatttccttgttcatctcatagacaccttcttcttgcagttgcttgatgatttcctgacgacgtttggcaatgtcgccgagggtgaaacgagggtctatgtcgatgatgttgagcgagtagccgtatgcttcatggaaagtgacttccacctccaccaacacttccatgcctgccgaaagccgctgtcctgtggtttgttcgaaatacggacgcatgatagcccatttgcttgcccaaatctgtccgcgtgccttggcgatgatactgttgttcttcttcgccttttgcacaaattccacaaagcagtgtcctcggttttccttcacttcgctcagttccgcttggagccaataagtctcgctgagattgatttcgagaacttttcgaacaaagttattgagttcgtatagagtgagatgttccatgtgagatgtttctaaaaggtcaaaggtcaaaagtcaaaggtcaaaagccaatgccaacgccaatgccaaattggctcagacctattgagtcgtatcatgcctggagtgtggctttttgatggtgaaagcgtttgtgaatgtccagcaagcaatagttgttagagatgtgttctaaagatagaatgtcatcttccacctccttgtaattaccacacatggttgtttcaacatatcccgtgtcgaagagcgcacgaatctctttcagtagttccttagctcggatttcaatcagttcaccaatcattattcctaaaagttcactgtcgaaaaattgtggattcggtaatttctctaaggcgaattggatgatttcgcgaaaccattcgatgacctcatcacgtcgcttaggttggaatttggcaatttgtatcaccgctgaaagtacttgggatttgcaatacgagtagattccttcttctttggcaaatgccatgagcttgtccagcttgtgctgccccagtttgtagatggttggaacgaagatgtcttctccactatcacaaatgtgatattcataaaaatctggtgactgtcgcagcacctccaataccacatccaggctgttgtcctcgttacccacttctgccaaaagcatcacgcagagtcctatcacgccgttaaaatcctctggctcattgtctggaagatggtcgcatgtcattcctgtgaaatagagaatgaggttctccaagtcacgtcgcaagctgtcatgtggtaatgccaagatgcggtctgtcagtttgtcatcgagggcaatggagttctttgggtcacatagttcaggcactatccactgattctccacattcagcacctgaggatattctgggtgctgataagagtattgagtttctatcagggtatatgaatcctcatcgtagtcgtcctcttcttcgtcaaaatcgtcaaattcatcaatcgacacatcgaagttgtcgcctaagtgcgctttcatggtaggcagataacgacttgcttcgagtttattcttagcaatcaggaaatgctttccattcctaccatattcgaactctatcaatggcacctcgtctgtatcctcttccagcatgtattgcgtcaaattgaaactcttgtcgggtttgataccagcctcctctgcaaaggctatggcgccataaatccagttgtgtgctacctcataactgcattcctcaatgttatatggaaccaaccggtctatcatttcctcaaattcatcctcatcaagtctgagtctataaaacgattttttcactcctaagcaataaatatccacaagatagaatgcagcacttattttgccactcttttgcaaacgactcaccaccacatgtccctcaccgcatatcgtaatgtcatttgatacaaagcatttgccgatttccaagcctctcgctttctctctcaagaatctctctggagataatggttgttgctcttgatgtttctttttcgatttcttcttagccataataaaacttgttttattgctcacaaaggtacggttttttccaacaatgaacaaaattttttatatcgttattaaacctatcacgtattcaaacattcatataagaacaactacctttttattaacacacatttaaactaacatgaagaagttttatttaggagcacttttcgtgcttgccatcgccacggttcatgcgcaaccaggtggcggaatgtttggtggaatgccaaaaatcgacgtgacatttaatgagtatgtagcagcaccagaaggtttcgacaaggaaactgcgggcatcgaacgtggtaccatcgtggagacggaatacccgtcgaagactgtgggcaccacacgcaaggtgacgatttatctgccacctaagtacgataaatcaaagaaatatccagtcctctacttgcttcacggcatcggtggtgaccacaaggaatggatgcagggagtgccaaacatcatcatggacaacctctatgccaaaggcaaggcaaaacccatgattatcgttatgccaaacggacgtgcactgcctaacgacaagcctgaaggcaacatctatggtcctgagatggtgaagggctttgagatttttgagcgtgacctcatcgacgacctcatcccattcattcaaggcaaatacagcacctacaccgaccaagcacaccgtgccatcgcaggtctttccatgggtggcggccagtccctcaactttggtcttggcaacctcgacaagtttgcgtacgtgggcggattctcctctgcgcctaacaccaagcagccagagcaacttattcccgacatggcagcgatgaagaaagccaacaaactcctctggatggtatgcggaagtaaggacggactcatgttcaatagctcacgcctcaaggcgttctgcgacaagaacgaaatcccttgtaccctcatccagtaccctgatggtcagcacgacttcgttgtctggaaatacggactctacaatttcgcacaactcatcttctaaatcacaacattcattatcatcacaaggctcacgaaccgacgtatcccgtctcgtgagccttgtttctttttttttgccatctctttctgaataagcctcccctcggggaggtttggagggggcttttgtttttccgactttttccttcgattttactgaaccgtccctttgatgatgcagaatcattcatttgattttactgaaccatttctttgattttactaaaatgtcgagccctcaacgaaattatagcgagccctcgttatcgcgacgccgagcgctcgccgtttcgataacgagccctcggcaactagttgaatccaaaggaacggttcagtatatccccaaatacgcttctgaaaatcccctaaatcacttcagtcaatccactaaagcgttgcatcaagagcatcaaaaaaaacgaatggagagaaaataatgagagaaactgatggacagtatttgaaaataatgtatatttgcagaaatgtatcgattatttataatgattgtcgtaaaactattcaatgatggattatagtattagggataagatggagtgggtgattgttttcatttgtgagttcggcaagaagcatggtttgacaatgaaacaagcattcaattatctaagtcgtttcaaaggaatcgatttcatcgatcgccattatgattatgtgcatacccagtctttttcttcaatggtagccgacataacagaatattgccataggaaaggaggagctttggtatgatactttatcatggcaccaatgtggagtttgatgtgattgacctaacgaaatcaaagcctaataaggattttggtcgtggcttttatctttctgacaattacgagcaagctttgaatatgacaaaaacaaaagtagagcagttcgaagtcggtttgcctattgtgatgaaatatgaggtggatgacaatgtgttccaaacatttcgagttcttcagtttaaggaatacactaaagaatgggctcaattcattttgcaaaatcgaaacaattcaactcaacagcaggttcacgactacgatataattattggtccgattgctaacgaccgtgttggagttcaactgtggagatacaacagccattctattgatttagatacacttgtgaagaatcttcgttacatgcatggtataacgattcaatattttttcggtacagaacgagcaattcaacaattgaaaagaatatgagtgaaaaagatttgatgatagctgatatggtgaaagaccttgcaattttgctaatggagcaaaatcatgaattgacgatggaacaatcacttgccactgtattcaattcggacacttatcagaaaatcttgaatgaaaagactacgttatattaccaatcacctcgttatgtcttttccttccttgataacgaactgaaaagcggaaggatgcaataagtgttgaaaacaaacaatactgaaaaaggttgttatcatcattatcttccttaaatagccacaagaacaaaaaaccctgcttctaaagatgcagggtttccacagttcccacgacaacgcaggctgttagacatcttcggcttatagccttattgagaaaagtctttctccaagaggtctttctttgttgcaaagatagagcattttctgattactaacaaataaaagaataaaaaatcttccacatgaaacataaatatataataggtatagaccctggtgttggttctttgggtatatcattgaggaatacagaaaggaatgctttattagaacaaatagaagttacgaacgtggatatagttcgttcgggtgtggttaagaatggtgaaggaaaatatgtttcttttgcagcagaacgtagaggctttcgtaacacacgtactttgtataggcatcgcaaaagaagaaagcaagaaacactgaaattgttgataaatgaagatgttgttcttgacgagaacattaagcatgtgttatgtcctctctcgaaagaagaacttgacaaatgggtacgatacgataataataaaggttacaaacgtgaatatccaaccgattccgttgaattttcccattggatgatgcttgattttaataatgatggcaaggttgatgattattcgagtccatttcaaatacgtaaggagttagtggagcgtcaattcgatttttcccaaaaagaagattgctacaagttaggacgtgcattatatcatatagctcaacgcagaggtttcaaaagcagcaagggtagcattaatgacagtgatgtgatttctttaggcgataatcaagatgacgactttgattcattggaatattctgagaagaaaaagtcgaaaacgcttactgcctatatgaatcaacttcaagaaaaaggtcatgagcgggtaactgtaggctttgcactggcttgtttggaaaatgatggcgttcgtttgagggatagtgaatatcaagctatacgaacgcaattgaaagaagaaatcaccaccattttcaagtttcaaaaacagttatccttgaattctactctctacaaacgtcttgtcagtgagaaaaagaatgatggaaccatcttttatcaatgccccatcaaatctcaaaagggaaatgtggaaagttgtacgttggaacctcgcaagaaaagatgtcaagtcagtcatcctgaatttgaaaagtatcgtgcgtggagctttattaacaatatcagaataaaacttcttgcagatagtgaaccacagatgctaccttatgagttacggatgaaattgtttgacaaaataacaggcacagtatcaaaaacgattgatttcataggtatccgtaaattgattgagaaagaagtgggggagcctctttccgcaaatgaaggaactatcaatttcaaagatgattattcattaagtggttgcccaacaattgggagactaagaaagattcttggtgacgattgggaaacaaagacaatagaaatcgagcagacacgccgaaggaacaagaaccaagaagtcaaagaccttcacactatttcttatggtgcaatagatttgtggcacatttgcacaacgatggaaaacgaaacggcaatgacggcttttttggagaagaaaatgccatttgatgaagagcagaacaaagaaatgatgcgattatacaagaatgtatccaatgattatgccaattattctgtgtatgctttgcaaaaaatcaatcgttttcttattagtggatgcaataactatgaagcaactttattagcgaaaataccagacatcatagggaaaacgcaatggaaacagtatggaaaggatatagagacggacatacaaaatctcattgctcagaatcgagaagaaaaaagatatttggcgatagcgaatcaattgatagcagattataagtctcaagatgaagatgatagagatcataattatgaataccaattgacggaattggattggcgcgatgtggaaaacaaaattaaggaatccattggtaaagtgacatggacgaatattcctacagaagaacagaacgccatcaagttgcgtgtgggagaactatatcagcaatttttcaaaagctataagcgggattattataaattgccgaatgataccgaaagaatccaaagctatttgtctgaaagaatctcactcaatttgcaaaaggttcagcaaatctatactccttcttctaacaagtattatccaccagcacatcgagtgaaaggtgttttccaattaggctcgcctgcaaagattgctcttcgcaatccttctgctatgcgtattttgtatttacttcgtcgtcgtatcaatgaattgatgacgagatatcgtgatatggagcctgataatacgcgcattgtagttgagttgccacgcgaattgaacgatgcaaatatgcgtcgtgctatagaattatatcaggagaggcggaaaaaggaaaacaacatattcaagaatatggtaggcgaagtcttagatgaaaaagaagaggagagagtggagaaaactcgtcttttgatagaacaagccccagaatatctaaatgctgattttgatgaaaggtatcaaaaacataaagaggtgaattcatataatcgcaattcgtataatgatacaatagaatatgctactacgaagtatcgtttatggttagaacaaggatgcattgacatatatacgggacacacaattcctttttctcatttgtttgatgccaacatgtatgatattgaacatacaattccacgtagtatagttttggaagatagccttgaaaacaagaccataaccagtgcttttttcaatcaaaaggtgaaaggtactttgcttccgtctcaactgccaaattataatgatgtgattgtaccgaatttgcaaccgtggaaagaacgagtggaacgacttgatgaacgagtgaggtattggcttagagaaacaaagcgtgcagccgactccgaccgcaagaactattgtattgtgcaaaggcacttatggcaaatggaacttaactattggagttctaaactcaacagatttttaatgacagaagtgaaaacagattttgttaacaagcaaatgtccgacactcgtgtcatttctaagtatgtgtatcattatctgaagagttgtttcagtagcgtggacgtgcaatatggttgtacaaacgctgttttcagaaagattttgggcattcaagctaaagatgaagagaaagacagaagtgttcatactcaccatgccattgatgcaactgtgctgacatttattccgtcttcttctaaacgctgtgaaatgatgagacttttcttccaaatagacgaggcaaagaaggctggcaacatcatggaagagaagcgactcaaaaagcaattggaagaagagaagaatctttgtttgtatggaagaactaacaagaaacattcagacaaaaaccttgcgaatttggtaagggacattcaagaaaccacatttgtcaaccattcagaaagagaccaggcgcttactcctgctaaaagaagaggcgtgtttagaaaaaatggaacaacctataatgttctgaaaacaggagattgtataagaggaaagttgcataaagaaaaattcttcggagccattacgcaatgggagaaagatgctgatggtcttgttgttagagatgctatgggacaacatgtcgtcgatacctctaacgtaaaatatgttattagagttaaactccaatacaaacaaggaagaggggaaggatttaagagttgggaggagttgaaagcaagaatgattgataaatctctttatcgcaaattagaagaacaacatcccaatgagactttcgtagaagcttgtaaaaatggattttttacaatgagaaagattcatggagagtttgtaaggaataggattcgtcatgtgcgttgtgaaatctctgacaaccaaggtcacatttcgataaaacaacatctcaatcgttcaaagaaagattacaaaagattttattatgctgctcctgcggatttgctatgtgcttgtgaatataggggggtaaaagagcagaagtatgagatgatgcgtttatttgacatttcgcaaaatagaaaggacggaaaggaagatataccaacatctttacaagggaaaaaggaaatcctccatcttgttcgtgttattcgaatgggggatatggtaatattgtataaagattctccaaatgagctggatggtttagataaaaagcaattatcaaaacgtttgtatagagttgatgggtttgaaaaatctggtagaattatattagtcaagcacgataaaaccaaagaagatggtaaaggaaagtcctgttctgatttcgaagacagaatctcacaaaacatcattcgaatgtcaattactaaagttaaatttgttcctctcataaatcacagataggcaattaaatacaaataaaaaaagcaagagaatccaaaaagggttctcttgcttttggcaaaaaaaataaaagtgtgatgcttgtaaatgcttgttacacaattctttttgatttttgccatgttaaagacctctttttgaaagcaattcccaactcaagtccagcaatacctgaacagtgtgcccatgttaaagacctctttttgaaagcaattcccaacgacaatcaaaatcttgagcagtttgctcgtcatgttaaagacctctttttgaaagcaattcccaaccaggttgttgttccattgtgcatgtgaaagcatgttaaagacctctttttgaaagcaattcccaacatatcggtgtgcgcgtaaaaactggcatcccatgttaaagacctctttttgaaagcaattcccaactcatgtgggagaacctcgtgagcgtctgcgcatgttaaagacctctttttgaaagcaattcccaacaagttggtaaacgataaagcagcaacctcacatgttaaagacctctttttgaaagcaattcccaacaatgtccggcgtggagcgtgctgactatgtcatgttaaagacctctttttgaaagcaattcccaacgtattacatcctcgacagcaaccagcgcaacatgttaaagaccttttattgaaagcaattgtaaattaacgacgcgattgatggctgcaaggatgtgctccaaccgctctctgtctctaagctgttttctcataaatcagttgtctgtcacgttcaacacttttgcgagcaaaaggggaaagggatggctcggttactaaatccacgttacggttcaagagttcctttaggtcttcgtacataccaaagaactttaagccgacgggctgagagtgatcgagcacgacgagaatgtccacatcgctgtcgggtgtttcttctccacgagcgaatgaaccaaagagccatgctttcaagacgggttgtgtcttgaagtagttggcgattatcgttttcattgcttgtgtattcattctcagacagttttttgggttgatgtggcaaagatataacaaatttcagaatatacctctttttcttccaaaaaagtgaagtggcatactattctctgtttatttcccgaagtcggggatgccgtagccaaagacgttgttggggtgttccacgttgttgccacgctggcgaatttcttccatgatttggtgggctgtcttggttgggttggcttgccaatagcatgctaccataccgcaaagaattggggaggcgaagctggttccgttggcgtgggtgatggtgccatccacgttcattacggtgcagtattcaccctgcgacatcacatcgggtttgatgcgtccatcggaagaattgcccaaggatgagaagagggtattgacacccgcaggggtgacagcacccactgtgagcacatcttctgcatcggcaggaacactgatgagtttccatgccttggaagcttcgttaccggcggagttgcaaagaatcatacccttgcttgccatcatggaagccgagttggaggaaatgtgctgatgtccgtccatttcccaatacttcacgttgtcttccttgcggtcgagaatcgaatagccaagcgaagtgttgaccacgtcggcgcctacgctgtcggcaaactcgatggctgctgcccagttgtcttcctccacgatttgttccgagccgccgtcttcgctgcgcagaagccagtaggatgcttcgggtgctgtgccgacaaagaggttgggcgaattggttgccatgcaggaaagcaccatcatgccatgtgattcgttttcatagacatttccacctggtgtgacaaaatctttcgttccgagaatgttcacatccttcagcattgggatgatgtcggcattgtaaaaacctccgtcgatgacggcgatggtcatgcctttgccacgatagcctttctcgtggagtggggcaccgttgatttgttcgatttgtcgatttgccaaaccatacacgttgtggatggagtcatactgagaataacgagtcgcaataggcatgggcgtgtagcgaggaacggagtcgttgacaatgcgtgaaaaacgattgatgccgctcttcatctctggcttcgtataaatagctacgcgcttggtgttggtcacaaacttgaaggctgcaatctggtcaatcagcgtggtgtcggttgtttgaaccagcacggtgttgttccacttactggtggaaagaatggtcacgcccgtagcttgaatatcgttcagatagacttggctcacaggcaagtcggttttattcacctttagcttctgcttgcggcgacgctcaatggatttctgagaaagaaacttttcgggatgcttcacggagaatgcagttcctttcttgtctttcaggcagatgcgatatttgtaaataggagtgaacgcttgttcttcctgtgcatgggttgatgcaaccgctgatagcacaagcaatgtggaaagaaaaaactttttcatataatagttggttttttgccctcgagggcatatttgaatgtttcgaaggatgtttcaagataagaaagttcgtaaggctctattttcagcgacaactgattttggatttcgttcagtccgaaataggcacgcaggatggcagccatgttgaacgacatgtcgtctcctttcttcagcacatatcgacacgtgcgcagcgccagttcccgatggtcgggtatgtgctggagggtgcgaaagatgtgataataggagaggggagtggtcgtctgaattagcacagccacttgttttctctcatcgtcgaaatggaagagttcaaacagtcccaacacctgctcttcgctgacgagttttggcacagccatactgatgattttctgaacttgggattcattgacgacggtcgctaattgctgcgctccctcgttgtggtaggagagcgttccgtcttttgacaaatgctcgatggcaaggatgccagagatgaaagcttgaggcttatatataataaggtggtagagtgcttcccagaaatcatcgtttttcagtcgtggaagcaccgattcacgcacatagctctcagtccgtcggaattgtgaattcgacagtgagttgagcaaatgtgggaggcggtcccattgcttttgctcaatggcttggctaaaagcccccctccagctcccccgagggggagggaaggtttgactttgtcgagctgaaggttctagtttcaaattaaaactaaaaattaaaaattaaaaaaaaatggcgttggcattagctttggcgttggctaaccatccggatggtttttctcctcccctcggggaggctgggagggggctttccattcttgattatcttgtcagagagaacttgacggagataccaaagtcggctgtggttgttgggtaagaagacgtggagacgagcggcacgttcttttgccagtccatataggcactcatggtgagcaggcgggagaaagtgtagtcggcagccattgccaacttgtaggcagtcgttcctgtcgttgctgtagtaatcatcgtttgaatgttgcggttcagggcgttctgcatacgataggagaagtcggcacgcaagttgaggtcgtggctcacggtgcgagctttgcttgatgtagtactgctcgtgttgctcgccttcgaatcgttctccttgctattcttgctgttcttgcctttcttgctttttttcttcttagccttgtctgggttctggatgttcttggcaccaaagatgttgatatcctttatcttgaaaccgaatcctacagtgatgtcgtcggagaagttttcggtgagcgataccgatgtcatggaaagattgagcacacgtgtcttcttgaattccatctttgcggtcagtccgttgttgaaggtcatatccactccgatgagtggtgagaattgctcgttgatgctcacggttgatacgttgtacatgctgcttggcacagggttacccgtggtgacatctttcacgaaaccgaggtcgcccatgtattccatccatgatttaaaggtgttgtaagaacccacggaatagacgctcttgtatgcatggttgatgttgaagctcttgaagcggtcggcaaaccaaggcagtttcgacaatccactataagttatcttccagtttggcaacatctttgacaatgcagggaagatggacagagcttgcttagatacgtcggaacctgtgtaggcagagaggaatgcaggaatcagcacatcggctgagtaaggttccacaccaccattctctttgttgtaaggttttccttccaatggacccgaacctgcaggataggtcgtttcagcatattttgcttccaagcgttcttgaacaagagaaatgttatctacaaacttgcggaacgtctcggaatagtagtcgttgttgatgtttccagaactcttgaatgcagtcttcgctgtgatagtcgtcatgttgaagctaccgctctgagagactggcatgccgctatacatgaattggatgctgcgagtcttgttctgggtgtgcgacgcattgaggtcaatcttcaagtcacgaactggttcgagtgccacacgcaactgaatgtcttccaaggctgcggtggtggcaggtgtggtgatggtggcgtcgttctgcatgagccaaccattccttgccgctttctcgatgtagctgttgccaatggcaccgaatgcaaagtcgagacctggcgataggataccgttcaaacgtttctgaccgaaggcatcgccaatttctgtggagaagcctggaagagtcatggcataagtgttacggtatgacaagctggcattgcgtatcatcatcaagccgcgtgcaatcacttgcgctggcttataccaacccttttcctccagctttggtttcgctgtgacaaacacttccaccgtcgtggagtcgtgattcttaatcttgatggtattggcatctaccttcttgtatttcaagtcgtaggtcttgccttcctttgtcttggcacgaaccacaattcgcttggagttctgtccgtgtttcagttccacgtcggcagaatcgttcagaaccacttccttcgtaaatcccttgttcttcttttcgtcagccttggcattcttggcgtttttagcatccttcgagtctttagcgtccttagcatctttagcatccttgctgtcctttgcattcttcgcatttttggaagtggtgctattggtctttgctttgttagagcgtgaattgcccgagaagcgcttattggcttcgtccaagaatttcgatttcttataaagggtttcaaaattgattttgccgttcacactgatgtttcgtgtgctgacagcggtgtgaccaagcgactttccgttttccagttctgttcctcgtgtccatccgtatgtggagttgtaggaaccatcagcactgagccagtcgagagcaggaatcttgttgagtggcacttggtagctggcgctaaatttagagtcataagtcaaaggacgacccaacctcattaagctatgacgcacagagtctttccatgctgagtattcatcaggatagaggtccttgttaatcaccacgtatggctcttcaatctctgcatgagtagcggaggtgtaagtgagtttcaaggctttgaagatatcccatcggatggagaggtcacggttccaaaggaactgctcggagaaggtgactggcaacttagaaccagcatcgatgtcgcgctcttgcagttcgtggtaagtgcgcatgaggtccgtattgaacgagaagctctgaggcagatagttgaggttctgcgccttgatgatgtcgagccatttcgactttcctttcatcttcttgaaaggttcccaagtcttgtattttggagaatagttgtaggagaagtttcctttccagttctcatcattgtcataaacgacggtctctccttccttgtagcgcttgctgtgggagtagctcaaggagaagttcgcagggtcgaatggcattggtttgcgactctggtagttcgatttccagttggagagcgagaagttcttgttcttcgtcagcgtttctgtaatggatctgagggagtcgcgggcactaccttccaattcatcaagtgcatccttcagaagcatatctgtgtcgaaaggattgtacttaggcgagattctctgataactgtaggaatagtagagcggcaattgcatcttccacttcactgggaacagttttcctaactcgaagtttgtagtgatactccattcatattgattcttgtcgctacgttgggaaacaccttgctcgagtccaccaaatcctgccgtttccatgtgaccagagacgttcacactacccaggtcggacagttgcacattcatgttgccttgtgcagcccatccgccttcgttgttgtaaccctgcatacgaagctcgttcacccacacttctacggagttggtgcgacgtccgttgtttctcacaccaatcatcaccgtcttgatttcgcccagcgatggattacccatcacgctaatcttgttgtttggacggctttcgtcgtacatggagaagagcttggtgtagcttgcttcgccactcaaacgtgccttgttgcgttcatgcttgatgtcggtcagagtctcgaagtcgatatcaatcatgttctcaacaggccaaacagcctcacagccttgagttgtgtaggtgtcgtatctaccttctggcgtgatcttcagtggcacttcatattcgtagtaattgctcttgttatcagaacccaaacggaggaatgcgctcatctggaaatcttccagactcttatcgctttcgagagcattggcgtggatgaacatttgcaaatgcttgtacttgcggaggtcgagattcatggtcttatacacaccacgtgcatcccccgaagagaggttctcgacgataatggagagggcttgctcgttttcctgagtgatttgcgactggcttgggtctgtcacacgactgatgcctggaggcaacacgtagttgacaggagtcttgtcgttgttttcctcaatattcacagcagctgtgtggactgttcccgacacacttggcttctctcctgtgaagagtggctgagtgtagttgcgccattcactacgcacgaggtcgaggctggcaaagcgcatgatgattggctgctcgaaattcgtgagatacatacgcatgaagcggatgctcgagaagtcgttgatggaaccctccttcttttcgtatccatccacaggaatgcggaactgataccaagtcgcctcttccgtcttgtcgttacgcagtttcacattggtcttgcgtgagtcaacgatgaagttctgacccaccacgaggtcttctggacgaatagatactttgtattggaagaagttctcatattcgttcatggtgtagtcttggtttacgtcttccacatcaggagtggtcttataagcagtggaatagctttcgccactttcgctggagtttggagagttgccttccacaccgttgatgcgcttataacgatccaaaatggatgtttctttggcatcgtagtcagaaccacggaaatagtggtagtcgtcgccagcagggtcgttatagagggagtcgtaaacgtcctggtccactttacctttaagggcagcaagatagtcggaatagatgccatagttgcgttcatcagcatctgccaaaccgttgagacctatatcttgcttctggcgagcaccgctttctgtggagaaggaataaaccacactcttcgcatttggcacgcgtccccaagtggtctcataatagttggtgccattcacaggcataccactctcgtagaatttcttaccatccttcaagatgtcttcgctcacatcgccgaggttgatgtagaaatcaccaccatagttgccggctttgtcgcgagtgtagatgaatgggtcgagcaaccagaattcgatgtattgcacgttggctgtctcaaaatcgctggtatcgagtttccgcatcataccaccccaacgcttcgatgggttgttgaggcgtccgcgattatccacatcggtgtcgaggttataaggaccacgctcgtttggatagtaagcaaggttgaggacaggcagcgtgttgctttctccctggttcacatctttgtttggatatacttcacgaacaaacacctctctcacatagtggttggagagctggtcgaggtcgcccttgatgtgtcctggggtaagcgacgaactacggcgagtgaagagagggtcgatattgtaccaagcaaggagagaacggttgtagccgtacatcttatcgttgctgaggttgccatattgcaagttggatggagtggaggcgagagtccacgactgaggactgctcacgtcgatgccgctcttggtggattcgaagtcgtcaatgtatgatgcattgccttgcacacctttggcttcgcctgcaatgagttgtgccacctcggctgagagggaaatgctcgaaggctggctcacatcgataagcggaatcttgtcgagcatattggtgagccattgcgactgctgtttccagttgaggttcaatccccaaatcatgttgttcagaggttcgttacccatacccaccttcgtggtgagtgccttttccttgagtttcatgaacgtaccgcccaactggaagttcttcgtgaagtcgtaagtccagttcacaccaatcatcgtctttcgcatggtgctgtattccgatgtgctttccacgctcgccctgatgtcggtgttggcatcgaggatgctctggttgagaatcgtcactttaccgagcgtgtagtccacctcgtagtcagtgccttcggtgagggtgacaccacctgcagtgacaaccaccgaaccttgtggaatgttcatcgaaccgaggtctatttcgcttccgctcgaacctttgtattctcccaccaaggagaatttattcttttccgatatttgttttgccacgaccttggtcgagtcatacagtgcatcgtagcaatacttgtcggcaatggcatcattaccaatcttttgtcgtaaccagtcgccgaatggttccacaactgggaagatgatgcgcccctgactcggttgaaccgtatagttttcgatatagtcgaacttaccgtttggatttgtcttgttgttgtcgtccaagcggtctaagttcatcattttcagcagggttgtctgtttccaaggctcttcaggcagatagttgaggttcacacctgtggtgtcgctcagatatttcacgtcgagcttgaatttttctttctgcatggactgtgccctgagtgaatacacgttcttcatcatcaggtcccagtttcccatctttggcgagttgttcgtgtttttcaacagtttcacgaacaatgccttgtcggcatccttcacgtcggctgagaactcacccacctgataggttgttccatttgctgtgtattcaaaggcgatggcaagcacttggttaggctgcatggtgctcttcagcgacacgtagcccaagtggctgttgagtgtatattctgaagaactgagcagacgtgcattttcaatcttttcgtaatccacgccacccttcatgatgccatcgagcacggtgcttgtctggtcgatgacacgtgcttccacatagtcggtgagaaggtagttgtagaggtcgttggctctgttttgtggcagtttcgagcccgaacttctccattgcttgttactgatttttgtgccttcagcaaggtcaacaagaccaatgatgtttcttgtgttttcaacgtgtcccgatgtgtttgtcacccagatttccacacggttgatggtcacaccgctcgtgatggttggcagtgtagaacatgctttgtcataattgtcgcggaaatactgagctaagaagaaatggcgg

SEQ ID NO: 2010 - DNA, 18031 bp, synthetic construct
  misc_feature 1..18031: note = Synthetic
  source 1..18031: mol_type = other DNA
atggcagctacattagggctctcagcccagaagccgatgaaagcccccaagggcggaatggctattagtgacgaactgattggcatcttctttgaggacatcagcagctcagcagatggcggtctctatgccgaactggttcagaacggttccttcgaatacagccctagcgaccgtgacggttggggagccggtacatcctggaagcagattcgcccaggtcactctttgggaaccctggaggtttgcaagacgaacggcatccaccctaacaatcccacttatatgcgtctccatatcgaacgcgtaaaggaatattacgactacaatggctggaaaggctttggtatcgagaacgagggtttcaaaggaatctccgtcaagcgtggtgccaagtacgacttctctgtattcctccgcaacacgggtgcagccaaaacggttcgcgtcgtgttaggcattccccagggatggggcaaggatcccaaggtgctggcagaagcaaccatcaacgtggacagcaaggactggaagaaatacaatgccgtactggaagccagcgaagattgcacaaatgccatcctgcagattctggtgcttaacacgggtgtgctggatgttgacatggtatcattgatgcctcaagacacctataagggacatggtctccgcaaggacctggcacaggctttggcagacttgcagcctaagttcatgcgcttccctggcggttgcgtggtgcatggtggtggcgacggattctggaacacctatcgctggaagactaccgttggtcctaaggagaaacgtcgtggactgaagaacacatggggctatcatcagtctatgggattaggatattatgagtacttccagttctgtgaggacttgaacatggagcctgtgcccatcctgccttgtggtgtttcatgtcaaggtaccaatggaggctggggcatgaaagaccaggctcaagacgttgttcctatgtcggaaatggacgagtgggtacaagatgccttagacctgattgaatgggctaacggcgatgctaccactaagtggggacgtgtccgtgcagaggctggtcatcccaagcccttcggactgaagtatctgggtattggcaacgaggagcgcatctcaccggagttctgcgagcgcttccgctatatgtacaagaaaatcatggagaaatatcccaatatcgtcatcgtgggaacagcaggtcccggttctcaccctggcaatcctgatttggacaacggctggaagttggctgaggagctgggtatgcctatcattgacgagcactactacgagcccaacacttatttcctgaacagtcgccagtatgacaaatatccccgcaaccgcaagaccaaggtttatctgggtgagtatgccgccaaggacaagaagctgattgacgcactggcagaaggtctttacctgctgcatgtagagcgcaatgctgatattgtatgcatgacatcctatgctcctctcttcgccaagaaggatgccaccaactggaatcctgacttgatctatttcgacaacgagcgtccttacctgacctgcagctattatgtacagcagctgttcggacagtcgagtggtcagtatttctacggcaactgcgtaaaattcgaggacgacaaggccggtgtggtacagcctttggaaaatgttcactacggtcagagcgttatcctcaacgtgaagacacgcaagctctttgtcaagatggtgaatgccacagacgaagagaaggaagtggacatcgacctgagccgtttccccatcaagaagactgctgtgaagaccgtgctttgcggaaaggctgacgatgagaacaactacgaggctcagcctattgttccgaagaaggagaccatcaaggctaaaaagaagttcgacatggacttaaagccctactcgatggtgatgctcgaataccagttataagatttacataaccatcatttttaagactgacgacattttccgtgttcgtcagtcttatttttatatatacaaaagctatgaagaaactcatcatgatattaagccttgcaatgctgaccatgtcggcacaggcaggcaagccatgggataatggcaagttgaaggtttcggataaccagcgttatctgcagtttgaaaacggacagcctttcttctggttgggcgaaacgggatggctgttgcctgaacgtcttgaccgtgctgaagcagagtggtatctgcaaagctgtgcgaaggctggctataatgtcgtgcaggtgcaaaccattgacggcgtgcctgcctataacatctacggacagatgtcgaacattgatggatggaacttcaagaacatcaaccagaaaggtgtctatggctattgggaccacatggactatatcatcgaccaggctgctgacaagggtatctatatcggtatggtatgcatctggggtggactggtcaaggcgggtctgctgagtgtggaggatgccaagaaatatggcaccttcctcgctaaccgctacaagaacaagcccaacatcatttggtttatgggtggtgacatccaaggcgacatcaagcctgaggtatgggaggcactggccaccaccattaagtcgatagacaagaaccacctgatgacctatcatccccgtggacgctacacctctgccaaatggtgggcaaaagcaccctggatggactttcacaccttccagagcggacaccgccgctacggacagcgcatgggcaatgccgactatcccattcccgacaataccgaggaggataactggatgtatgtcgattccacctggaagtacaaccccatcaagcccgtattggatgcagagcctagttacgaggatatccccgttggtctccacgaccccaacgaggcccgttggcaggactatgatgtacgccgctatgcatactggagcgtctttgcaggctcatgcggacacacctacggccataatgccatcatgcagatgctaaagccgggctatcccaccagctatggtgatgccggcgatgtgaaggcgtggtatcagggactgaaagatccgggcttcaaccagatgcagtacctgaagcgtctgatgttgtcattcccctattttgagcgtattgccgaccagagcattattcaggacaatggtgagaaatacaaccgtctgattgccacacggggcaacgactacctattggtttacaactacaacggcaacaccatgaaacttgacctgacgaaaatcagcggtgcgaagaagaatgtctggtggatgacggcagcaacaggccagttgaaatacttaggtgagtttgacaacaaagttctcaccttccgctatcatccgcagtctgcccgtgtggaggatggtgtactcatcgctatcgacaacacaaaagactatctgaagaaagaccagacggaactatctcccgacggttataaatccaaagaacgagacttaaacgagtaaaagcatgaagagagtcctctttatattgttggcgatattgcccttgacgtgtatcgccaagaaaaaggttgtgaagcctgatgtcagcatcagctggctacgcgtggagaatctggagaagcctatgggcattgatacagacaaacctcgcttctcatggataattctgtccgacaagcaaaatgtcaaacagacggcctaccagattattgtatccacagacatgggagaagtatggaactctggtcgtgtggagagtgaccagcagttatgggtaccctacggtggcgaaaaactaaaaagtgctacacaatgctcctggaaggttaaggtatggaccactgccggtgagactgcatggagcgaagaagagtgtttcggcatcggactgttgaaagagaaccattggacaggtcgctggataggactggaacgactgatgcctgatgagcagcgtggcttacatagcagactggctgcacgctatgtccgcaaggagtttgaattggaaaaacccgtcaaacgagccattgcctatgtggctggcatcggactgcacgaactgcatgtcaatggagtcatctacaaccgtgaggtgctcgtccccatgcctactgactaccgcaagacagtactttataacacctacgacatcaccgaggctctcaaggaaaagaatgccatcggtcttgtgttgggcaatggtcgggtgttccccatgcgccagaacaagccgtataaagcacctgttttcggattgccaaaatgccgcattaatatcctcatcgagttcacggatggtacaaccaagcgtatctcgaccgacgaaaaatggaagattactgccaacggtcccatccgttcgaacaacgaatatgatggtgagatatatgatgcccgcaaggagatggaaggttgggacatgccaaacttcgatgacaaagcatggctgaatgccgagcgcacagagattcctcttgggaccctgcgagcccagatggctccgggcatgagcatggaacccctgacaatcacgcctacctgcaaagataacatctacgacttccaccagaacatggctggatggatagcctttacaccattaggaaatcctggtgacaccattcgcgtaaaatatgcggagaaactgaatgccgacgggacactctacctcgacaatttccgcgatgcccaatctgaggacatctatatctgcggacaatcgtcaaacgataaattgtcaaattgtaaatcgtcaaattgtaaattaccttggcatcccatcttcagctatcatggtttccggtatgcacagattaccggaccagtcaaagatgttcatgcctacaccgtcagcgatgacatgcaaaccatcgggcacttcgaatgtgctgatgccactttgaaccaagtgatgaagaatgcctggtggggcatttactctaattataaaggaatgcctgttgactgtcctcagcgcaatgaacgacagccttggttgggcgacaggacaatgggaagtctgggtgaaagctttgtattcaataacgaaagactatacaccaaatggatgcgtgacatctgtgagtcacagcgtgaagacggagtgttctctgatgttgctcccgccttttggaactactacaacgatgacgtcacctggcctgctgccttacccttcagctgcgatatgctttggcgacagtttggcaaccgtgaggctattgacaagtcgtatttctacatcaagcgctggttgcagcacctgatggatgaatacctggaggatggcatcatcaccaaagaccagtatggcgactggtgtgtaccccctgagagcctggaacttatccactcccaggatcctgcccgcaagacggacggagcactcatctctacagcctatgtcatccgcaccatgcagctgttggagcaatggggttgtgaggcagaatattggaagccgttgcgccaaaagatgacggacgccttcaaccgcaagttcctgaccgtaaaagaaggcaccagtcttgctcccggtcataccttgtatccagactctatcttctatggcaataataccgcgaccgccaacctgttagcgctctcgtttggcatcgtgccggaaaaatatcgtcaggaggtgaccaagaatgtggtggagaatatcatcctgaagaataatgcccatgtgccttgtggcgtcatcggcatctcatggctattgcgaggactcagcgacaatgggttcagcgacgtggcctatatgatagccacccagcatagctatccctcatggggctatatggcagagaacggtgctaccaccatttgggaactgtggaatggtgacaaggcgtctccccgcatgaactccggcaatcatgtcatgttgttgggcgacttggtcacctggtgctaccaatacctcggtggcatccgtcagacgggcaatgcctataagcacatcgtgctccgtcccgacttcaccatccaggactgtccttgggctaatgtcaagtacgacagtccctacggaacgattaccagtaattggaaaaagactttgcaaaatgtggaatgggatgtacagattccgtgcaacaccacagcggacatctgtctgcccgacggcaccgtcaagactgttggctcaggcaaatactacttctcgtgtgacattccgacagcctcgccagccattacgaaggatcagttcctctatgagcaagccaccttcccccagtgtcatgctgccaccatcgtagagacaaagaaaggtgacctcgtagccacctactttggaggcaagcacgagcgcaaccccgacgtctgcatctgggtgagcatcaagaagaaaggcaccaacgaatggagtaagcccatccttgctgccgacggtgtcttcaccttaggcacgaagaatgccgaaattgcaggcatcaccgctgagagcaccccagcttccgaaggtcctgtacacaaaggcaccgcctcagctaaccaaagacgaaaagcctgctggaatcccgttatcacggagatgcccaacggcgagctgtggctcttcttcaaagtgggtctgaaggtgtccgattggacaggctggctctgcaagtcgaaagacggaggaaagacctggagcgacaaggaaccattgcccaaaggattcctcggacctatcaagaacaagcccgaaatcattgatggccgcctgctctgtccctccagcacggaggataatggttggaagttccacatggagatttacgacatcgccaaaaaggaatggaaatatgtaggccctgtcaaggcagaactcgccatgcgtacggaggacatgaaagccgccgttgccaagagcgacaaggaggacatcgaggctcccgatgccggaggcgtagccacaaaagacggtcgtcatcccatcgactgcatacagccttctatcttgaaactgaaggacggacgtctgcaagtgctcatgcgtacccgtaacggcaagattggcacatccttctccagcgacaacggtgacacctggactaacgtgacactcctggatgttcccaacaaccagtcgggcactgatgccgtaacgatgcaggacggtcgtcatgtgctcatctacaacgacttcgcctcgctgccaggcaccaagaagggtgtccgcacgcccctctccattgccgtcagcgacgacggcatccactggcgccatgccctgacactcgaggactcgcccatcagccagtactcctaccccagcatcattcaaggcaaggacggcaaactgcatgccgtttatacttggcggcgattgcgtgttgcatacaaagaaatcgatcctgctcagctaccatagctgagcagtttttttattctacagcttgtcattaacatctattccttatgccgccaaattgtcttatgacttttcctaaaaaagtagtcactctccacaacccctgtttttatcaaaaatgagtaaaaaaatggggaaattcttgtaaatgtcgagaaaattttatatctttgccacatattaccataaagcccacgcttatgacgcacgcaggacataaggcttataagaaagtgatcaaaggaccgtccctgtgatccatcagtgcgcgagaatttggagggcctcccgcaggaccgcctatgaaatctaccatattacctcagttttgtgaaggcaaatatacgcataaaagctgataaagccatgcgtcttgaacctttttcgctgaaaatcacagatattttagcactttttcatattttctctgctcttatacgatgatatacctctaccacctcacaggttgcaaatggtttaaagaagataacatgctcttcgccgaggtccagcatatggcctagctctgctgcaagagctacgctcgcaaaatttaggagaaatggaaggactaatcccaatccctatctatatcaaagcctctattacaatttaatatactatgcgaatatctttaaaacctttaaaataccaccatgaattaaaatagcaacgattccatttcctcatgcgttcccaaggatgagtaaggcatcgtatatccaccttttgtttacgaattccacatggttcactttgacaatattttcttaatggacaattaaacgttccgttagaaagaaacacttgatgtatttgcatcattgcatatacattaataagttccctctttgatacatacacactgtgtggacggatgaaatcgaaattatgtgcattatttgttactattggagtcccaaattccttaataaggttcaagaaagtcttattatttgtgatgtcacctccttctgctaacttatggaacaaaaacggattttgtagtttcaatatagcaccttttttaatgattgtttgaaaccacttgttaatattctgccaaaaccaaactccacctaagtattctgatataacatctttcgctgcatctgcaaatttttcatggctttcttcgtaatcacagattccaactggcaaaaccatagatgtattatgcaaatcctcataaataacatctggcgttaaagtattagcattaaatccgtttttggcttttaattccaagtaatcaacgaaatcacatccaggattacttctttgaagggcaaaaacaaagagtgcaatcatggtttggggattgactgacaaaccaggaataatcatatctgccacatctttggcaatataatatggattataaggagaacgtcgaacaggagtgggatatacctcttcttgtattaattttgccatcccttccatcatttgtaaagtacctaatagaatatctgtttcgtgcatctttctatcaatacactttacaacgacacctttcacaggaataactttaccgttattgtagtcagttaatgatgctatctgtattttcttaaatgcaattgccttttcagcagaaatatttgttcccattgtatacatccttgcaagccaatttttgtcaacattgtttcccatgctcaatggactaattggaacatgaatatatttactctgttgttgttctattatttttgtaacatagcgaatatactctcctctgataaatatgttgtttaacccttggattgtggtaatatcttgcaggaagtgaatgtactcatgcaaaaatgtgctcttttgttgttgttcccaatgttccatttcatccaatttaccttttccaattgtatgcatgtgaaatattgctggttcatagaatcctaatgtagtattatatcgttctaacatagttaatacattgataattttacaatgcaaagatataaataaaaccagagagttcataataacatttgcttatttatggttttttaaataaaaatattgaattggttgaattattatttgtatttttgcaaacaaaatcatttgtatcatggatattaaagcacgtatagaagaagtgatagcccaaaggggattgacaaagagagaagtttctgaacggatgggaaagtttaatcaggctttcaactctcttatcaccaatccaaaatgggataccatcgaattggttgctgaagcaataggcattacgattgaggagcttttatttgaccaatctcgtataggttcaaatagcacaatttctctaactaatgaggaagacatgttaattcatcccgatcagtgtcattcgcaaactataggcttgttattatgcccatattgtgggaagggtattagattgagtatagaaaaacaaacaatatttaacaaatcgtgaggttattaattcaagaaactaacaaaattaaaaaagaccctgttcaaaacagggtctctgcaggcccgcgaaacgcggctgcaagaactcttcggcttatagccttattgagaaaagtctttctcataaaagtctttgcgatgcaaagataatgtttttctgtgaaacaagcaaatttaataaagaaattctgaactgatggagcaaaaatatgtattgggcgttgacccaggaacaggttcattgggcttggtggttagagacactgagactgaggaactgatggaacaggtaaagtatgcctccgttgacattgtccgttctggcgtgatagagagtggtcagaataaatacacctcctttgcggcagaacgtcgtggttacaggaatgcccgtactcgatacctgcacagaaaatggcgtaagcaagaaacgttgaaattgctgatagatgaaaaaatcatagaaggccctatcaaacacctgctctgtccactaagccctgaggacttggaacgctgggtgcgctatgacaaggcgaagggtttgaagcgcgaatatcctgttgatgcggtagcctttgcccattggctgatgatggattttgacggcgacggcaaggtggatggttacaccagtccctatcaaatcagaaaggaactgctggagcgtcagttcgatttctctaatcctgaagactgttacaaactggggcgtgccctgtatcacatagtccagaagcgaggttttagaagcagtaaaggcgacaccatcaacgatgcagaattgccagcagaagatattcctcaggatgaagatttcgatgctatggaatattctgagcagaagaaatcgaaaaagctcacggaatatatggtcgaaaagggaatacaagacaagtctgtgggctatgctctggctatgttggaagacgaaggcatccgtctgcgtgacagcgagtatcaggtagttcgaaagcagttgaaagacgaggtgaaagctatctttgattaccaaaaacagctatctacagactcctatctctacaagcgactcgtcagcgaaaagaaaggcgaaggcaccatcttctaccagcagcccctccgttcgcagcgaggcaaagtggaacggtgttcgctggaacctatgaggaaacgctgcaaggccagtcatcctgagtttgagaaatatcgagcctggagtcttatcaataatatcaaaatcagactgccagaggatggcgagttacatacgctgccttttgaactgcgccaacggctctacgacgagaaaatttcaaagattgtttccaagacgttcgatttcgcctccatacgccgatggatagaaaaggaataccatctcaacaacagcctttccgccaaagccaaaactatcaactactacgacgatcattctgtggcaggttgtccaaccattggaagactgcaaaagatactgggcgacgactgggaatcgtggacgaaggaaagcgaccagattaggcagaagaaaaacggcacagagcaccacgtaaagtacaatgccctaacgctgtggcatgtatgcacagaggctgagaacgaaacctttgttgagaattttgccaagaacaaactgcagttcgtgcatttcaacgaggaacaaatcaaggaactggtacgcctccataagaatgcctctgacgagtatgccaacctgtcgttgagtgccttgcataaaatcaaccgtttcttgctacgagggttcaacaactacgaagccacgctactggctaatctcccatcgctgatagccgcaaaactttggcaagagcatagtgatgagattgaggcccatctgcaggatatcatcgatagcaacagagagcagaaacgcctgttgaacattgccaacaaactgatagccgactacaactcgctggatgaaaaagagcaatgtgcagacagaacgtataaactggacgatagcgacttccgagatataaagaaggccattacagagtctataggaaaggtaagctgggagcgaaagtcacaagacgaaaaagattccatcacccaacaggtagcagcgctttatcagcaattctttgccagcgaaaagcgtacctactacaagatgcctacggatatggagcgcattcgcgaatatcttaaagtggcctttgaaatagaactgggtgctgacaatcaactctacacgccctacgacaaccgatattatccacaggccacacagacaaaggacggaagcttccagttgtgttcgcccgttaagggcgctctgcacaatcctgcagctatgcgaatactccacctgataaagcgcagaatcaacgccttgttgaaagacaaacagttgggtatcacggcggagaatacacgtgtggtggtggagttgcctcgcgaggtgaacgatgccaatatgcgcagagccattgatatctatcagaacagacgaaagaaggagaacgacatcttcagagctctcattaaggaggcttgcgacgatgaggatgaacgcctgcaaaagactcgcttgctgatagagcaatgcccagactatgtattggcggacttcaatgagaaattgcagaagaataaggcctacaacgagaagatagaatatgctgcaaccaagtataaaaattggttgatcgatgaatgtatcgacctttatacaggtaatcccattcctttcgccagccttttcgacaatgattcgtacgacatcgagcacaccatcccacgcagcatcgtactgtcagacggtcttgagaacaaaaccattacttctgcctcgtttaatcgtaaagtaaaaggcaatctgttgccatcgcagttgaccaactatcagactgttatcatgcccaacctgcaaccttggaaagatcgtgtagagcgacttgaaggacgtgtgaaatactggttaaaggaaaccaagcgtgccttcgacgaagaccgcaaaaactattgcattgttcagcgccacctgtggcagatggaactcgactactggagttctaagcttgagcgattcctgataacagaggtcactacaagttttgttagcaagcagatgagtgatacgcgtgttatctcaaaatatgtattccactacctgaagagtttcttcactcgtgtggatttgcaatacggcagtaccacagccaccttcagaaagatatacggactgccagagaaagacagaagtaatcatacccatcacgccatcgatgctgcgatgctggcgttcatcccctcatcagcccatcgcgatgcgatgttgcgcttgttctatcagattgaagaagaaaagaaagcagggcatgccagcgaggtaaacagactcaaagaaaaactggagcaagaaaagaaactggccctttatggcagcaaatacgctaaggccaagggtgcaggaatgattaacatcgtaaaccagctgaaggacaccatgatggtgaaccacgtggttaaggaccagacgctgacacctgccagaaaacgtagcagtattaagaagaatggtgagcgcattaaaatcgtgaagacgggtgactgcattcgcggacagatacacaaggagtcgttctttggtgccatcaaaccctggactacagacaaagaaggtaacttccttagagacgagctggggctgccatacgctaccaaaatcaagtacgttaaaagatgcaagttgcaatataagcagaagaaaggccgaggcgaaggctttacagactgggaagacttggagagacgcattatagacaaggctctcttcaatcaactgaaagagcaggccaaaggattgtcgttcaaagatgcatgtgccaaaggttttaccgtagaaaggaaagtggatggtcgtatcgtagagaataaaattcgtcatgtgcgctgcgagattcccagcaacctgtcgcacttccccacgaagaaacacgtctttgtgtctgataaggactacaagcaatattactatgccgaatcagccgatttgcaatactgctgcgagtatcagggaagcaacgagacggcctataagtcctacactctttatgacctctccatgagaatgaaagctgggaaagaacctttcccaaaaacaattccaggcaagcgcgaaatgctgcacctttcgagagtgctgaccaagggcgaaatgatattgctatataaagagtctgaggatgagttgaagtcgttggataaagcgcagttggccaaacgcctatatagaataactggttttgagaagcgcaaggaaagaacagataccattaagctttctaagcataattatagtgctgctaaggatgaagggaaaggaaaatcgcttgatgatttcgaaaagttgatacagttgaacaagattcagttggccgtcaacaaggtacactttgttcaagtgaaagcataataaaaggagaagaaaactctcgtgatgagggttctcttctccttatctcacaaacatttctcctttctgttattggtcgtatccattgtatggcaggaagatatacacaatctgttgtttgtaatatctcaaagacttttatttgaaagcaattcccaactacggtttactattgcgaaatcctgtcatgttgtttgtaatatctcaaagacttttatttgaaagcaattcccaaccctgctcaacaagcaaatcagccacgaatagttgtttgtaatatctcaaagacttttatttgaaagcaattcccaacagttgagcgagcgagaccagtagttgccggttgtttgtaatatctcaaagacctttatttgaaagcaactcccaactcgcggagaagacaatcatcagtacgtcgagttgtttgtaatatctcaaagacttttatttgaaagcaattcccaaacgacctccgcgagcgctacctactaaggaacaagtttcaatgcagaatcaatgtaagtacaacacaataattcaaagagctctattcaaaacaataccactgttggatatttattctactgacaaaaaacaaatttgtgtcatgactattttgaaatatgttgcaaatatacttatttttgacgatatagaaaagaaaaaagaaaaaaagtgatatatcccagatgtttttcttcgtttttcagggaaaatatgcaagattatttgtacctttgcaaagtagttgcatcaagagtggcacaatgcccaccaaccggcctttggcgcttcgcttgtcgaagaaccagttcaaagaacagaatcgttggcagcggtggtaaaaggatgcgagtgaatgtttaatccactaaaaataaacggttatggaaatcaagaagattgagaagagtgactttgtgatgttcccacgtatgcagcatcgtgggctggagtttagacatgtagagcgcgatgcgttcaaggcagaactgcgccatgtggagggacatggtgactactggctgattcaccagcaatcgaagccacatgttgtggtccacgtccaattacccaagacggaggcagagtttgataacatccttggctggtgtttgggacaaaaccattggtgcgagtacattgagggtgatctatcgttcctctgcgtcattgcaggctttaatgccgccgaactcccccccaagtaccccgacttcatcagtgagcgcgtctatgccctcagtgatgccactcgctggtggtatgagtatggaaaagagtgttgtcatgcaactccattgcccttgcaataaaaagcctcctgagtcatcttcctgtcagtcttcttgctgcacttagaacagccgcaacccgcaaggtggcttgcaggctcttgcaagaaaacgacaccgcattgtcggcacttaatctttactagcgtgtgggtgttgatgtactcgatttctgaatagtcgaacttctccccatgcacccgctgtgcttcctcgacaaactgcggtgtcgttttgcgatggtaggacataagctacaagttctctctttgctgcttgatgccttctaagaactcttccttagtaataggagaactgttttcctgatagccagtttcatatttagtcctttcagtcttatagtatctgaatccttcaagttcctcgtcactcatagtttcaaggcctgggaatgttactggtattaccaaatcaatatgttcctcatccacatagtcaatttcagcagtagtacatccatctatcatatttagtgctacggctggaatatctttcttaggaatatagcccaaatgatcttcaccattgaagacagccaaggcatctgggtcaaactcattattaggttctggttttatttgcagttccattccctcttcaagttttgccagcagttcctcgtagttttcacgatatttgatgcctgctacgaaagaattcatattggcattctttatgaccttatgctgatgatggtcttgtccgtcaatataatccaattcgtatgtggtggcgtactgcttaactatcttgccataagagtttttttctgtagttgaatcttcttttgattcgacaaactgcacataaagttctacttgaatatcatcttctcgaagatcatagtcagtaacagctataactgcttgataaccttctttcatcttctgctctatttcattacttgaatatttgaaatagacatctcgtgtctccaagttaaatgcataaggttctccattcactaacattgaagccatcaaaagcggtttgttatcttcatcaatccattcatttttagcaaaaaacaaagccgactcaccaatcaattctacttgcgcattgaatttctccatacctataggaatgttgaatccacgtgatgttactattctatcctcaaataccatttcatcgttatcaaggaattttgaattatagaaaggagtcttaacaactatattcattgtaccaccatcttgcatgtagatataggtaatttcacatcctttatgcttccattctatcatgctatttgtattgtgaatccttgaaatatagtgagaattacactctgacaatgagcgtatgccctcgtgtccaaatgcctgctcaacaataaaaattattttttgtgccccttcggtatagtaatccatagcaaaatagaaatcagtacctccatcttcattgacactggcaatacaagatttaaatacatacttttcttcatctatatcagtgaactcaaatgttttctcatcatcggcctcgcccacatatctccaatttccattaggcgcactttctaaatctattccaaagaaattgttaatactgattctttctaatttagactcgtctctgacatcagcaggagatggttcaatgtctttgattacttcttccccaagaaaagccttattgcggaatggtgtccaaatagaaacttgcatatcaccagtaatcgcatcacggtcaaacataacgctcttatctcctaattcccatgtcagcattggcacaatggaatcaagcttatcacgatattttctaatgcacttttgatattcgtaatctccatgatgaattaagtcgcgttcaatgagaaaaacaatatccattgcctcctgcaaatcaaactcctttacaaagaaaaaattcgttccaccatcgccaattacttttgccttacaatcggagaaataccactcatcagagtctatcccataatagtgaaaatttctaatcttatcaccatttgaattaaattcataatcatcctctatccattcagagtttggcgattctgttaaatcaatgccaaagaaatcatgatagttcaatttagttgatactgattcattagcctgagaaacagcatttgaattattatcatttgccacaaattcttgctggtcatcttcttcgatgccaaataattttttaaagaatcccatatgcttttgtttgttttagtttgaaatgcttggtgaatattgaaataaaaaacgtggacaatcacttcgtctacgttttccgggtatcggcaaatgacccaagctactttgaacgagtaatgtgcccacgcgaacgtgagcatcctttttactcttgtagctttcttcaattttgccgatttcggaaaacaagatggtaagcggacgctattcctttatgtcgtttgtacttttatctgtccattggcgtatctgttttgatgttacacattaatattatatatggtttcaattatccaaatgcc

SEQ ID NO: 2011 - DNA, 15466 bp, synthetic construct
  misc_feature 1..15466: note = Synthetic
  source 1..15466: mol_type = other DNA
cttggaacacaaaaccaattgcggacatcttttcttctaaactaaattcttttttcatttgaacctttcagttgtgtccaactttctgggttcacttcagagcctgtccctccgattctttttgtataatgttcgttgtcttttttagattggcagattgcctgttgcgctgttgacgttgtcgacactgctggcgctcggcaaagctcaaacaagtttgtctttgcactcgctgttgcggcgttgcgctgttgcagtgttgcagttctctaaagggtatttccataccctaaaaatacttctatatttatatataaatatagagtaaatttttgactttcatagaatctattttggaactgcaacactgcaacaagtgcaacagcgagagcagtggagctgtctccagtatgccgagcgccagcagcctcgacgaagtcaacgctgcaacatataaaacatataaattgtcgcgcacaagcaacatttttattaaaaagtgttgttttcgtgcaacactttactgaaaagggacaataaaaacctatgtaatcgccgacgattgggatatgcccaacggcgcccctctggatgctgggattcttgcattaaattcgaggggtagaatgaagaagtaaaccaaataaatataaagatatggcaaactcaattttcttaggtcgtttaaatgctgaacagcggaaggcgttgattgagcgtctttggcatgcacagggtggcaattggttttcccatactaaaaaggttgacttttgtatctgaaagtgttgacgcttttcctaagaaagtcgactttttccctgtttaaatatggaactttcagatttgttggttatcgttacaaacagttggaagatgttagcgactgtctaaagaatcaggagcctcttaccttgccatccccgcgtttataaaggcctatgtttaggcactatctattaaataatgtgtatttttgcgcaaaagtgtttaagtataaaaatcttttcgtaactttgtagcgatatagcacctaaagcaagtatggcagacgaagacaatagactgatgatagataatagaaaagaccctgctcgaaaacagggtctctgcagttccgcgatacgcggctgcaagaactcttcggcttatagccttattgagaaaagtctttctcataaaagtctttgcgctgcaaagataatgctttttgttgaaacgaacaaattatcgaactaaaatcctatcagatggagcagaaatatataatcggcgtagatcctggtacaggttcgctgggattggtagtaagagatactgatgaggacgacttgaaagatcaggtgaaatatgcctcagtagacattattcgctctggcgtgattgagagcggacagaacaaatacacttctttcgctgccgaacgtcgtggatacaggaatgcccgtaccagatatttgcacagaaaatggaggaagcaggaaaccttgaaactcctgatagatgcaatgattctggacgaaaatatcaagcatctgctttgccctctgagtaaagaggatctagaaagatggatacgatatgacaaggaaaaggggctgaagcgtgagtatcctgttcattctgttgcgtttgctcgttggctcatgatggattttaatggtgatggagttccggaacaaatggtttgtacaattgatcccaagaccttgctcgaatttgactctacaaaggtgagaggacaaaggattctgatcttcgatgacattgaaagagcaaaactatccattgaagaaatacttggatacatcaactaaggtgagcgacgcagatctgcctgtagacgaaatccaaatggacaatgatgatttcgatgccatggagtattctgagcagaagaaatcgaagttgttggcagagtatatgcaggaacaaggcataacagacaaatctgttggctatgctttggctatgttagaaaacgaaggcatcaggctacgcgacagcgaatatcaagtagtgaggaaagacctgaagaaagaggttaaggctatctttgaataccaaaatcagctctcaactgattcctatctctacaaacgtctgataagcgaaaagaaaggcgaaggcactcttttctaccagcgtccccttcgctcacaacgtgggaatgtagagaaatgcaccttagaaccgctgaagaaacgttgcaaagccagccatcctgagtttgagaaatacagagcatggagccttatcaacaacatcaaaattaaactgcctgatgacgacgcacagcataccctgccatttgatatgcgccaaagactctatcatgagaagttttccaagatagtgtcaaagacattcgagtttgcttccattcgtaaatggatagaaaaagaaatgggatttagcggaagcctctcagctaaggcaaagaccattaactattacgacgaccattccgttggaggttgccccactataggacgattacagaaaatccttggcgatgattggcaatcatggacgctcgaaacaaaccatgttaggaagaagaaaaacggtactgagcatcgtgtacgttacgatgccttaacgctttggcatatatgtagtgaggctgagaacgaaacctttgtagaggagtttgccaagaataatctgcctttcgacgagttgcaaataaaagaactcgttcgcctccacaagaatgcttccgacgagtatgccaacctgtcgttgagtgcgctgaaaaagattaattatttccttgagcgcggtttcaacaactatgaggccacccttttggccaacatcccttcgttggtgggtgttaaacaatggaaagaacacggtgatgaaatagaggctcatcttcaggacatcatagacggtaacagggagaagaaacgctatctgaatattgttaatcgcctgattgctgactacaactcactggatgacaaagagcgatttgctgatagcccctatcacgactacaaactgcaggatagcgacttcagagatattgaaaagaaaatcaaggaggttgtaggtaagatgacctgggagaagatggcagtcgatgataaggaagcactaatacagcaagtgtccacactctatcagcagttctttgcgagcggcgagcgtacatattataagatgccaactgacatggaaggtatcagagaatatcttcaaattgcctttggcatagaattaggtcaagacaaacaactctatactccctacgacaataagtattacccacaagccacacaaacaaaagatggttggaaattatgctcgccagtaaaaggagcactacgcaatcctgccgccatgcgaatcctgcatctgatgcgacgcagaaccaacgagctgttaaaagacaaatctctggatattactccagaaaacacccgtgtggttgtggaactgccacgtgaggttaacgatgccaatatgcgcagagctattgatatctatcagaacaggcgaaagaaagagaacgatgtgtttaaaagtcttatcaaagaattatctgatgacgaggatgagcgtctgcaaaagacccgcctgctgattgagcaatgcccagattatgtgcttgccgactttaacgagaaacttcagaagaataaggcatacaacgacaaattggaatatgcagctaccaagtatcgcttgtggttggagcaaggctgcatagatatctattctggttatcctattcctttctcgaaactgttcgacgacaatcaatatgacatagaacacaccattcctcgcagcattgttctgcaagacggacttgacaacaagactatcacatcagcatcattcaatcgcaaggtcaagggaaatctgctgccagcacagttggccaattaccagacagtagtattgcccaacctaaaaccatgggaagaacgtgtagagcgattgaaagagcgtgtaaaatactggcttaaagaaaccaaacgggctggagatccagacagaaaaaattattgcatcgtacagcggcatttgtggcaaatggaacttgactactggagttccaagctggagcgattcaccatcaccgaagtgacatccgacttcgtaagcaaacagatggccgatacgcgtgtcatctcaaaatacgtattccattacctgaagagtgtctttgggcgcgttgatgtgcaatacggcagcacaactgccacctttaggaagatatatggtctgcctgagaaagataggagcaaccatactcatcatgccgttgatgccgctatgcttgctatgattcctacatctgccaggcgcgatgccatgatacgactcttctatcagattgacgaagagaaaaaagcaggccacgctgacgaagtgaagcgactaaaagacgcattagaacaagaaaagaaactttgtctttatggcagtaaatacgccaaaccatctggcagtaggataatagacgtagccaattatctgagagaaaccatcatgataaaccatgtagcaaaagaccagacattgacaccagccagaaagcgaggctctatcaagaagaatggacaacgaatagacattatcaagaccggcgacagcataagaggacgaatacacaaagattctttctttggggccatcaaaccatgggtaactgatgaggagggaaacttcttgagagacgagcaaggacagccctatgctaccaacattaagtacgtcaagaggtataagcttcaatgtggagaagacttcgatagttgggaaaaactagaaaagcgaatagttgataaagacctctttaaacacctgaaagagcaagccgaaactcaaggattatcgttcagggaagcatgtgcaaaggggttctatgtcagcagaaaagtgaatggtcaaatcgtgacaaacaagattcgccatgtgcgttgtgaaataccaaccaatctctcacatctcccaacaaagaagcatatttttacgtcagacaaagaatacaagcagttctattatgccgaatctgctgatttgcaatactgctgtgagtacataggaggtagcgaaacatcctatgtttcatataccttgtacgatatatcgatgaacatgaaaaagggagaagatgccttccctaagaccattttaggcaaacgagagcagctctatctgaatagagttctgacaaaaggcgatatggtgctgctgtataaagaatcagaagatgaactaaagactttaggtaagacgcaattggcaaatcgtctatatatgatttctggttttgagaaacgcaaggaaagaacagacaccatcaaactcgttaaacacaattacggtgctgccaaggatgaaggaaagggtaagtcgatagccgatttcgaagaaatgattaaacagaacaaaatacaaatggccatcaataaggttaagtttgtccaaacaaaactcctataaacagaaaagagaactctcgctatgaagggttctcttttccttatttcacaaacattttgcttttctgattttggtcgtatgcttctgtacgacaggatgatatacacaactagatgtttgtgatatctcaaagacttttatttgaaagcaattcccaacaacttggcggctacggtgcaacccagtcggatgtttgtgatatctcaaagacttttatttgaaagcaattcccaaccaaagatgccaaaccaaccgcaaagaataagatgtttgtgatatctcaaagacttttatttgaaagcaattcccaactcgccgacagatgggacgattcgaaacaggatgtttgtgatatctcaaagacttttatttgaaagcaattcccaacccttgatcttcggagttgccatgagctgagatgtttgtgatatttcaaagacctctatcagaaagcaattctcaacagtagtaccgccgtcgaatttccaaaatgcttttgatgttgcaaagatacaacaatcccttgaaaccgccaaacaattcgctgttttaatacgattatagcgattacgtttcttttatttcctcgaaccagtttgatattgatccgtgaattggtataagcaaatctttagccagttgaatgatgtctttgtggtactcaagcagctcagattgaatctcctctaactttacatgatgtttcgtaacatcagaattgtacccgtcagcaacaacgttaaaaaattctgcgtaaagaaggtagttgtcgttctctatatagtggcgatgcttcaatctgttagccaaatcatgcacaaaatgatgctgctcatcaaattgacttatagggttttctgcatcattgtcatatagcgattccttaattttcgagagcctgcacttgttcaagataacttctatagtatcatctcgcagttcaatattgccgtatagtcgatgtttgaaccaaagacattgcaataccaaatcaaagcagttgtgataccatataagtgctgaatagaggtaatgctgtttgaagtattctgttttgaacttattaccaaaatccttctcttcaaccaagtcaaggtacggctctttgaacgacatagccaacataaaacgagctgtatcgagttcgtgaacaaaatcaataatacgccgccttgtctccgtatcttcaggcgttaaaggttgcactacgtcatcgtccttcagaaaatgtgcaggttccaaaatttggtatgcttctctcgttgtcatatcgtccttgtttgggggaatactctactacgtaatgatgttgcaaaaatacgaataataatcggtagttggctgtcaaaatacaaaaatatgcactttttcttgtatgactgtaaaatctgttataaaagttactctgaatatgtaacattttcgagttctgcatactatataagtagaaaaagtagtaaatttgcaggcgaattcggagatagttaattagtaattatgacatcacaagataaattcatagcactgacgcgcaagggcgaggatactcggatagagtacaagacctgtacggaggagatttcagaatctctctacgagtcggtgtgctcgttgttgaaccacagcggcggtcagattctcgtgggtgtgcagaacgacggcaccatcatcggtgtgaatcccgaaaaggtggagcaactgagaaccggcatcgtgaactgcatcaacaaccctgaactgttcctgccctgtccttattttacgcctcgcatcatggaggtggagggcaagtcggtgatgcagctcgacattccctgcgggcagtatgtctatcgcttcaagggccgctattgggaccgcaatgatgatgccgacatcgatgtgaccgaccagccagaactgttgttatctatcttcgagaggaagaatccccatctctttgaggagagatttgtagaggggcttacgatggaaggtctcgaccccaacacattccagtactgccgtaacgttattcaatctcggcaaccctcacatgcatggctgcaactctctgacgaggatatactaatagccacccatttggcagtacgcgatggtgacaaactaaagattaaatatgctgcgctgatacttttcggtacggacgatgcccttgccgaactgatgccacgatataggtttgaggctcttttccatatgtgtacctatgccgactttgaggacatgaaaaagttccccaatcgctatgacgaccgacggacgatacgccagaacctgattcgagtgtatgaccagctggcagaatttgtcgcccgttacatgccagacaagttttatttgtcgccagaaactggccagagggaagacctgcgatggaacttgatgcgcgagattgtggggaatctatgcgtacataccgattttagcagcggctacgcctgcttcttccacgtgtttaaagaccgggtgctgaccaagaaccccacgcgactgttgccagagattcctgagggcgaactgaccatccaacagctgagtaactatactaagaatccgctgctggccagagtgttccatgaactgcattgggcagaggatttaggttcaggcactcgcaatattctgcgctatgcacctctctattatccaaactataaggtggagatcaacagcggttcacagttcattttctccatcacctatcaggacgtaattgtccaagacggtgacaaaaaagtccaagaaaatgttactgacaacggaaaaatgtcactgacagaaccaaaaaatgtccccaacaaggtcaaaatgtccccaacagaaccccaaaatgtccccaacactggacaaatgtccccaacagatgtcccagagttgacggatgaggaactttcaataaagccttttgaaagggagattgtcatcagtaaacgtaaaagacgtcaacaagccatcgttggtatgatatccattgattcccatgtaagtgtagaagctatggcagataaactggatgttgacaaaaagaccatcaagcgtgacttgaaggtactaaaggataatcatgtgatagaacgaataggtggaacattcggtggcgagtggagaattataaagaaaaagaagtaatcacaaatatggatatcaacaagatgacggcagcagaagcgctggactatctgcggaaagatgtgtttggaagcatggggatagacatcgactctgtgctaacgttagatgaagacaagaggaagtgggcttggtagactcgctatggacagagattccccatcaatatcctagtaactatgtggatgctgcacgcgagatatggagcaaaattatgcctatacgtgagggatttgacgaaaagtgattaagtagtaaatttacaaagaatcaggagcctgcccctccgattcatcatgaaaaagaacgagcgaatcctttgtggttcgctcgttttttcgtacctttggctttgctgcgctcggcatcccgaagggtgacgcttgctaccaaagggacgcaagaaggtactttcgctcgacaataaaataaaaagaaaaacttgttttccttttgtattgtgctcgtttttttgtacctttgcagagcaaagatgaaacaaatgaaaaaaacaatgaaacgactacttactactatgacgataatgagcttgtcgcttggagcgtgggcacaagcctttgacaacctgccagatcctattgaggatgtgaacaaggtgatagataacacgcccgactcaattgctaaggcattgatgtcgagaccaaagccgggctctacacgtaagggctcgcagcccgtgatgttccttgtggggaactctacgatgcgcaacggaacactgggaaatggcaataacggtcagtggggctggggctatttcttcccgaaatattttgatgctaataaaattgctgtagagaaccaggctttgggcggcatgtccacccgcacgttctatacagacctgtggcctgctatccgcacagccttgaaacctggcgactgggtggtggtgtcgataggtcataacgacaatggtgagttctttgaccagaagcgtgcacgtgccgtcattccaggtgtcgacatggatacctgctacataggcttcaaccagcgcacacagcgtcaggacaccgtttacagctacggacgctacctgcgcaaatatatccgtgagattcgtgccaagggtgccaaccctatcctgatgtcgctgacgccgcgtgatgctttcgataataaaggtaagattgttcgtaagcctcagacggaatgggcggcctacatcgcagcagtagagggagtgcccttcgtggatttgaacgaaatcagtggtgcaaaacttgattcatatagccgttggaagcaacagtatcacttcttgggtgataaaatccatacatcgaaatttggtgcagagatgaatgccctaagtgctgcagaaggtatcttcggaagtagcaatccacaacttgcgactttgaaaaccatgatgaggaatgttcctgtggatagctatcaggtggatcgcaaagacggaaaacctgtggtgttctttacaggtgactcaacggtgaagaatgctgataaggacgacgatggcatgtggggctgggcctcgcaggcgcagatagtttttgacgaaagcaaaattacattggtgaatgctgctcgtgcaggtcgctctacacgcagctttatccgtgagggcttgtgggagaaggtgtataactcgctgcaaccaggcgacttcgtaacgattcagtttggacacaacgatatctgtcccattacggatgcgaaggcacgtggcgtgatagcagagtcgaaggatacgatgcacgtctataaacttgataatggtacttacgaagtggtctatagctttggctggtatctgaagaagatgatagacgattgtcgtgagaagggtgctacgccaatcctcgtctcgctgactcctcgtaatgagtggcctggcggtaaggtggaacgtcgtgatggctcgtatggaaagtggtatcgtgaagttgtagaagagacaggcgtagagtttgttgacctgcacaacatcagtgccgacttcctggataagaagtttgccaagaaacgtctctcagacgacaaagagaaggctaaagccgaggtggctcaaatcaaggagaaggcgggtgctgcttatttcaagaaggaccacacccacacttcgaaactgggtgcgcagatgaatgcgcagtcgtttgcaaaaggtctgaaggctaatggctcggcacttgcaaaatatctaaagaaataatttgttttaattgaatgattcgactaataaaccgtaatcaatataagagaacagccttgtcgcttgttacgctgctgtggggattgagcctttcggctacagcgggtccgcagcagagaatagattcattgcgtgaaactttagctcaacaggagggcgaacagaagctaaagacactggaggaaatctataaggccagcttgtcggcaggcgatttcaagttgcaactggaatgcctggaccattggcaggcagaagccagccggcaaggtaatgctgtcagtgaggcagaggctcgtgtggaccgtattctggattacttcaatgaggcaagctatgactcaatttatgtgttagctcctgatatgatgagattctgtaaggaacataagttgcagaggaaacgtatgcaggcttggcacatgctggtgggcgtctatcatattacaggacaatacaacagggctctgagcgaggtaaagcagatgtatgaggaggctcacaagactaagtctgactatggtgagtcaatggcctatttcaatatgggtaatatttactatagcatggggcattatgaggaatcggttgaggcatacgagaagagcgtccccttgatgaaaactatcgacaaggaggtgctcctggaaatctatcctttctattgtgatgcacttgaggctacaaagcaatatgacaagttggtggatgttacccatgactggtgggaggtgattgacaataagttgaagagtggtgacgaactggataaggatgtgattctctccaactactatattgcctgtactcagggaagtctgggtaagaaccagttgactgaagccgaggaaatgttggcgaatgccgagaagcatattctggcgaaagattcctatgagtggatgtatctgttgttctatcgtgcaaagttgtatatgctgcaaggtcgttatacggaggcacttcaatggaatgctgagcgtttgaagatgtgcagcgttattcatgatacgcctacgctgattcctgttcataagcagcgtgcagatattttgatgagggcaggcctttataaagatgcagcggagatgtatgcccgcacctatgagttgagcgactcgctgaataaggccagcacccgtacgcaactgaatgagcttcgcaccatgttcagagtagatgaactggaatctaccaatgccttgcgtgaggatcagttggaggagatggaaataagaagtgccctgcagcgcagtaagttcataacgattcttacggcagtggcagctctgacgttactgattatcatgctgattatctattatgcggcacgcagattgaagcagaagaaccgtgaactggctcagaacaaccaggagttgaaggtggcacgtgaacgagcagaagcatcattgaagatgaagacagatttcattcatcaaatatctcacgagattcgcacgccgctcaatgtactgtcgggcttctcgcaggttcttacgggaaagggtggcttactggatgaagagactcgtaccagtatcaaccaccgtattgtggagagtaccgaccgtattgtcaacacggtgaacaagatgctggaactgagtgaggccagcagtgagacaacgatagaacgtactgatgaggtgacgccaaagagaattgctaatgaggctgctgtggtgtcgggcattcatgaggcagaaatgataacctttgagtgtcaagtagatgatgatgtgaaggatattaccctgctcacgaatatcaaacaggctacgcgtgtcattcatttcctgttgggtaatgccaggaagttcatgcagccttcaggagaaaatgaaagacccggaacaatccgattactggtgtcacaatcggccgatggccgttttgtgcagtttgcagtagaagataccggtataggtgtccctgaagcagaggcagagcatatttttgatgagtttgtgcagttggatgagtattacgatggtgctggtattggtcttaccgtagcccgctccattgcacgccgtttgggtggcgatgtggtgcttgataccagctatactggtggtgcccgtttcgtattcaccttgccaaaagagtaaatagaaatgatagacagagcgacggttgacagaattattgatgctgcccgtattgttgacgtggtgggtgagttcgtgacactcaaaaagagtggcgtgaactacaagggtctgtgtcctttccacgatgaccgtaacccgtcgttcatggtgtcgccatcgaagaatatctgccactgcttcgtgtgtggaaagggtggtacgcctgccaacttcctcatggagcatgagcagattacctatcctgaggccctgcggtggttggctaagaaatacaacatcgaaatcgttgagaaagaactgactgatgaggagcgcgaggcacaaagcgaacgcgagtcaatgttcattgtcaacgaatgggcgaaggactggttccatgatatcctgaagaacgaccctgacggactggctataggaaagcagtatttccgtagtcgtggtatccgtgatgatatcatagagaaattccagctgggctattcgccgcagaagcgcgatgctctggctctggcagcacaggctaagggctataagccggagttcctggtgaagacgggcttgtgtttcgagaggaatgaggaaagtggaaagggaaaagagaatggtcttgtggacagatatagcggtcgtgccatcttcccttggtttaatgtgagcggaaaggtggtggcctttggtggtcgtgtgttggatagtcgtacgaagggtgtggcgcagaaatacgtcaactcgcccgactcggaaatctatcacaaggaacgtgaactctatggtatctatcaagccaagaaggctattgtaaaggaagaccgtgttttcatggttgagggttatacggatgttatcgctatgcatcaggctggtatcgagaacgtggtggctaatagtggtacggcactctcaacctatcagattcacatgctccatcgcttcaccaataatatcaccttgttgtatgatggtgatgaggcaggtatccatgcggcgatgcgaggcacggatatgctgttggaagacggtatgaatatcaaggtgttgctgctccctgacggcgatgacccagactcctttgcacgcaagcactcaacggaagaactgaaacgctatattgaggacaatcagacggactttattacctttaagagtcgtctgacggtggagaatgtcaccgaccccgtgaagcgctcagaggctatcggcggtattgtgaagagtatctccgtgattccagaccagattctgcgttcaacctatctggctgactttgctcatcgcatcaacatgaaggagcagacccttgttgccgagatgaacaagtatatccgcaaggatattgaggataaggagaaagataaaaaccgtgagattgacagacagcaacagggtgaccaacaagccaacatcgagtctgtctcgcatcctgagccattggctctccatacccccacagagcaagcctcgcaggtagagaaactccttatccgtgaggtggtgcgccatggtgaggagattatttttaatgatgtagagaccgaggatggtcagaagatttctctctcggtatcgcaatatatagacttcgacctgtcgcaagacgggttggaaatggcttcccccttgcacagacagatactatctgaggctgtggcccatcaaggggagcctggcttcaaggccgagacctatttctgtagtcatcccgatgtgcagattagccagttggctaccagcctggctatcgaccgtcatcagttgggaggacgatttgaaatgacagagcgtgaaggcggcctttgtcagcgtgtgctccatctggtgatggactatcgcttggatattgtagaatcaagactaaaggaaatacagcgtgaactgttgcaggtgggcagcgaccgtgaccgcatgatggaattattaaaagaacataaggaaaccaaagagattcgtgatgcgctggcaaaacgtctgggcaccgatctcgttgtctaaaacgaattatgtattacattcagaaaaaattagaagtatcagccagtcaccacttggtgctggactatgagagcaagtgctctaatctgcacggacacaactggattatcaccctgttctgtcgtgcaaaggaattgaatcagaatggtatggtggtcgactttacggagattaagcgtaagattaagggacgcttggatcatcagaacctgaatgaagtgttacactttaatcctacagcggagaatattgcccgctggtgcgtggagcagattcctacctgctatcgtgctgaggtacaggagagtgaggggaatttagctgcgtatgaagaggattaataacatcttctattcgctgcagggcgagggacgcaacacaggacgtgctgcggtctttattcgttttgcgggatgtaacctgcgttgctcgttttgcgatacggaatttaatgcgtatcgtgagatgagtgatgaggagatagtagatgccgtcaaggctatcctcccttcacccatcacccttcacccttcacccttaatagtcctaacaggtggag

SEQ ID NO: 2012 - DNA, 14573 bp, synthetic construct
  variation 9582..9821: note = n is a, c, g, or t
  source 1..14573: mol_type = other DNA
  misc_feature 1..14573: note = Synthetic
gcaacagcaccgaggaactcaagaccaccaacacaatggtgctactgacaacaaacacgtaagcatgactcaatgccatgcggcttaaagtgagcaaccaaaacaaagacgccaataaacccaaagtataactggcaagaatatacggatccgccaacaacgtggtcacgtaaaatgtcaacttgttccatgcaccctcgggcacggcatcacgataggcacgcatgccaaccttcgccatgagctgcgaagcaaccgccaaaagcactgttacacccataagaacatactgcatcactgtttcccgctgatacgtagcccgctcctgaacctaacgtgcacgtatcacctaagggctgtcaaggacgttggtgacgttgtcagtatgggcgttgtcagcgaagtgacagttttgtcagttcgatggggtaaagtgacataattggcgttttttgtcattttgtgtgttgaaaaaagcaagtttatactttattttatgaacaaccatgaaattgggttgaaaagtgttcgaaaagcgagaaaatcatgaaagcaacgtcaacatctagcggtcgttttgtgccgtgcacggcaagtggctctgttccttatcgtgcttttgtgcctaatcagttgccgccgcgtctttctttggagcgattttatcctttgctagacaaagcgaattttgctttaggcggtttgaatgccctcgatacgttgttgccggatccttcgttatttatttacatgtatgtgcgtaaggaagcggttttgtcgtcgcagattgaggggacgcaatcgtctttgtcggatttacttttacatgagtcgaataaagcacccggcgtgccgattgatgatgctgcggaggtttccaactatatacacgctctggggtatggcttaaagcaactgaagacgattccgttgtcgttgcgtctgattaagggtgtccacaaaaagctgatgtatcgggtgcggggtaacaatgctcgccctggtgagttccgcacgtcacagaattggattggtgggacgcgccccagcgaagcgcgctttgtgccgccgccgccaaacgagctgggggggtgtctcgatgcttttgagacgtttctccatgatgatgataagcacccgttgcctgtgttggttcgggcagcaatggcacacgcccagttcgaaacgattcacccgttcctcgatggtaatgggcgagtgggacgcatgctgattgctttgctcctttgtaaagagggtatgctggataaaccgctcctttatcttagtctgtatttgaaaaaacaccgagcacgttattatgatttgttgcagaacacccgtgataagggcgactggcaagcttgggtgcagttctttttacaaggtgtcttagagacagcacaacaagccgttacaacagcggtcaagattaaccgattgttcgatgccgaccagcgcaaaatcgcacaagaaacgaccgcatcagtcttgagcgtctatcgccccttccaagaaaaggtcatcgctgacacgacaactatcgtcaaaggttgccgcgaaacctatcgcaccgtgttgcgtcacctgcaaacactggaaaaaatgggcatcataaaagaaatgaaaggacaccgacccaaaatgttcgtctataaaaaatacttggatattctcaatgaggatatcggcgggaagtgaagccttggtgcatctaaaaaataaaggatgtcgagttagaacataaactctcttgtcgattttttcactcttcacgggaagagcgaagagtcatgctgattgtcgccataattctatcggtctcagagaggacttttagaatgcgttgatagtgctttacatcctcgaaattgagcttaagccccttgcggtctttcaaccatttctgggcgggctgatagccacagatatagaaatcccaagatactttaggcacgttgccaaaatattgggcagaattaatatacacctgaccatccttaaagcatggcttgtccaccacgttgttgccctcaacattgaggggatagtcggtctcaccgatggttgccgaatccatcaggtgtaatctgtgcagttgagaaccttttgccgatacatcccaaaattcatctggtgtgaagggccaaggaatacgaggaaaatcttttttcagaaagtcggcgtaagtgttccgataagcaggacagtgtagcacaccataaatataatcgaacactgccatctcgtctggagtgccatgaatacggtgctttgccagtttctggagcttcgaataaagtctagtatcgaaatttatccgacgagtttggtcgaggtcttgctcgtcagggtaaatgtaaagcggagccatctgagctattccttgattactagaaataataccaccatcaaaaatgtatggtgtcactaacacatttactgggcgcaaagattgacgagaaaaaactagtgcagtatttttatctaaaagaaggttttgcgttacctttttgcgcaatctccaaataatcaaatcgctaaaatacattactttgtcgtcgaagggacgatatgtaactggtatcgagtctagttttgcatttttgagcttatctttgtttgaaagtagccatttgggataatgttttccaagagaatacttatcctttaggcttgattctgtgtgttcattattaagcaggtcatccaagttagctcgaagctgctcagaactatctgcgaatgcaaaattatctcccatagttacaatggcggtaacattctcagacataaattccgtcaaatcaaaaccttctctgtagatagcagccacttgattatcgcgcttcacaaaagtatagtctgggaaactgcagtcaattttttctgtaaaaagcttcccaacttgaccactcatcagtgccttatacttaacatctcgctcaccccagagttcgcggtggtaaacctcggctggcttcttttttttagcattttttttcaaagcgatgatgattgccactccctgcttgatgtcgaatacgttcttatcaggcttgccctcaggcgtaacttctcttttattcgagttcccgtgcaggtcgagaatgtaaattttgtcaaaagtctgcaataaatgccagcgcatccctcgaaatgtcgagttgtccaagtatccgtgattggtaatgaagccgagaacaccttcgccgtttttttcaattaagctttctgataaacgaatgaattttacatagtcgtcatgtagccaatgcttacgttcttggaaatgctcaccatcgacgtatttgtaatcttcgatgagttcggtaatccacttacccatgttttgcgagatgctcgaatacggtgggttgccaatcacgcacatgataggcatattgcgtttaatgatgttagccccctgagcttctaagctgagccattgcatgaagggcaatttctcgttatccgctttgccttcttcaaggctattggttaagaaaaccgataagcgcgttgatttaactgtagattcgtatcccaaatctgtcaaaatcatgtggagctttatatggcacatggcatgagctgccatgtgtatttcgaatccgtgcaggcgcgggatgagttcttcttcgatgtattgcgaccacatgctaggggcgatactcttaaccttaggggcaatttgtttaataacctcagctaggaacgttcccgtgccggtagccgggtcaagaatctggactcggtgaacattgttcttggttttcttcacacgccccttatcatcggtcatctcccagtcgatatcgactttagaggtatctgcaagaccatcgggcaaaccgaattcatttttcaacacatcgtccactgcgcgcacgatgaatttcactacagattccggtgtataccagacaccccgcgccttccgcttatctgggttataggcagagagaaacgtctcgtagaagtgcagaaagggatcgtttctgcctgtcaagctcccgaaacctcgcatcagctttgctacatcacaagcttggaacatataagcaaggtcgtcaataatccaagtaattctatcatccaattcatagcctgccacatagctgaacaaggagcgtagaaagggattagagttgggcagaagttctagtgccttgcggcgactgaaggttcccccagtcgtatcgtgcagacgagcggcgaacattccgtagactattgtctcggcataaatgtctgcgaagtcatcaaaatcaatgtcatgaatcagattcttctttaacgcctcatattgacctgatagttgagtttgggtttcttggtcttcagtcaatataccgtatagcgtgctcttgataatattcgctttgcctgccatatttttagccaaatccatcggactggtgatggttggaaacttttgcgcgataaagttatttagccatttttccagaattttgtattctttaggtttccgacttagactaccctggtcgagagtagcaatgctgacagaggcaattaggtcacctttgcggtagaagtcccaatcgaggcagttagtataaatcagatttggaaaacctttgagataacgctcctgctgacccttgttgtagcctttcatgtcccgcaggttaaagccaatacccttagcttcgacgtgaccgataacaacatctctgcgttggatgatgaaatcaggcgcaccacattttaccctcttaggttcgttcaaagcggtgacacctttctcgagccccttaaacagcatctctaatgctgaacggtaagaattttcagtggcagctttcgtcttgtagacggcttctactttggaaatgaaatctgaaaccagtgccatagctaacattaattcctctaaaaacaaaaaacttcacggcggagagggagggattcgaaccctcgatggggttgcccccataccggttttcgagaccagcgcattcgaccactctgccacctctcctgcggtaccaaaatgtcggggcgagaggatttgaacctccgacctcccgtcccccagacggacgcgctaaccaggctgcgctacgccccgagcaacttcaacacaccccatacctatagaacaaatcacacacccatgatagacattatgtagacccaacacccaaacaatcctatctctttgggcatgaacctctcgataccccaccgcttctggcacgtgctacggcgcatagccaccatcacactgcactgcctcttcattgcgctgctgctcctcctcaccctctacagctgcgcacgcctgctcgcaaccgccctcatcaccgaacaaacaacgccacaagtccccctcaacgccgccgccatcgtcacaacagatggcaaacaattccccctcaaccaactcagcaccgccctgcgcgccaaccaacaagccaaccccaaaccacaccaacacctcataaccctcgtgcacggcatgggagactaccccgacaaagccttccgcgaaggagtcttcagccgcatcacagactggcacaacgccgatgtgctcctgttcaactggccctcgtgggtcggattccgcaccctgcccgtcatcaacgcacaacagagcggaaacaccctaaaagactacctgcaagccctcaacgccctgcccgccaacaccgacctgaccgcacgctacaaaactcgcagcctgtgggtgcactctatgggcgcacgggtgctcgctagcctcacacaaacaaacaccacaaacctacccaccgacctgttcgatacactcgtcatcatcgccgccgaaatcgacgtgcgcaaccacgctcaatggctagaaaaaatcacattcgcaaaacgaatcttcgtcctcatcaacagcaacgaccccgtcctgaaaccacccgaagcatacttcgaacgcaaccgactcggacgaagcctcgtgcgcatcgacggcacaaaagaacggctcgcccgcaacgcaacatacatccatatcgaccaaggaagcccctcacacagctaccacgtccgcaaacgaagcaaaaacctacaacgactattccaactcattgtcgcagacaaacccctcaaacaagccaaaaacatcctgctcaaaacaccacaagaaaacctgttctacctcaaagcagatacaccaacccccacgtcacaataaagtcccatgccctctcctaaaaatacattattgcggcggtggtatgcccgtgtcatgcgtgcgtccacctcgccccgtgcgccccactggctcgctgccgtcagtctcaccgaaagcattttcttctttgtgccccccgacgcgctactggcacccatgagtctcaacaaaccccacaaagcactgttctacgcaaccttagcgaccatcacatccgtgctcggcggcgttatcggctacgccatcggcgccctgttctacacaaccatcggcgagcccctcattaacctctacggcatccacaacgcctacgagcaattcacacaagcctaccaagactacggcagcgcgctcgtgttcctaggcggattcacagtgctaccctacaaagcctttaccatcaccgccggcgtcgccgcattcaatctgcccctgttcatcatcgcatccctgctgtcccgcggcgcacgcttcttcctcgtcgccctcatctgcgcctacggcgcaccaaccatcaaaccttttctggaaaaatatctcgaataccttattatcttagcaacactcctgacgctcgccctgatcctgcccttcctcttatgacaccctccatcacacacataaccccccacgttataccacacgttataccacctgccgacatgcgcaccctcagcggcatcggtgtgctgattgtgctctacgtgttcttcagcgagcacgtcctaggccatgcaccatgccccctatgttggcagcaacgctatctgtggtttgctattattcctctggcttatctcggctttgtctataaagttctctgtctgcggttgattgtcgttggcttgctggcaaccagtttcgccatcgcaacctatcatagcggtatcgaatacggcttgtggcaggggcccgacacatgcagcggcataccctccagcagtagcctcgaacagctacgccaacaactctatgcccagcctatcgtccgctgcgatgaagtgacgtggacgtttttgggattgtctatggcgacatataatgctttactatccttatgcgccgctatcggtataaccttgaacactgtgagatcatgaccccctctaccgcacccccaccgccgccgccttcttcatcgccttcgtcagcagacgtggaatccatgctccgagtcgaccatgccggcgagtatggtgcggtgcgtatctatcaggcacaactggatatcttgggcgatacgttgcaagccgatacgctgcgagagatgttaggccacgaaaaagagcatctggcgttcttcgatgatattttgcagaaacggggcgtgcagccgacggtgttgcagccggtgtggcatgttgctggctatgctttgggggctatcacggctattcttggtgtgccaacagcgtatgcgtgcactgtggcggtggaagaagtcatcgatgagcactatgccgaacaagagcgcgcgctcggtgccgatgaagcggagctgaaaaagaaaatcgcccagttccgtgcggaagaaatccaacaccgcgatatcgccctacaaaaagaagccgaaaaagccccgttctatcccgttatcagccaagccatccgcgctggctcgaaactggctatctggctgtcgagtcgaatctaataactaccacttgcccgtgttcggcatcgatgcccatggctcttgcggttccctcgcaccgcctttttgcaacaactcaatcgatatattatccggcgagcggataaacgccatatagccatccctcggcgggcggttaatcacaacccccttcgcctgcaaatccgcacacaccccataaatatcatctacctgaaaagcaagatgcccaaagttacgtccctcgtcacccccctccagcaacgcatcgccatcccagttatgcgtcagttccaactgcgcctcagggctgccctctgccgccaaaaacaccaacgtaaaacgaccgtcaggataatccttgcgccgaacctcaacaagccctaacatcccacaataaaagtcaagactcgcctgcaagtccgcaacccgcaccatcgtatgtaaataacgcatcatgtccacagcatacgacaaaaaaacccgcaacacaacgccaaaaaacactcgaggcacaagcctgaacccacacaaccgctacgaaagactgcattacgacagcgacggggacagcgacaaccaacacagcgacacacccacatccgtcttcatcgataaagccaaaagtgtgctcacacggcaacgctcgcccgacatccccttcgaatggtcgctgaatccctatcgcggctgcgagcacggctgtatctattgctacgcaagaccctcgcacgagtatctcggcttgtccgccggcatcgacttcgaaagcaaactcttcgtcaaacccaacgccgccgatagcctcgcccgagaactcgacgcaccagcctatcgatgctcgcccatcgccctaggcagcaacaccgacccctaccagcccatcgagcgcaaactccgcataacccgcgccatcctagaaacgctactacgctaccgccaccccgtcactatcacaacaaaatccgacctaatcctacgagacagcgacatcctacaacccctagccaaaatgaacctgctgcgggtgtttgtgtccataacgaccctcgatggcactctggcaagacgcatggaaccacgagcaccaacaatagccaaacgcctacaagccatgcaagccctgcaccaacaaggcatccacgtcacagccatgctcgcacccctgataccaggattgaacgacgacagcatcgaaagtatcctacgcgccgcacacaaacacggggctcaacaagcctactacgtgctgctacgactgccatccgtggtcgcagacctatggcacgagtggctacaaacacactaccccgataaagcaggaaaagtgcgctcgctggtgcggagcacaagacaaggaaaagacaacgatagccgattcggacaccgcatgcgaggcaacggcgcctacgccgatatgctcgcacaacgattccaactggcaaaacaacgatacggattggatggggattttcccccgctgacttgcgcgctgttccaacccacaacgaaacaaaacaccctgttcgatgggtgaacagtcttatttacgagcaccccataagtctcgagagccattcccacgcccatatcggaagaacattgcccagttctaatgcgagctggcaggctttctccttcaagaaatcagcgaatagccaaaatagccaaaacgcgagtttgtcccacaatgcatctaaaatttttctcaagaacactataaatagccaaaatagccaaaacgcgagtttgnnnnnnnnnnnnnnnnnnnnnnnnnnnnnnnnnnnnnnnnnnnnnnnnnnnnnnnnnnnnnnnnnnnnnnnnnnnnnnnnnnnnnnnnnnnnnnnnnnnnnnnnnnnnnnnnnnnnnnnnnnnnnnnnnnnnnnnnnnnnnnnnnnnnnnnnnnnnnnnnnnnnnnnnnnnnnnnnnnnnnnnnnnnnnnnnnnnnnnnnnnnnnnnnnnnnnnnnnnnnnnnnnnnnnnnnnnnnnnnntggtgtggaaaatcccttgttaacgggagaatcacaaagccacatatttttttccaccagcacaccacttttataggctatcataccctcatcgtcaacatttttatcttgtccgcacaagccattcgagatataatcttaactccattcatcttttaacatattagcaacaactccccatgacacaaacgaaatatcgcttaggcttagatattggctcgacctctatcggctggtgtgcgctgaagctggataacaacaatgaaccctgcgggattctcggcatgggcgcgcgtattttctccagcggtagagacccgaaaacaggcacctcccttgccgaagaccgtcgcatggcgcgcggcatgcgtcgcaatcgagaccgcacgttgctacgcaaacatgaccttatgcagaaactcatcgccaacggcttgatgcccacagacaaagcacaacgcaaacaactggaaagcctgtgtccctaccaactgcggagcaagggtgtcaaaggagaactcacgctccacgaactcggcagagcgttattccatctccaccagcgacgcggtttcaaaagcaaccgaatcaccgataagggcggagacgaaagcggcaccataaaagtatcgatcaaatcaacccgtgaagccatcaaaaaagcaaaggcacactcttatggcgactatcttgcatcactccataagaagcgagaaagcgtgcgggcacgactacgcggttcaacgcaaaaagacaaacgatacgacatttatgccgaccgtagcctcatcgaagaagaattcgaaaccctgtggaacacacaaaaaacctatcacccgaaaaccttgaccgatacagcacgtgagtcactgcacggtgtcttcttccgtcaacgccccttgcgccccgtggaacccggcaagtgccgactcgaccccacacaagcacgtgccccttgggcattgcccctgacacaacacttccgtatcgtcaaagaagtcaataatctttattggtatgactcccgccaagaaaaacacgagctcgccctcgatgaaaaacaacgactcataacgatgctcctagaaaaaaaagaagtcacgttcaaagccatgaaaaaagccctagggatagacgaccccgaagcctatttcaatctcgaaagcgataaacgtaaaaatctcaaaggtgatcttgtcgcttacgccatcgccaacaaaaatatttacggctcagaatggcgagggcttgaccccaccgaccaaaataatatcgttacaattctgctcgactcgaccctaagcgatggtgacgccaaacaacgcctaacagacgagcacgctatccccgaggaaactgccgagcggttgctcacagtgcagctacccgtgagttactgccattacagcgaaaaagtcctcgccaaactcgtgcccatgatggaatcgcaagggctcaacgagtataacgctatcatcaccgccgactacacgccaccgcaagaatacgacaacaaggctttaccccgcctgccctactacggacaggttgtcccctccgcagtcatcggcgcaaccaatgacctcaaacatcaagaaatacaacgctatgggcgtatcaacaaccccactgtccacataggcttgaaccagctgcgtaagctcataaatgccctaataaaagacaaacacttcggtaaacccgaacagattattgtcgaatttgcccgcgacctaaaaaaatcatgggaggaacgcagagaaatagaacgccaacaaacagagaaccaaaagaaaaatgacgagcgcaacaaaaagattcaaaaacttgactttacgcccaacggtgccaatcgcatgcgtatgcgtctatgggaagagacagacaaaaagtgcatttatacaggaaagccgattcccctcagtaaattatttacaaaagaaattgaggatgaccatatcctacctttttctagaactctcgataatagtgccaacaaccgcctcgtctgttatggctacgccaataagcaaaaaggcaaccaaacgccttatgaggctttcggtaatctcaagcatagtaaagactacgacggggggtgggatggtatactcgaccgtgcctcgcagctcagaaaagaacgtagcaaacgttttgctcctgatgccatagaacgctacaaggaagaacacgattttatcgaccgacaactccatgatactgcctacctcgccaagattgccaagggttatctgggcaagttatacgacaaccccttaagtcacgtctgggtatccccggggcaaatgactgccctgttacgcggcaagtggggcttgaacaatccgcttggcgacaatcaattcaaagaccgcaacgaccaccgccaccatgccatcgatgcctttgttgttgctgccaccagccgaagcatgctgcaaaaagtcagcacacaggcagcaaaaccaggtaacggcagactcatcgccgatatgccacccccatgggagggctaccgagaccagttcatccagcatttcaagaaactggttgtctcgcacaagcccgaccacagcatggcagcccaactccataacgaaaccgcctatggcaaaatcaaggtgccacccggcaccaccgactcatacaactatgtggtgcgtaaaaatattgccgacttgaccgaaggcgaagtggcacgcatccaagacgaagacgtgcgaggttatgtgcaagaacacctcgcacaatcggagggcaagccccataaagaagccctgcaagcccttgtcgataaacaacccaacagagaaaggatccccaagcgcgggcgcgggcagaaaccctacgtcaaaaaggtgcgtattcacttaccgaacaaaggcggcgcgcccccacccttgattcctatcaaagacaaacaaggcaagccttacaaatactacgaccgcggcaagaaccattgtgtcgatgtttatgaaaatgaggatgggagcatctatgcttacacctacagcatcttcgaagccaatcagctgaacaagcaaggcaagtgggataccaaacatccccacccgttgccacgagaaggcaaaaagcccttaatgcgagtctacaaaggtgattgcctcaaagtgacgattaacggtgatacccaaatcattaaagtgcagaaattaatgccttctgccagccgctttgttacagtatcacacaccgatgctggtgattttgtgaaaagagtcaaagaccgcgatgatgccttcaagtggatttttatcgcttttaactacctgaaaaaatatcaagcccgcaaggtgcgtgtcgatatgctcgggcgcgtttatcatgtgcaaccgcctcagccttgattagcgcgtttatcttatggtgggccacgttctcgatatcagcacgcaaggcaggcgactcgccttgtatcgcggctttatcacgattagcgaccgcgacgacaacgaagtcggacgcgtcgccatcaacgatatcgaagccgtcattgtcagtgcctacggcgttacctactcgcacaacattcttgtttctttgactcaacacaaaatcattgtcgttctctgtggcgataaccacgcgccctgcgggttgctcctgcccctcgacggctactaccgacaatccgcacgcatgcaagcccaagcagccatgaaacgccccttagccaaacgcctgtggcaactgctcgtccaagccaaaatccgccatcagggtgccgtgctgcaactggcaggacgcgaagcccaagccttctttgccttcgccaacaaagtccgccccggcgaccccgacaacatcgaagcacaaatggcaagacgctattggagtgccctcttcggtaagcactttttacgagacagcaaaaagcccggcgtcaatggcatcttaaactacggctatgccgtgatacgcgcggcggtggcgcgctctgttgtcgccgccggcttgcacccaaccctcggcttatcgcaccacaaccaatacaacccaatgtgcctcgtcgatgatgtcatggaacccttccgccccctcgtggactattacgtagcccgccacgttaaagacgaagaacaggaactagaaaaaacaatgaaacgcgacttggtcgacttgctggcgatggatatgcacaccaacgagggccaccggttggcagcatcgctggcacgttccatcgaagacggacaagcaaaactgatattcccgcaagaccccctgcccctagactttgccgaaacggtgagggcataacatgctgtctgggtatcgaatcatgtggttacttgtgatgtttgacctgccggttacgagcaaaaagcagcagaaagccgcaaccacgttcaggaaccatttgctggatgaaggcttccagatggcacaattttccgtgtatatgcgctttacgtatggtaaggaaagtgcggaggcttattgcaaaagagtgcagcaagcgttgcctcgctggggtaaagtgtctattttgaccattaccgacaaacaatacgagaggatgatctgtttttatggtggtgcagcagaaccagcaaaaaagaaccctgagcaactccttttgttctagctcttgggtgtttttttctggggtggacaaacgagaagcccctgaagtttcaggggcctctctctgtgccagactaccatgcggggctttgtgattcaaccgcaacaagtctgaagaaggggacgaacggctcgacagac

SEQ ID NO: 2013 - DNA, 23108 bp, synthetic construct
  variation 15034..15094: note = n is a, c, g, or t
  misc_feature 1..23108: note = Synthetic
  variation 14536..14614: note = n is a, c, g, or t
  source 1..23108: mol_type = other DNA
gatcacaagttgcgcttccgcaaaacggtaaaagaggagaaagagcaaaaatgccccgagatgcggcagtttgcccaaaaatttgaccgcttcaagccaactttgtgcggcacgcgcttccagttgccgctctttgggcaaagcgaaaatatgccagacggcgaggaggaaaaagacggtcgccccgagtgcaaacgcttgttgccacggagaaaatccgtggaaagttttcgtattggcgacaaagatcagcaatcccccgttggcgaggatcatcgccgcgcggtagcagacgctgcgccagccggagtaaacggcctgttgatggctgtcgagcgcgacgaggtaaaagccgtcggcggcaatgtcgtgcgtcgctgaaaagaacgctccggcaagcagaagataaaagagcgcttgaggcagtggatccagcaacaacaccgcggcgccgaaagcaaggcaaagcgcgaactgcattgcaatgatccactttttcttggttgccgtacagtcgatgagcgacgaccagagcggcttgaaaacccatggaaaaccgaggatgctgacattgcgggcgattgtttcgggggcttcacccagcgcggcaaagaggacgacggcgacttcgcagatgatcgccgccggcaccccctccgcaaaatagagcgaaaagatccacgaggggaaacacttgttgatggatttcggcattttttatcctcttgaaataaaaacgcggttccctcaaaaattcagggaaaccgcgttggattgcaactttgtaaaaagttttattcccactcaatcgtcgcggggcccttggggctcagatcgtagagcacgcggcagacacccggcacttcggcgagaatccggtcggtgatcttcttgaggagcgcccagtcgagttccggcacggtcgccgacatcgcgtcgacggtgttgacggcgcggatgatgaccggccagtcgaaaacgcgcttgccgtcgcggacgccggtcgagcggtaatcgggcacgaccgtaaagaactgccagactttgccgaccaaaccggcattggcgaattcttcgcgcaggatcgcgtcggcttcgcgcaacgcgttgaggcggtcgcgggtgatcgcaccggtgcagcggacgccgagaccggggcccgggaagggctgacggttgaccatcgagtcgggcagaccgagggcggcgccgacgacgcggacttcatccttgaagagcagtttgacgggctcgaccaactggaatttgagatcttccggcaaaccgccgacgttgtggtgcgccttgacgccgtggctttcgaggatgtcggggtagatcgtcccctgcgcgaggaagtcgatgttttccagtttgcgcgcttcttcttcgaagacgcggatgaattcgccgccgatgaccttgcgcttggcttcgggttcggcaacgcccgcgagtttgtcgaggaaacggtcggtcgcatcgacgtagatcagattcgccgccatctggttgcggaaaacttcgatgacctgttcgctttcgcctttgcgcatcagaccgtgattgacgtgaacgcagacgagctgtttgccgatcgccttgacgagcaacgccgcgacgacgctgctgtcgacaccgccggaaagcgcgagcaacaccttgcccgtgccgacttgagcgcgcactttggcgatctcttcggcaatgaatttttcagcgagttcgcgggtgttgatccgcttcatatcagccggtctcacattttcatcgatcatagtgaaattcctttattttgttgttgttttaatataacaaaaaaggagcgatttgtcaatcgaaacccgaaaaaaatctacaaaaaaacgtgttaaaaatataaaaaggtaatttagtaaggaaattttgccgtcttctttggggcggcgttcaaaaagaaaaaagcacgaaacgttatcgtgtccagcgccacggcgcgagaaacttttccgactgcgaaaagggggcgctgccgaaaaaaccgcggtgggcggaaaggggcgacgggtggggcgcggcaaggatcaggtggtcgcgatcttgcgcgatcagctcttttttgccgatggcgaaattgccccagaggatgaaaaccttgtgacgctccttttgcgcgatggcgcgcacgatcgcgtcggtgaacttttcccagtggagcttgcggtggctgcccggttgattttgccgcacggaaagcacgctgttgagcaacaaaacgccatttttcgcccacggcgcaagatcggtcgaagcggggcagggcacgccgaggtcgcggctgtattcctgaaagatgttgcgaagcgacgggggcgttttgacgccgtcgggcacggaaaacgcgagtccctgcgcttcgcccgggttgtgataggggtcctgcccgatgatgacgacttggattgcctgcggcggcgtcaattcgagcgcgtgaaacagcgcgccgcgcggcgggtagaccgtctgcgtttcgcgttcggcttcgacgcccgcgaggatccggtcaagatgcgcaaagtcggcgaagccgtcgagatagcttttccaggcgtcgggcaaaaaatccatcgcgcttaaagttccgagatcgaaacgcgcacctttgaggtgatgctttcgccgggcgcaagcatcggcaagatccccttggcggcgtttgccgcctgaccttcgggaaggcagttcgccggttcaagaccgaggacgtattcgccttgccccatcattttccactcgatgagatagggcaactctttggtgcggtagctgacgcgaagtttccgtttgctgtcgtaattgacgagttcgatcgcggcgaagccgtcggcgtccgccgggatcttgtgataaaagacctgttccgtgaaaccggcttgcggcgcttccatatactgccacgccttgagccccgcttgggcaacggcgttttgcggcacgacttcgtgctccggcgcttcgagcgtcgcgccaaaggaaacgagcggccagccgaaattcatgtgcagcaacagcatgtaaggcgattggcggaaaccgtcgttggtgacggagttttcgatctcgatcgtattgtcgccgtaggcggttgtgatcgtgcggcgcaacagcagattttcgccgaaaacgcgcgcgtggcgcgccgtgccggaaacggtcaaaacatagcggccgttttcccacttggcggaagtgctcaaatcggaaaccggcgtgtgcgagatcctgccgtggagcccgtggctttcgccgttgacttcgccgggaccgccgacgttgagaagccccgcggttgtcagcatgccgccgccccaggtgcggagccactcgaagccctgcgcgtcgtaaaaggcggggctggcgctgccgtcgttggggagccagacgaaattctgcccagaaaagcttgcttcgccgatgtcgagcgcgcggtcggggtaaacgcagaaatgcaagccgctgccgttgtcgacgtcgacgagccgcatgcctctgccggggccttcggcgatttccagttgacggatggcggcaagttgacgcaacgagccgagcgcgggacggtcactttcggtatagctcataaatcctcctgaattttgcgggaagccgccaaaatggcgcggtaaatgtcaagtatttgcgcttcggggatcaccccgctgttgagttgcgcgattttttggagcaacaattcttcgcgcgccgcatccaggacgggcagcgcgcgttcttttttataaagcccgatctcgcgggaaagcgcgcaacgctcttggagcgcggcgacgatttcgcggtcgacgcgatcgatctcgacgcgcagttgcggcagatctttcatcggatgaatcctttccacgtgaggcaaatgccggcgggcaaaactttgccggtgctttccggaatgctcatttcgcgcgcgtcgatctcgccttttgaaccaaaaacttgttcgacgagccgctgcaacacgaggatggaaaatccgggcgagtgcgaactcaagaccagcgtgaattccttgcccgggcggtgcaacgccttgcacgattccagcaacggcaaaagatcgctttcgattttccacaattcgcctttgttgccgcgaccgaaagtcggcggatcgagggcgatcagatcgtactgggagccgcggcgcaattcgcgtttgacgaatttgttgacgtcgtcggcgatccagcggatcgtgttgggcacgtcgcagttgagctgttggatctcgcggccccattcgatcatgccgagcgcggcgtcgaggtgacagacttttgcgccggaacgcgccatcgccatactgcccaagccggagtagccgaaaagattgagcatgtttttgtctttgccgtccaaattggcgaaaatctgccagttggcgtactgctcggcgaaaaagccgaggtggccgaagttggtcggcttgaccttgatcctgaaatttgcgtactcgatcacccacgattcggggagctttttcgaccagccgcccgtgccgtcgtttttgcggcaaaaggtcgattccgctgcttcccattcgcacgcgggcaatgagggcgcccaaaaggcgttgagggcagggcggatgatgcggtgtttccccacttgttcaagtttgcgcagattgccgctgtctaaaagttggtaaagatcgttattcattttggtagatcacttccccgcgccgcacggtcatcagcaagcggttggttcccttttcaaagatcgcgaggtcggcgagccgcccggggagcaacacgccgcggtcgaggaagccgaaattgctcgcgggattggcagtgaccgcctgtgccgcgcgggtctcggcgaggtgccccgaactcatcaaactgtgccagccggtgtcgagcatcgtcgtcgtgccggcgaaaatgccgtcttccgtttgggaaaagccgttgaccaccttgatcggcgtagggccgatccggtagttgccgtcgggcatgttgtacgccatcgtgccgtcgctgatgccgatgatgcggttcgcccgcttgcaacggcaggcgagatcgaccatccgcgggtggacgtggcggccgtcgatgatcatttcggcggtgacgcgggggtcggtcagcacgatgccggcgagggtgatctcgcgctggtgcaacggcaacataccgttgaacaaatgcgtgcagtaattggcgccggcgtcgatcgcacgcaaggttttctcgccgtcggcgagactgtgccccatcgacggcttgacgtcgacactgcgcagatattcgatgagcctggtggcgttttccagttccggggcgaaggtcatcatcttgacgagtccgccgcccgccgagatcaattccttggcgagataaaggtcgatcgggctgatcgcgctttccggctgggaaccgcgccggagcggattgagaaacggtccttccaagtggatcgcgagcggttccgcgccgggcatcggctttttcatctcgtcggcgaggcgcgccagatttttgagcattttttccggttcgtcggcgacgacgctcggaaaaaatccggtgacgccgcaaccgccgagcacgcggctcatttcctgcaacgtcgacggtgaatcggcgatcgtcgagcagtcgcaaccgccggcgccgtgaatgtgggtgtcgatgaaacccggcgtgatgtaggcgtctttgaaacaatggatctcaaaggtgtcgtccatcgcgaaaccggaaagtccgccgacggcgagaatggtctcgtcctgaaccagcaccgccgcgtgttcgatcgtgcggtcgggggtgatcatgtagtccgcctgatagaggacgcgatgtttctttttttcgttcatcgtttcacttcaccgtcattacgcaaagagttttttccgcagatagcggcactggatgatcttttcgcgcagttcgttttcgccgtagaagtagtggttcgccgcctcgaagccgatgcgcgaatcgcttttgacgaccttgagcagtcgaagcgcgagcgattcctcctcgtcgatcaaagcccgggtcgcatcgagcttgccggcgtcgcgcaaacagatgaaagcaatctgacagtaggtactgcgcagacagcagtaagtgccctcggcgcggctccacaattcctcgaaattggcgcggtattgcgcatcgagtttcgtcccgatcgcgcgcaacttttccaacgcgacgccccatttttcggaaacgtcgcggaaggcgttttccatcacgtcggcgggatagtgaccgttgcccgaccagaggtcgaggtcgtcgtaaggaatgccgcagaccatgccggcggcaagaccggtctttttctcataaagcaagtttgccgggccgacgttttgcggcgagtagtaaatctgataagcgtcgtggaagggaatcccgcggaacgcttcgccgaaatcgcgccagacggcgtagacttccttgccgaaaggcccgaattggagatcggcaagctcggtcgcgcgatgcttgagcaattccagattgccgccggggtagccgccgagcgtccagctgagcatgatgttttcgacgccgatcttgcggagattgtcgaggtgctcctcgacgagcgtcggcacggggatcgacgggatcccgcccatttcccaactggtgttggcttggatcttggcgacggtgacgtggccggtttccttcgccattttccacatacgctgcgcctgcgcgccggggccgaccttggagatcgagtagtcgcgcaccttgcccaaaacgccgccgatgtggctctcgacgccggtttcgctgacattcatgatctcgacgttttttgggagcatttccagcagctggcgatcccattggggctcccacgaccaggtgtaggcgatgagccgcatggcggtgccggacttttgaatgccgtcgtcgatcgctttcatcacggcggcgatgttttccgccttggagtgctgatgacaggcggggcagtcggtcgccatttcagagggcagcggcggatcgtcgggatccaccggagcgaggtcgcgggcgagacaatgggtgacattctcgctctgggtgatcgtgtaaatgccgccgagttcggggacggcgcggcagagtttttcgatgccgtcggaaaggttttcgagcatcccgggcgcccacgggcagaaagaacggctgccggtcgacgcgtggacgggaccgcgccactcttcgtgctcgagtttgatgcgagcgggaatgccgcgcggctcgttgaagtaaaggaaaagcccgatgccgtacttgcggcaacgctgggcgatcgccttgagcttcgccaaccgctcgtcgcaacgcgccgaaagcggcatatccttgccgagataggggatcaactgatagaggattccgggcatccagacggcgttgacgccgcaactggcgtaatcgcgcaaaatgctttcagggaaaggatcgggcgcttccgggagcaacgcatcgccgtagacggcggcgtaggaaaagatcatcttgagatgggtcgcatcgggcttgccggtaaagggcttctgcccgaatttcgcgatgaagtcaaagggtgcttcgctcgtttcggggagccgggcattgacttctttcatcgtcttggcgatttcggcgaccgcggcgtgctcggtgtcggaaagctcgcggtagacgaccttgtcgcactgcggcttgaaaaaacttaatttgacgaaaaggaaatcgtcttcgaggagcgtgaactccaatttttccggcgtccagttgagaagttttaaaagttgctcgtaattgagcagttgccagttgtatcggatcagcgtctgaaaaccgcgatccatatatttgtcgagcgcgcggtcgtcgcggacgagccccatttcggcagcggcggcaaggatgtttgcttcgcttgtttcgagcacttcggcaaggcgtttgggggaaacgcggttccagttgcgccagatgacgccgaggtgcggagcgggaaagtgcgcgtaatcgagcgccttgggggcgctgccgatgggaagttcctgaatcgtcatataaaatctccttatctttaagtgtacttatggtaaatatagcgtcagattgccgatttgcaagttcaaaatgcaaaaatcatatgagcgattatatcaacgccaagaatgcagatgaaactacccccgtcccctgcgtcgcctttgtcttcttgagtcttgtgtcccgtgccggcggcgcggtacgctgctttgcgccgatcaagcaccttggttgcttaaccttggcaggttttgcgactgccctttttttggggggatcaacgcttgattatgcccgcacgtcgccgatgttgtcggcgttgcacaagatcatgacgaggcggtcgatgccgagcgcacagccggaagattcgggcaatcccttgtcgagcgcggcaaagaaagcctcgggctcggggtagcgcgccatattctgactggcgcgaaacgcggcggatttttggaagcgttccttttgctccgcggcgtcggtcaattcgccgaacgcgttggcgagttcgacgccgccgaggtaaagttcccagcgtcgggcgacgcgcggatcaacttcggaaattttggaaagcgacgcgcgattggcggggtagtccattaaaaaggtgagcccttctttgccgagttcaggttcgactttggtgaccatccgttcgtcaaatgtgccgtcggcgtccgcctgaaacgcagaaacgccggcgtagcgtttgaaagcgtcgtcaacggtgatgaaagtcgcgcgaccgaggtcgtagcttttgccccagaaattcactttggtcgtgccaaagagtttctgcgccgtttccatcacgagcgatgcggtaaagttggcgagggtgaggtagtcccattttgcggcgtagaattcaagcatcgtaaattcctcgcgatgcttgcgcccgaattcgccgagccggaaacaactgccgatctgaaagatcttttgcatgccgtcggcaaggaggcatttcatctcaagttcagggctggtgcgcaaaaactgctccccggagggcacagcctcgatgtattcttcaggggcaggggcggcgatgcgcactttggtttcgacctcgaggaagcccgcactataaaaaaaatcgcgcactgcgcgcaaaaaagcggagcgcagtgcgagattttgaagcttgtcagccattcaaacttacgctttgctgacgcgttcggcgtaggcgccggtacgggtgtcgatcttgatgatgtcgccctgattgatgaaaagcggcacctgaagttcgtaaccgttgtcgatcttggcgggcttcatcacgttggtcgcggtatcgccgcggacgcccggctcggtctcggtgatttccttttcgatgaaagtcggcagcgcgatgtcgatcggttcgccgttgaaaaggacgaaattgcagaggctttcttcgatcaggaagtaggttttgttgccgaggacgtcggcggcaacgctcatttcttcaaaggtgttgggatcgctgaaaatgtagctgttgccgtcgaagtaggagtaatacatctcgcgctcttcgatatcgggctcatcgattttgtcggtggggcgataggttttttccataccgatgccggtgatcatatttttcatgcggcagcggtagagcgcggtgcctttgccgggtttgcagaattcaaactcggtgatgacccacggcgctccgtcgatctgaattttcagacccttcttgagatcggatgcactgaacataagttactccttgcaaatggggtttcagtttgcatacaaatgatattctattaatatacacgcgaatcgcgttttttgcaacttgatttttgaaaaaatgatgctaatttaacttttgaacatgttttcaatggattgatacaagaaaggtgtttcttatggaaaaggtttttgcttttgatgttgggaccgcatcgttgggtattgctgtgcgcaaagattttgatatgattcgttatgaatctttgttgttaccccaagaggctggtggaatggatgagcttcgagaggctcgcaggcaatatcgcacaagattagcacacgcggcaagagaggcatattggaaaagaatttgcgaggaagctggaatagaagtcttgcattcccgtattcatggtgatgcatccttacatattccatcgtcaccgggagatcctcgattggaacgagaatttgcagcaccgggggatgagacaatctatacgtcttgtttgttgagaattaaacttctgcaaggtgcaaaacttgaaggatggcaggtcttcaaggcggttcgttccgctttgcaacgacgaggatttgatcgaaatgtgccatggaaaaatcgtgcggcttcaaagaccaatgccgatgatgattccaagaccgcaaagaatgcgatggaatacgaaaagatgctgttggaaattgtgaatcaacaaagggaatatttgtatccgtgttattttgatgcctttcagatggggctgtggaatccccgtaacaaccaaatattactccgcccgtcaaagatatcgaatcgtgcccgcggttatactccccctcgcgaattagtgatcgcagagttgagtgctttgctacaaaatgctgcaaagcttttcccaaagttggttggaaaaatagatgaagttctttggggaccaggaaaagaacagtatgcttccttttttgcagaaaaacgcaatgcgcttcatctaaaggaagggagtgctggcgattgggaatcgttacttggacaaaaaatccctcgttttgataatcgtcaaccgggaaaatgtgcattgattcctcgtttccacgtatgtcaagcaagcgatactgcgataattgaatcaacttttttgctcaaagtaaaaaatcttcgtgtgctttctccagaggggaaagaggttttcttttcgccggaaacgatacgagttattttagatacggcaagaattaaggcacgagcaaaaagggaagaattgcgtttagcgcaagcagataaagaagcaattcaagcggcagtcgcatctgcctataaaatcacaaagactgacttgaaaaaaacacttcgcagtatgaaatatgatattcttcctggaaacgaagaggtcgaagcacctaaaatttccggacgggcaagattatctcgccctgctgcaaaaattatgcgagatctcattttgagcggagaatcgcctcgggcgttttatcagaaattgctccaatgtccgcctaaagatattcctggtgccacgttatctgatgacctgcagtttttgctgatgatgccagatagttgggagggaattcatattccggatatggcaggcaaaaaaattcaagagagtgctcaatctccagatgatctcgtgcgacaattgattgctgaacagaggagtccaatcgttcggttgcgattggagatttttgatcgagagttgaaacgacttttggatgatccagcaattggtaagcctgatcgcatcgtgatggaatttgtacgaggagattttctcggagaagaaaaaaagagaaagcttgaagctgagataaaaagacgccataaagaaaatttagaaattcgcactactgctacggaacaaggttatagcagcggaacagaccttttgaaacttaagttgctcaaagagcaagcatacgtgtgcccttatacgggagatgttctttcttgctttgctttggaggatttggaagtcgatcatattgttccgcgccatggcggtaaaaacggttctgatggatttacaaataaagtcgttacaagccgaacgaccaatcagttgaaaggcgcccgtaccccatatgaatttttgcatggttcagggaaatggacggcgtattgcaatcgggtgatggcgatgaaagtttccaagcgaaagcaacgtctgttgttgtctcctgatgcagaaaaactcgatcaaaaatattcggatctttgctccacggcatggattgctcgcgtttttcgggatattgccgccgttcgctgttgttggccagaaggagctataggaagcgaacgtcatattgttgtaataaacggcgcgataacggctgcgttgcgtcgtcgttatcgaattgattcattgcttgctcctgaatgcaaaagtgccgatgaaattgaaaagaaaaatcgcgatgataagcgtcatcatgcacttgatgcaatggttttgacatttacgactttttggatgcgtaatcctgctttgcgagataaattggcactgccggacaaaatagatcgatattatttccagaagtacatcgatgaggttaatcctcgtaatatcatatttcccagagctggattggaaaaaacgatttacggaaaaagagagattgatggtcaaagcaagatgactaaaagagaagacattgtttcttttggtattgataacaaggggaaatttgttgaaaaatcggtgctctcaaactttagagatgtatgcgatgaaaagttacgttcgtatttgcaaacatcctttgcaaatgcaaaaatagacagcactgaaaaatggatgttttggtgtcaaaacttaaaaagcccagataccgggatgccgattaaaaaggtgagaattgtaaaaggaggcatcgaggaatataaaaatctttccaaagacggagatgtttttgggggacaatatcgcaagggtgatcagcacaaagggtattttgtttatcttgacacaaaaaacaagcctcgtgttgcaccagtctatgctcatgcttctgtttcccttgagcgcgaaaaattatgcaaacttggttttactgttgttgatttttttcaaagtggctgcagtgtggaaataaaagttcatgcgatcagtggaaaaaatcacgtttcgcccggtgtttatatgcttacttcaatctggacgcagggtacaattgcgctctttaaaaatggagaaaagtatcttgtcagcctttcgtcgatttctgatattgcgtcgaatctaaaaagatgttagaagtatgagttatcaactgctgcatattctttcgcatggatgcattttgcgtaaagagcgaggacagttggttatgcgtacgccacagggggatgaaaagcgtcgcgccttggaagatttgcgtgcgattattattgcagcgcgcgggctctcgtttagtagcgatctccttgaagcgttatgctcaaacggaactgttgttttgctctgcaatgaaagatattgcccttgtggcattgttgctccattgactcacgttgttcaaactgagtcggtagtgcaacaatgtaagattggatcaattcttcactcgcgattatggaatcgtattgttgcagacaaaatagaaaatcaagctaacattctacgtctatttgaaatttcatcaggatttccccgcccaataggaaaaaggaattacgaagaagcgactgccgcgcgttattattggcgtaagttttttgagagtttgggggtgccctcggaaatcagagatcaagaaagaaataccccgattaataacatgttgaactatggctatgctgttctttcagcattgattcatcgctctattgtaggtcatggattattgcctgaaatcggtttccatcacgcacttcgttttgccggatatcctcttgtctatgatttgatggaaccttttcgtcctatggtagattatttgctgttgcttttcttaaggggaagggcaggttttgaagatgaaaaactatttgaagcatggtgtcgcaatgtcgcaacggggttgttgcagatagtgcttaaaacgccacagcaaccgatgaaacttttgtatgccattgatcagtatattgcgatgattgccgattgcttaaaaaccaacaaaattacaccttattggagtccggttcttgaaaaacagtcgattcaaaatgggatggatcataacaatgtttgatctgccggttatgacgaccgcagaacgcaaagaggcgacaaaatttcgcaaaaatctgttggatgatggttatactatgattaatttttccgtctatgtacgtccatgtgtggactggcaacgtatgcggaagcacacagagcgcttgcaatgttttactcccgtcggggggaatgttcgaactttttttataacggatcgccagtggatggacgcagtttgtgttgttggggctgattatccagaggctcacaagttgcctcctgaaatgccggaacaacttgaattttggtaaaaacgaaaacggatatacaggcgaaacaataaagtttcggtgctgtatatccgcattcatcagttaagatttgagtgtaacttaatatagcacagagatgttgattttgcaaattattacaaaacatcttgttgcgcaacggtttgcaaaaccatcctctaatataccatcaaaaaacactcaaatcaaaacnnnnnnnnnnnnnnnnnnnnnnnnnnnnnnnnnnnnnnnnnnnnnnnnnnnnnnnnnnnnnnnnnnnnnnnnnnnnnnnctctaatataccatcaaaaaacactcaaatcaaaacttaatattaaacactctgatattgttgatctctaatataccatcaaaaaacactcaaatcaaaacaaggccgccgatattttcaacaacaagatcctctaatataccatcaaaaaacactcaaatcaaaacagcgacaagccgtttttggcgcagatgccgctctaatataccatcaaaaaacactcaaatcaaaaccctttgctgtcgtaataccacttaattgtcctctaatataccatcaaaaaacactcaaatcaaaacgcacagcaaaagataatggagcattgtctgctctaatataccatcaaaaaacactcaaatcaaaacagtacttcatcgacccgaacaccggcagtactctaatataccatcaaaaaacacnnnnnnnnnnnnnnnnnnnnnnnnnnnnnnnnnnnnnnnnnnnnnnnnnnnnnnnnnnnnncatcaaaaaacactcaaatcaaaacttgacaccgatgtgattcaggagaagctcgctctaatataccatcaaaaaacactcaaatcaaaacagaatgggcttcggctcgttgcaacaacgtctctaatataccatcaaaaaacactcaaatcaaaacctctcgccggactgtcgcacttcaccctgcctctaatataccaccaaaaaacactcaaatcaaaacgcgggctcatctctcatctctcatctctcatctctcatctctcatctcttcaaagcgccttactcggcaacgacttcaaaaaaaaaggcggccgcatcgctgcgaccgcccttggacggatctcaaattccgggaacttatttatcccaggcgtgaccggcggagccgagcacgttgatgatcttgtgcgtgtacatcgccttcatccggtcacgggcggggccgaggtacttgcggggatcgaattccgccggcttgtcgacgaagaccttgcggatgcccgcggtcatcgccagacgcgagtcggagtcgatgttgatcttgcagaccgcggatttcgccgcttcgcggagctgttcttccggaatgccgaccgccgccttgagggcgccgccgttggcgttgatgatgtcgacttcttcctgcggcacgctcgaggagccgtggagcacgatcgggaaaccgggcagctgcttttcgaccgccttgagcacgtcaaaggcgagcggcggcggcacgagacggccggtcttgggatcgacggtgcactgttcgggggtgaacttgtaagcgccatggctggtgccgatcgaaatcgcgaggctgtcgacgccggttttggtgacgaaatcgaccacttcttcgggtttcgtatagtgcgattcggcggcggaaacttcgtcttcgacgccggcgagcacgccgagctcaccctcgacggtcacatcgaactggtgggcgtattcgcagacttttttggtcagcgcaacgttttcctcatagggaagggcggaaccgtcgatcatcaccgacgagaaaccgaattcgatacagctcttgcagagctcgaaagaatcgccgtggtcgaggtgcaggcagatcggaatcgcacctttgccgttggaaatttccttggagtattcgaccgcgccctgcgccatgtagcgcaaaagcgtctggttggcgtagttgcgggcgcccttggaaacctgcaaaatcaccggcgaggcgttttcggtgcaagcctggatgatcgcctggagctgctccatgttgttgaagttgaaggcgggaatggcgtatttgccagccatcgcctttttgaacatctccctcgtattgacgagcccgagatccttgaagttgaccatgagaatttcctttccttttctatggttttctggtggaaaatcattgatatactatacctcaaaagacaaggaaaatcaagtgcattttgcgttttttaatgcggagcaagcatgacgagtccgggcaatcccggcaaatcgaagtgcacaagcagcgcccgcaccttggggtcttcgagatcctgcgcctgaattttgacgaattcgacctctttcaatgtcgcttggacttcggggtcctgcaacacgtcgcgctcgaaacttcggcaattgccgcaccacgtcgcccagaagtcgacgacgacgaggcgattttgcgctttggcgcggctgatcgcgctttcgagttttgcgatctccgtttgcgaagaggatctttcccgcgtcaggcggattccggaaacgagataccagatcgccgccgccagcaagatcgcgctgaatgcgtatttgacgacgatcatcactttgccggggcgcggcaacgccgcaattcccgccgcggcaaagggccacggcaacgccatgccgacgccgaggcaaaacggcagcagcacgccccacttttgccctgcggcgtagcgttcggcggcggtcacgatcacgccgccgacgacaggggcgacgcacgctccggcaaggagcgccgccaataccccgagcaaaaaggcgacaacgagtttcccgccgtgcagtttgcgcgcgtcgatcgtcgcgaagcgggaaaaatcaaagtgcaggatccccgccatcgcgagggcgaaaaagccgaagattccggcgacggtaaagtgaaacgccgctttgccggcaagatcgccgaagcgaccgcccgtcaatacgacgacggcgccgactcccccgtaagcgatcgccatgcccgcgccgtagcaaatgccgcgcagaaagccttttttgcctttttccgccccgatgatcgcgaggttcacggggatcatcggcaggacgcacggcgtgaggttgagcagaaatcccccggcgatcaccgcgagaaaccagagccagccaaaagccggcagcggcgatgcggtgtcgcggtctttcgcgccgagccacgcgagaaactccttcttattcatcgcgccggaaaaggttttgacgacctttgcctgcgtgattgtttccggcagaagtccagttgatatgccgctggtgataattggaacttcctgattcgcaaagagatgatgttccggcaaaaggcaaattggcggtgcgccgttgcccggcagacggcatccctgataggtgactgaaaaatccccctgcggcatcacacgccaatggcggactcctgccgggtagattgcgtgaccgttgacgacaacgctttccggtttttcgacgacggaagcattttcaaatgcgacggaatcggcatcgaggtagtggtttttttcgatggtaacttccacgagcgtattgcccgcttgtttttcggcacgccacgcgaatggcgacgccgtcagccggatcgcggcgacgcaaagcaaaagcacaacaaattttttcatatgaattcgagcgtcggcaacatcgagtacggcgccagcaagccgcacaaacggtaaattcctctttccgaaaaccttgcgcgccccgccgtttcggggcgcggcttgttattccgtgatcggctcgaagtcggcagcgccgtgcttgcagagcggacagacgaaatcatcgggcagcgtatcgccttcgtagatgtagccgcagatcttgcagacaaaaccctttttgccggcggtctgcggtttcggtttgacgttgttctgataataggtgtaggtcatcgtttcaacgtgcgagatcactttcgcttcggtgacgctgcagatgaacatcccgtgcgtgccgagatcgacgtactgctcgaccttgagcgacataaaggagttgatgcagttgctgaggaaagccaggccgttggcggaacgcaacaccgggaagtcgcggaacttgtcgaccgatctgccgctgtggaagccgaaccgctggaagatctcaaaggtcgcttcggtcgagaggcagttgacattcatgatgccgctctgcttgatcaggtggtgcgaataattttccttgttgatcgtcacggcgatgcggttgggagtgttggtcacctgcgacaccgtgttgacgatcaagccgttgtctttgtcgccgtccttgcacgtgacgacgtaaaggccgtaaccgatgttgaaaagcgcattgaggtcgttttgcacggcgttttcctgcttttcagcgaggtaggcgctgcagagttctttcgccaaagaggagatctgctcaaaattttccgccgagagcgcggagcggatggaaaccgtcgtatcggcataggtgatgtttttgcagtttttcagcatctcgcgcatcgtcttggcggcgagcggcgcccacgaaccgttttcaatcaacgccaccgtgcggttctggaagttccgctcggtgaggtggtggatgaattccttcataaagggaaaaatatcggcattgtaggtcgtcgtcgccaacacgagcttcccgtaacggaaagcgtcttcgactgcttccgccatgtcgcagcgggcgaggtcgcaaattgtcactttggggcatccgaacatgcgcagtttttcctcgagcatctcgacggcgtgcttggtgtgaccgtagaccgacgtgtaggcgatgaggattccttcgctttcgatggcgtaactgctccagatgttgtacaaattgaggtagtagccgagattttccgtcagcacggggccgtgcagcgggcagattgtggcgatgtcgagcgtcgcggcttttttgagcaacgattgaacttgcgcgccgtatttgccgacgatgccgatgtagtagcggcgcgcttcgcacgcccaatcttcctcgacgtcgagcgcgccgaatttgccgaaaccgtctgcggaaaagagcaccttgtcgcagtcgtcgtaggtgacgatgacttccggccagtgaaccatcggcgcggtgacaaagtgaagcgtatgcttgcccagattgagcgtatcgccttcgccgacgacgatgcggcggtcttcataatccgtgccgaagaaatttttcatcatcgcgaacgccttcgccgaggaaacgatcgtcgccgcggggtagacttccatgaatttcgcgatgttggcggagtgatccggctccatatgctgaacgacgaggtagtcgacggttttgccctgcgtcgccttggcgaggttgtcgagccattcgtgagtaaagcgaacgtccaccgtatccatcaccgcaaccttctggtcgcaaatgagataagaattgtacgccatcccgttggggacgacgtactgcccttcaaacaaatcgattccgtggtcgttgacgccgatgtaagtgatgtcctgcgtgactttcatatttccctcgctgtggtagttgttgaatgtaatatttaaatatagcacaaaaaacagttttttcaattgactttcttcaccttgaaccgtatattctatgccggacaaacgacaagcaaacagggtgaatgttttgaatatcggatcattggtcatctttcacggtaaaagcgcgacggtcaccgccgtcaatcgcgataaaatcgagatccgcatcgagggcggcgcgaccaaaagcgtgcgccccaaggatgtggaatttcttcatccgggccccgtcggcgcattgccgccgccggaattgcccgcgcccgatctcgccgagctcgccgaactgctgtcgggcgaaaaggtgagctttgccgaattcacgcaacttgccttcgatcaaaacaatgccgcaagcgcctttgccgcttataaaattttacagcaaaatctttatttttccggcagcgtcgccgacggcgtgacgccgcttcccggtgacgtggtcgcggcaaaacttgccgcacttcacgaaaaggaaaatcagcaagccgagcgcgaggcgtttctcgaccgcatccgttcccgggcggtgacgcaggaagatttcgtgcgtttgcgcgagatcgaggcggtcgctctcggcgacgccgccggcagtcggctgatgcgcgatctggaaattgagccgacgccggaaaaagcgcaccgtttgttgctggatctcggcgtctggagtcctttgcgcgatccctatccggcgcgaatgaatgtggacgtcgcccccgtcgcgttgccgttgccgccctcgcgcgacgatgtcgaacgcaaggatttgacttctatgcgtgcgctcgccatcgacaatgcggggagcaacgaccccgacgacgccgtaagttttgccgacggtctgctttgggtgcacgtcgccgatcccggatgtgccatcgtcttcggcgatgcgctcgatcttgaagcgcgccgccgcggttcttccagctatctgccggaaggcgtcacgggaatgttgcccgatgaagcgcggttgcgtttcggtttggggctgacggaaacttcccccgccatcagtttcgggatcgagatcaccgatgacggcgatgcggtgctgaaaacgctttgcctttcgacggttcgcgtcgagcgttttacctatgaagacgccgcggcgatctgggaagatgcgccgctgtgtgaaatccgcggtgcgctggagcgtttccgcgcacgccgcgaagccaatggcgcgctctttttgcgcttgcccgaagtcgacgtgcaagtcgtcgacggcgaggtgaaaatcattccgactccggtaacgccggaacgggaattggtcgccaatgcgatgcttgccgccgggcaggcggtcgcgcgttacgcggcggagcagggggttcctttcccctttgtcactcaaacggaaccggaaaccgacgagcggggcacttcgctggtcgcaatgtacgcgttgcgtcacaacgcggcgccgagcgtgctgtcgctgacgccgggaaaacacagcggcttggggttgactccttacgcacgcgtcaccagtccgttgcggcgttacgccgacttgctggcgcactaccagttgcgccggatgatcctgcaacaagcgccgctttcggtcgaggaaatggaaagcgcgatcacgccgagcgaaaaagccgccgccgaccgccgcaaactggaacgctacgccaacgaatatttcctgatgatctattggctcaaccatcccgactggaacggggagggcgtcgtcatcgacagacagagtgatcgcttcaccgtcgccatcgaggaatttgcctacgagtacaagagccgctatcaggggaaattcaagatcggcgacacggtgcaattgcagtttgtgaccgccgacccggtgacgctaaagagcgtctttcacttttccgcttgctccgcaccggaaagcaaatagcggatctgcactttgccgcgcgtggctttgccgacgcaatagcagaaactcttttcctgcggcaaaaacgtgatcttgtattcgggcatcggctgcggggcgtcgtcgtcggacttttccacttgtgcaacggggccgagacggcagacattgccgttggcgtcataggtcgcccacgccagcgagctggaactggtcacggcgcggaactgaatccccttcaagttgctgattggaatctcgtagacgaaattgaggtcgctttccccgagcttgccgttatctaaaatgaccatgccgggcaaaagatcgcggtcgcggaggtcgcgtcccgcggagatcgtttttctgtcttcgtcgttttgcagataaaaggcactgcgcggcgacgggatgagccgggtgtcgaccgtgcgctcgacagcctgcaattgcgccgcgctcaacgcggcgacgccaaagagaataagaagttttttcatcgtgttttttcctaacgatcataacataatgcatcgtcaggataaatgcaaatcgcgatgcgcattttttgaattttctctctttttttactcttatttgaaaaaaaagttgctttttttattgaaaataaacggcgaaaatgctattgtaagacaaaactggaaaaaggtgcttttatcgtgctgaaacgttggttcaaatcgttgtgtttcgcttccttgttgacggcaacgggcgtttttgccgcagaatacggcgaactttcggaacgttccgccgggcggatcctgggcgtgcgcatggccaaagggtatcacttctttgtctttttgcgcccgatgccgatggacacctggctctgccgcgactatctttccggcgaagaggcagagatctatcctgccaagatggagctgatgccgtttttcgatcaggacgatgatttcgcgatcgaggtgctgacgtgctggcacattttgcacaacacgccggaatcggtgcgttaccgcgcctttgcacaattggtcaatctgccgcgcgtttcgtctgcccggcaatttatcgaaaccgtgcggcggcaaggtgttgagatcgaccggttgcgccgcgaaaacgccagtagccggtcatccgacacgcagaatcgctttttctccaaaaacggatgcggctgttcggcgggagttcagacttccgttgcgtcaagcttcgatcaatctgcggcgaacggcgcgatcgccgatctcatcac

SEQ ID NO: 2014 - DNA, 14986 bp, synthetic construct
  variation 5354..5355: note = n is a, c, g, or t
  variation 7813..7814: note = n is a, c, g, or t
  misc_feature 1..14986: note = Synthetic
  source 1..14986: mol_type = other DNA
cggttttcttttccgatatatgcaacttttcggaactgaccgaccgcatcgaatcggaagtgctgacccacctgctgaacaaatatttgaacgaaatgtccaaaatcgccatcgaatatggcggcaccattgacaagtacatcggcgatgccatcatgattttctttggcgacccggaaacattgggcgaaaaggaagacgctttggcctgcgtgaaaatggcgctggcgatgaaacgtaaactaggtgagttgcaaagggaatgggaaattctgggcatgcccaaaccgctccaggttcgcatgggcatcaataccggctactgcacggtcgggaatttcggttcggatgaaaggctggactacaccatcgtcggcgggcaggtgaacctcgccagccgcctggaaactgctgccgaggtgaaccaaatcctaatctcgcacgaaactttttcgctcatcaaagaccacattgtttgccagaaaaaggcagagttgaagatgaaaggcatcgcttatcccgtgcagacttacgaagtcatgggcatgtacgaagaattgaaaaaggaacgggaacgtatcaaaaaggaactggcggggtttcgcctgctgatagattttgataaactgaactactccgacaaactggcggccagggaaattctcgaaaatgtactcacgcatttgacgtaaggaacagtgaaaaaataaatttactttttgatgccttgaaagcacaggaaataaaggtttgataaaagaataaaattgcattttattcttttggtgttcctaattcaggctgaaagcagccttacatcagtttcagcaattcgtcttttctgtttctcgccaccggcaaagtcattttgttggacagaaggagatagccgccatcggcccgcacatattctttgatgtgccgcaaattgaccaaatgagaatggtgcgcccggaaaaaattgaaaggctccagccattcctccacgtccttcaaagttctcgaaatcagttttttacgaccgtcggtgagatagaccatcgtgtaattgctatcggaagtacaaaggataatttcgtcaggggaaacgaattcgatgctctctttggtggccagtgcgatgcggccgggcagggcagttgtttcttcttttttattgctgaaaagcacttcgaccggtttgccgcttttgcgtttgtatttttcaatggcatctttcaactcctggttttgtataggcttgagcagatagtcaagtgcattgactttaatggcccgtatgccgaattcgtcgtaggctgtggtgaaaatgacttcgaagggtagctccccacccagttcttccaaaacctcgaagccgttcagccggggcatttcaatgtccagaaagacgaggttcggcgggtctttttgcagatgttgcaaggcttccatggggtcgttgaactgggcaactacctccacgtccgggcaaaatttttccagtttccaggcaagcgtggccagggagtgtttttcgtcgtcaactaaaactgctttgatcatggcagattgtttttggatattgaaaaacgttgattttcaagaccttttatgttttttgcttaaactcagaactcatgacccggccaacaaaataaagggtttgaaacgcccaattcgcaaaatgaaaatgcgatatttttctgtgcttagtggcgtgtcaagttaatactgtcgggtacttagccagagaggagttgggcagttttgcaaacacccccggcccctaaaggtgagcagcccgaagcaccaaagacctaccgttaccatagagcgctctttttggattatctggcatccgtcgttactccaaagcgctcccctttaggggccgggggtgtttggcggacatacacattcctcatctggtaaaccatacattcaatttacgaacaggtcagaagttcttaaaatgtatccaagtccaaaatcaggataaagtcataaaaatcagcgtctttcagcgtaaaaatccttcttcttaaacaggtatgagcaactcaacccgcgtcccccccgcttctcctgcttcgttttttaaatcaataacctgaaccgaggcgttggcattcgatattttattgagcagcgacagccggtcgccggtaattttcatcccgaaagattttttgctggtgccggatttcgatttcagttgttgggctgcttcccgtccgattccgttgtcttcgatgatgcagagcaggtgcccgttttgctgccgaagcaacaggtcgagttttcctttgccttcttttttttgcatcaatccgtgccagatggcattctcgacataaggctggagcagcatgggcggaatatggaattgctccatatccaaccctttttccactttcatttcatagtcgaacaagttgtcgaaacgcatgctttccatttcgatgtagaggcgcaaggcttcgaggtcgtctttgagcggcacgaccgtacttttggagttttgcaaaataaggcgaatgaggcgggaaaagcggttgagatagtccgatgctttttccggttcgttgttgatgatgtaatattcgatggaattgaggctgttgaaaataaaatgcggattcatttgcgcccgtagcgcgctcagttccacgtccgttaatttacgttcatattcagacttgaggcgttcctcctttctcacctgaccaatccggtagcgataaaccagtatgccggccccaagcccgaccagacctgccatgcaccagaaccaccaggttttataccagaccatcgaaatatgaaggttcaatgcaaaaggttcggagagcgccagtccttcgttgttgagtgctttcactttgaactggtacgctccgcccggcacgttggtgtatgctgcgaatttgcgcttggtgccgtcaatccacgcctcgtcgaagccttccagtttgtaaaaatacctgataccctgtggcatattgtaggcaatggaagaaaattcaaaggagaaaaaattctgccggtggctcaggaaaaccgtgtcgggttggccattggcaggctttagtttccagggcttatcgaacaccttgaacgaggtgagatagggcttggggagttctttgttggtaaccagtttttccgggtaaaagagggcgattgcttttcgtttgcccactgctatcgccccggaagacaacaggctgctggcttcgtcatacccttccaagccgtaggccaggtaaaaatgttcatcaaaacgcattgtttttgtgtcgaaccgctggatggcttcattggtaaataccaggagttggttgcccagcagttttaccatgttaacctgcctgcctatcaagccatcttctttcgtaaaatggcggagaatgccgaactccaggctatcggcattggcataaccgaggcttgcctggctcgtggcaatccagatatccttgctatcagggttggcctctatatggctcattcccctgaaaacataagtgctcccacccttgtaaggcagatacacaaatttgttttcggagggtttgtatatcagcaggccattattttcccttatccataagttgccgttgatatcctcttcgatatggtcgccgcccagacttcctttccatgccgctcggagttcttcgtcaaaggtgtgaatctcattgcgccgaaggtcaattttctgcaatgcccaattgtaacctgtcacccaaagttgtcccgttctatctttttgtactttggtcatgcgtggatttgcctttggggattgcaggtgaaaaaggcgaagccgagtatttccgggttcatacaggtaaaatcgtctgtcttcgacaatgaaaattttcccattgtccagaaaagtcatgtcaaatcccaaaaatccgaagttctccccacccgtgtagccgggcggaggaggcacaaccgaccacctcccggaagtttggtcgagcacatacaaacctcttccggcttgcgccaatatgtacagctttttcctgagcgtatcctccaggattttgcgggtcaggcacatcaattcgatgtcttcgccttcataaggcacgatattgaattgctgcaccaaaggattgtaaatgaatacgccaagcccccttgccgcgctccagcatcgttgcgtttcatcaatcatatcaacgctgtaccagatacctttcttccggtcgttcgtccaggtttgtttcacacaggctgttcgtgagtcgtaaagctgcaaccccgcctgcgaattgatccagaattcatgttccgatttcgggtaaaaaccattgatggtgcccttgccaaaaacataatcccggggcttgcaggcaggattgaaatgcgaaataataccggtagccgtatcgagtacgaatactccttcataccagaccccgtagtagattttcccgtcgtaatgcggaaaaaggcagcggatggagttggcgaacccctccacttttttgtcagggtggaaataccagaagcgggttgaggatccggtgacggcattgaagcggtacagcccttctctcgaccccaaccaaaaaatgctgtcgttgaaaaggtccattttcatggacatgatggagaggcaaatgagggtatcctgttgagctttcagcgggatgcatagctcacgcttaaaatcgtccgtttccggccggtacctgtatagtcccctgtcccggaacccaatccataaatgccctcttttatctttgagcaagcagtaggggtggtgatcaggatgagaaaattcattgcccggctcgtggtcataatttttgaatgtgcctgttttatagtcgtaaacggacaggaatttagaagtagctatccagattttatcggtagtgctgtcaggcaatatatcgaggataatacccgaagatatggaggcagcgtcctgttcatccggttgaaaaacctcgatgaatgagccatcgtaacggcacaaaccgtcatcagtgccaatccaggtgaaacctctatggtctttgacaattttataaaccatattgctggttaaaccgagatcagaattcagcacatgcgggttttgaaaaaaatcctgggaataggaaaacgatggcagccctgccaaaaaacagatgcaaaggaaggtgacgtagttttgcaaggaatgggctatcattcggcagtattttaagcagccaaccggaaaaaatcacgcaacgctgtcgtttgaaccgggcgggtaataaaaaaccattgctttgaatgacctccgccagcgttgcgtgatagttgcgatatttgaaaacttatttcgtaactactaagcagggggtgtttttggggannttttctctctcctcccgcccctttctaaacagttaccttatttcaaaagatacccgcccagtgcaagaaaagccaacccttttatcgtacaccaacaaatgtaggcaatgaaggctgattttccgtaattctttaaatgctccctgaacatgatcattagattttaaaggttttgaaaaatgtgcgaacccggtgaccaggttcgcacgatcctgtggtactgtcagataaacaatttttcttcttcgggctgcgtgcccttcatgatggtcaggtaagtaggctccttttcttttttcctgaaaatggaaggaatcaacatcggcaccatctggcggtagcggcggtattgctcgccaaagtggaccagcaaatccttttcttccaggcggattgccgtcaggatgtaaaccgtgaacgcacctgcaaaaaacaaccgggtaaacgacatctccgtggccgaccagaacgcaaggatgaaaccgaagtacaagggatgacggacaaaacggtagaacaaaggcacgttaaacggcaaatgcgtgtagggttttcccctgaaataaagccatgtttgccgcagtccaaacaggtcaaagtgattgatcatgaacgtggaaagcaaaacgatgagccagcccagggcaaacaatgcccagataacgccctgcataaaaccgttttccaccacccacaccatgccgcccagcggttgccaaaaggtgaacatagtgatcaaacaggcacaagtgaacaccatgaacgtactccgctcgatctgcctcggcacgtatttcgtccaccagcgtttgaacccttgccttgccatgatgctatgctgaagcccaaacagaagtaccaacatggtgttggtgaagatggcttgcacccacgaggcttgaagggggccattcaggcttataggcaccagcaggtcgcctacgaagccaatgaggtaaagaaaagtaccgaaaaagaggaggtatgctattaccccgtacaataaaactgcaaatcgcttcattggtcgaatgatttaaaagttagaaaattgagtgaatcgaaaaggagtaattctaaaaagtcgggtgattaactccgtttgatgatgcgaaaatacaggcgggtgaggcgcatccggagcagtacattatccggtggcagggttgatgagtagttggtaaattattttgagaaacaagaatcgaaggaaaaataaattgtcagatttatttttatcaaacatctcctaccagtgctttcggaggtttatcacttactagttattttttcaccgttcctaagaaaaggaggacttcgagaaaatcacctttgccctgacaaacctgggcatcgcaatggaaaaatggcagctcctccaaatttttaacaggctgataccttgcaggtgcgagcaaggttgtatgtttaggcgcattgaagaaaatcacattcctcagttaacttttcatgccaaaaccgcgcatcatgaaaacacctttcactgtcctgttcctcctgcttgtagccacaagccttttttcacaaaacctccaaacagaaaaagtcgccaccgatttgctgaaagccatcgaagctgcgcccgaagattttcactccatccacatcctgctggccgaccaggtggacctggccagtctcgatgccacactgacggcccaacgagccactgcctcgcaacgctcctccgccgtcatcacggccttgcaggaaaaagcagatcggacgcaaggcgaactgctcgattttttggaaaacctgccagccgtgaacaggggtaccgttcagcccctttggattaccaatgccattttcctggaagcaaatgccccggcggtcgcagcgctcagccaacaccccggtgtggcctgggtggggcgaaacctcccggcggtacttcacgcccctgaaagtacatgcgctgcaccgccagtctcgcccggtggccgggagccgggtctcagcgtcatccatgccccggcgctttgggaaaaggggtacaccggctacgggcggcgggcattcatcgctgatacaggcgttgacccgactcatccggccctggagctacaatacctgggcttgtatgtaccgcaggagcaagcctggctggaactcgacccgcacaccctcctgcccgtcaacaccgagcctttcgattgccagacacacggcacccatgtcgcaggcacggtgatgggcctagacaggctgaacaacgacaccatcggtgttgcctttaatgcccaatggatggccgcccccatgctttatgtctgcggtaaaaacacgcagggcgtagcggtctccctgcaatgggcactcaaccccgacggaaacccagcgaccaccgacgacatgccggatgtcatcaacaattcctggggctatccatccgacagcctgttggtacccgattgcatcagcatctatgtannagcgggaattgctacggtatggtcagccggcaacagtggccctgctcagggaaccatcggattgccccaaaacatcaacacccatgaggtcagcatattttccataggagcgctcaatggcaacagcagtcaattgcccattgccggtttttccagcagggggccatcccagtgtggtggcacgggttccctgctcatcaagccggaagtctcggcccccggtgtcaatgtgcgctccagtgtgccgggcggcggatacaccgccaatagtggcacctccatggcggctccccatgtcagtggggctatccttttgctcaaggaagccttcccggatgcgaccgggaaggaactgaaactggcgctgtaccacacctgcaccgacctgggggtgccgggcgaagacaatacttatggcatgggggtcatcaatgtggaagctgctttcgactatctggtggcgcagggccatgtacctgtatcgccctttgttgccaacgatgtgatgctgttggaggtcagccttccattcttttcctgtgaaatgcaggtcattgctcaaatcacggtggaaaatgccggtaccgacaccctgttttctttcgatgtagtttatcaggcgggtgcaagttccaacacctggggctggtcggggtacttggctccacggcagcgggcggtggttgtcctgccgccgttgagcagtttgcctggtgcctacaagtttcaggtagaactccaaaaccccaatggcgttcccgatgcccgccctttgaacaatcgtttggtgaaaaacatccgggtatcggagcgggaaaaaatttatgccgaagtagaagggcctttcgagacggtttgcgagaacaccccggcactgctgagggcattttacagcgggcctgaaactccaagcatagcttggtacgatgcgccggtgggtggcaacaaactggcggaaggaatggtgtttgtgaccccgcctgtcacccagccaactacttggtttgcagatgtaaattaccaggcccaggcggggccatctgacctggctattggtgagaccagcctggacaacgtgcaaaacactggcctgacactcgaagtatatgcacctttcacattgaagtcggtcaaggttttcgcagatgaaactggcagtaggatactagccctgaggaacgaaacaggcgaaatcgttcaacaaagaatttatcccgttaccacgaccggcgaagtggaagtcacgttgaattggctgataaaccccggcagctattcgttgataaaaccactggggaaaacgctgttccacaacacgaccggagccgtttatccttattctgtcaaagacattttcgacatcacgggcaccaccgacggtcttggcgataccggggtctggtactatttctacgattggcaagtcgcttttgcggagccttgtggccgcacggctgttcacgtcggggtgatgcctgcgggcaacattccgcaagtcgcttttgcatttgctcccgacagcgtggatgtgtcgcaacagatgcccgtgcagttcaccaataccaccaccggtgccgcagggccttggcactggaactttggcgatggcaacgggagcctggaggaaaacccctcccacctgtatgataccgccggtgattttgtcgtcagcctgctcaccgccagcccggaaggttgtccgggatttgccctcggcacggtgcgggtcaccaggcaagtggtcagcaacaccggtgatggcgctcgctctttgcaaggcatcaccgttttccccaatcccgtttcggaaacactccttgttcggctggaactggaggcatcccaacccgtggaactggaactgttcgacctgacgggcaggagattgcggtcggtcaaatatgctgccgtgctatcggatttgttgccattcgatgtggcagggcttccgaacggtctttatttattgtgggtaaaaacgcaggagggtaggggggcttggaaagttgtcaaggggaaataggccgtttgcggaaggcatttgttccgagggaaatgctgttatttgttccctgccagggcgatagcattgctataggaagtataaaactaaatcttattttagcgccaatagaaaaggcgagtttccccgccttgtttgttctcacaacggaaaaatccttattgtgagtagctttcaaaatgtgttgcaaagctataaaagtttaccacaaaaaattctatatgccatgaaaaaaatattaggacttgacatagggacaaattctatcggttgggccctggtaaccgagcctgaaactgagcacgaagaatcatctattctaaaaacaggagttcgaataatcgcctctgacactacccacatccgtcagtacgaagaaggcaaatctgttacactcaatgcagacaggaggatgaaacgcagtatgaggcgcaacaatcaacgctacaagctccgcagaaagcttctgttgaaaaaattggtgagtatgggaatgatgacgagaaacatacttgaggatcaaaatggctgggatcaacacctgaaagttgcagacaccctttatttgtatgagataagagaccgggccgttagaggagagcagcttactctggaagaattgggaagggttttttatcaactcaaccaaaaacggggctacaagagcaatcggaaggcgtattctaaggaagatgaaacatcggaggtggaaaaatctggatccaccaatccgaaaaagaaaggcttgctggaacaaattaaagaccgggaatttatcttgaaagaaaatggctggacaatcgggcagtttttttatcacaagctgcttgagaatcccaacatccgcatcaagcaaaacacatttaccagagaagcattccaagaggaattcgaccggatatgggcaagtcagcaggatttttatccaaatgttttaacggaagatgcccgagtggaaatccgtgataaaatcctttattatcaacgaccgctcaaatcacaaaagcatttgataagcggctgtcagtttgagacgagaacttaccgtgacaagcaagggaaatcaattacacaaccaattaaagtcattccacgttcagcacccttgtttcaatattttaaattggcacagcaaatcagcaacctgacgatttccaacctatccaaagccggcgaagatgcgttcaatcgttatggagagcgcaatttgaccgataatgaaaggtcgctggttttcatctacctggattccaggaaaagggtaaaggaaaaagaagtactcaaaaaagtactcggattgaaccccaatgatggttacaaactaaattacgaagaactggaaggcaacgacagcaaagcgaaaataatcgaagcatttgagaaggaggattgcctaatgcccgatggattgttgtcgttcgacccgttccaaccatacgaaaaacaacctttctttagattgtggcacttgatctattcgttggaagacccaaatcacttggcagggaagctggagcaacaatttcagttgccggaaaaagtggcaaaacggctggccaaggtccacttgttgccggattatggaaacctgagtgcaaaagccattcttcgcctcttacctcacttgcaaaaggggctgacttacgacaaagcacaattggaagttgccaatgaaacgggcctggaagcctataaacggcacaagctaacattggatgaccaaaaacaaaggatgcttgccaaagcaatcaccgaagtaaaaataaaatccttgcgcaacccggtcgtcgagcagattttgaaccaagttgtcaacttggtcaatgctattgttgccgacaccgatttggtcagtgaagaagaaaggcgaaatgaccagtttgaaatcagggtagaaatggcaaggcaactcaaatcaagtgcaaaacaaagggcaaaaacagaaaaaaagataaaagaaaacaggcaaaagaatgacgaagcggtcaaaaaaattatggagttgggcattgcgaagccttcgctttcagacattgagaagtacaaattatggttggagtgccatggtgtttccccttattcctttgaacatatcccgttagcgaagctctttgacaaaaattactatgaaatcgaacacatcatcccacgtgcaaggtttttcgatgactcattgcagaataaaacaattgctgaaagttccatcaaccggaaaaaaggaaacatgaccgcttacgaatatatggaaagtcagggactccttaaaaaattcgagcgcttcgtactggacaacaagaatttttcaaagggaaaaaggaagcgtatgctcgaccctaacgtgccggatgatttcgtcaaccggcaattaaatgaaacacagtacatcaccagtgccattcgggagaaactgcttgaaatcagctatacagtgacaaccacaaccggaagcattactgactatttaagaaatgactgggggctgaacgaggtactgcaaaagctgaattgggagcgttacgaagcggctggtcaggtttatgacgacatagacaaagaaacgggagagataaaaaagagaatacgtggctggtcgaaacgggacgatcacaggaaccatgccttagatgccattgtggtggctttcacccgacagggatatattcagtcattgaacaatctgaaccagttatttcaaacaaacaatggcttgaggcaaagcggcaggaaattcccaaaaccaatggcgcattttacccgaaaggtgcaggaagcactggaaagcctgctcgtatctcaccgcaaaaccaacaaggtagcaacccggagaatgcacaaacacctggtaaaaggcaaggaatccggcaaagtacaggtgaccctcacaccaaggggaagactgcatgaagaaactgtttacgggaaaatcaaattcatacccgaaggtaaaaagggaatggaaaatcaaaaagaggattatgtggtccgttatccactcaatcaaaatttcgaggcgaaaagtgttccttacatcgttgacaaagccgtgcgggaaaaggtcagggaacgtttggcgcaatccaacaacgacccaaaacaggcatttaaagacctggaaaacaaccccatttacctgaacgaagagcagatgatcccgatcaaaaaagtacggtgtttcgccggtttgaaaaaacctgttgccctacgtgaaaattcaaatggcgaaccgaaggattttgtccaaaccgggaaaaatcaccacatggcgatttatcaggatgaagatggaaaccgcatcgttcaacctgtgtctttcttggaagcagtagcaagaaaaatagcaggggcagaagtatttcaacaagaacatgaaggaaagccacttgtggctacctatgccatcaacgacatgattattgttgggttagaccctaatgatatagatttttttgatcccgtcaataatgtcttgttgagcaaacacctgtacaggattcagaatacctacgctgacggaaaaaagatagatatccggtttcgtcatcatttgataacgaaaaacgaaaaaaccaatgaagaaaaaggaatagccaaaaaaatgaaaaccctgttaattgtacagagcctgaaaaaccttcagggcacaaaagtcttcatcaaccggctgggggacataaccggcatcggagaaacgctgcgaaagttggaatgaccgaccgaccagggcctaatcccatatttccggcttaaaaattgcggctttagaagaattactcattaacatcgccccccatgttaaaacgaaccctccatttcggttcgcccgcctacctgcgggtacagaacaagcaattggtcgtcgaattgccggacaaaaaagaaacgcatactgtccacattgaagacatcggcgtagtggtcttggaaaacccacaaataaccatctcccattcagccttatcgttgctgctcgaaaacaatgccgctgtcatcacctgcaacaactcctaccttcccaacggattattcctgccattggaaggaaactacctgcaaagtgaacgttttcgccatcagcagggggcgagcctgccattgaaaaaacaactttggcagcaaaccgtcatagccaaaataaacaaccaggccctattgttatcaagccagggccaggccatcgaacccatgctgcgctgggccgggcttgtaaagtctggtgacccagagaatctggaagcaagagcggcagctttttattggacgaaagtattcccacaaatccctgccttttgcagggataggtcgggcgtgcctccaaacaacatgctcaattatggttatgccatcctgcgtgcctgcactgcaagaagtttgacagccgccggacttttgcctacgatgggcatccatcaccataaccgctacaacgcctattgtttggctgatgacatcatggagccatacaggccttttgttgatatgcttgtcgctgaaatgacagagagggaatgcccgccagaaatccttgaaaaaaagcacaaggaacaattgctgaaactcctgcaattggatgtttacatcgaaggaaagaccagccccttaatgctcgccctgcaagcgacttcgatctcgcttacccgttgctttgccggcgatagccggaaaataacctatcctgctctgaaattatgaaaacccgtctcaaccaataccgtctcatgtggatattagtttttttcgacctcccggtttacacaaaagccgagcgaaaagctcacacgcagtttcgcaaggacctgatgaaaaatggtttcctcatgttccagttttcgatttacctccgtcattgctccagtatggaaaatgcggaagtgcatatcaaaagggtaaagggttttttacctgacaaaggaaaagttggcatcatgtgcattaccgaccggcaatttgggatgacacagctctatttcggtaaaaaagcagaaaaaccaccggaaggaaaccaacaactgaccctcttttgaaataaaaaaacaggtgtcaagctttgcaagacacctgtttgagcaacagttttttctttgaaaaagtgaaagctaatagattgattatcaatgcaatgctacatggtctcctgttgcaaacataatca

SEQ ID NO: 2015 - DNA, 14415 bp, synthetic construct
  source 1..14415: mol_type = other DNA
  misc_feature 1..14415: note = Synthetic
aaaatagatagtttctttgattaccttaaaatcaaaccttccgactaatattcctctaactataaatacgaataaggtaaatgcagtgatagttcccagaataagcagccagtcgaggtgcaggcgcaattgtgcactgtgaatgaataagtgattaagtccgatataagctccttggattatagcaaacaatagaacgaatatggtaaagaagagttttggtaaaaggtcggtcataatgatacctgctccctgaaacccgtaataagtgcgtcttaaattaagtgatttggcaaatgagctcattacgaggaatagaacaactacgatacctgctgtttctgtaaagtaaactatactgaataagcctgataaggttatgagtccggcatttttaagtaaatgattccatccgaaataagcagcaccttcaacaagcacgataaagagcggaaccatcaaaaacgttataggtgaccttcggcgcataaaaaacgttatatttgcaagattttataaaagtataaaaaacaaactctatgaggatttatataatagtcgttttaacaggtgttttactcttaactggttgtaatggcgacctgaagcaaaggaataaagaccttagcaatgaggattcttccttaactgtcaagaaccatatgcaggattcgtctataatggcctatataaagtctttcaacgatatacaggataacttggactctataaagataaaagctaagatacttactgtatctaatggagagaacgtaaatcaaaaggaccagatcattgccgatatgcgttctattggcgacctgatgatgaagaataagaaggaattagcatttcttcaacgaaagctgaaaaaggctaatggtaataatgcggacttacagaaaatgatagcacgccttacccaggaggtaaatgataaggatgctgagatcgcttcattacaaagccagctcgctgaatcaaatgcttcattgaaggatgttattcaacgcctgaacgatagcatgaaggtaataggttctcaaaaagagcagatcactggtatgacaagtgaattgaacactgtatattatgcaataggtacatcaaaagaactgaaacaaaaaggtgttataaagaaacaaggaagtattgccggaattggtggagctgaggaattaaagaaggacttcaattcgtcttactttaccaaatcagatttgactacactgcaggcattaccattatacagtaagttccaacaactggtaactgtccacccaagtggttcttataagatatccggtaacgggaaatctgattcacttattattagcgatgcaaaggctttctggagccaatcgaaatacctggttataatagtaaaataacactgagctttaaataaaggccggcgtatggtaaaaaaacattggtaccctataattctgacattagctgcagttattgtggtttatacatttgtaggaagtactaacacacaaggtaagccgaagaccaccaaaaaatttgaactcgcaaagaaggagtctattggaattccaacgcctcctgcaaaagattctatggccctttcatatattgaacagggggaatcgttcaaaatagattctttctttcatgtgctttcaaagaatgcaaggtttaacggaaacgtacttgtagcacataatggaaaagtattattccagggttcgttcggtgtatcaaactttaaatcaaaagagttgttaagcgattcttctgaatttcaattaggctctgtttcaaaacagtttactgctgtagctataatgatgctaaaggaacaaggcaagcttgactatactgataccattcaaaaattctttcctgattttccatacaagggtatcactattggtatgttactgtcgcatcgttctggcctgcctaactatatgtatttgtgtggtaacgtttgcagagatcaggcaaccttaatggataatatgcaagtggtgaatttgcttatcgagcaccatccgcctaagtactttcctccaaatagaaagtttgagtatagtaatactaattacgcccttctttcagcaattgcagaaaaggtaagtggcgttccatttgcagaattcctcaggtataagatttttgctccattgggaatgacacatacccatatttatgataagaacgatactgttgttcccaatatggttacaggctatgatgccaactaccgcaaggctggttacgactttcttgatggtgtttcaggagataaaggcatttattctacctcaggtgatgtgttgaaatgggaccaggctttgtatacagataagttattgaaacaatctactttaaaggaagcctttactccgcatagccgttgggtgaatgagcataactacggttatggctggaggcttaccattttcgatcacgatacattggtataccacgatggatggtggcacggtttcaatgccgcatttatgcgagatattaaaggtaagaacactataatagtacttagtaaccatgttaactggtgtattaaccagagccgccagttgcttacgatgctgcgtgaagaatcagccagcgaaggcgcaacagcatctgaaaagactgccggcggaaactaaacttattgtactttaagtttactgtatttatctaaatcggtggggtcaatggcactgagaatagtgtaaacattggatttctcatcattactagcctctgagtaaatattggccaattcatttgccttggcgttaaagaacaacagaatattgaagtttgccggcttatcgttataaacctgttgtactaaggtaagcgcatcggttattttcgatcttcctttttccggggtaacatacattacatctaaccctaaacggtgatactcatacattgctttgcgcaacggtgcaaaataggtttcatctaaaatatttgtgattaaactatagcgggtttgatcaccatctaatgggttccagcctttttcacctgagttttgggcattactaactatggtttgcgcttttaagaaataaggagttccgccattaggtgaaaatgaatcgtagtcgttgccgagaataatgtacgcatagtacgataacagtgcagtaatattatcagagtacgtgttaatattgaagataagtggctggtttaactggtacagaatatgaatgttattatcctggtagttgaacattgttgaactgtacgatgacttatagattggcctgcgtgcttgtatttgtaatgttgctgcatagtcacctgcagcatttacaacggtcatgttaaaataaagtgtgcaatctattttttcctggttcgtgaagttatcgttggtaaatttagtgttgttcatgaactggtaaatggcatttttcaggttttgaaataccaattgggcagcagcatcctgtatttggggtgatactacatctacctggcagttcaactcctgtgccttaatagctaatggaaacatggaaagaaaaaacgcaatatgataaattacttttttaagcacgatataatatagtttacaatgtccttagcaacttctgtcttaggctttaactcaaaatgcctggttttattatgcttgtcaatgattgttacctcgttggtatcaccacccggtccagctccttttgtgcgcatcgagttcaatacaatggcatcaaggttctttctttttagtttgtctgcagcatttttttgttcatcattagtctctaatgcaaagcctatcaataattgcccggcttttttctttttgccaagttccgacaatatatctgttgtatgttcaagtttcagggttagacctgcgtctgatttttttattttctgtgtagcttttttctgtggtttaaagtctgccactgcagctgacatcaccgtaatatctgctttagggaacactgttaaacaggcatcatgcatttctttagcgctggtaacagatatcgtttttatcctggtatctatcttgtcagtatgaattggtccgtgcaccaatgttacttctgcaccttcagcggcgagcttttcagcaattgcaatgcccattttacctgatgaaaaattaccgataaaccgaacagggtcaattgcttcgaaggtagggcctgcagttaccaaggctcttttgcctttcaggcggaggttttcagcgttttttttttgaaggaacgctataatatgttccggttctgccattcttccttcgccataaaggccgctggcaagttctccatcctcggcaggaatgattatgttcttaaatgacttcagtttttcaatattatctcgtgttgccttgtggctgtacatttccctgtccatagcaggggcaatatataccgggcacgaagcagaaagatatgtagctagtaacagattatcacaaaggccatgtgccattttagcaatggtattggccgatgtcggggctataataataaagtctgcccagttggccagttccacatggttgttccatgaaccatctgctgagctgaactcgcaataaaccgggtttttagaaagagtagaataggttagaggagcaacaaagtcctttgctgatgcagtcattataacctttacagcagcacctgatttaacgagtagcctaagcaaaaaagctgccttataggcagctatactcccggtaacaccaagaattatttttttaccctgcagcacagtaggtaaattatgccctgcacactactgtgcaaagcaatagattaaagggtttcttctttcttatcttcacctgtcaggcgatagtaaaccttaccatcgataaattcctgggttgcgatagatgcaggcttaggaagacgttcgtacatttttgatatttctatctgttcaacgttttcgtaaacttcttccaaagtatcggtctttgaagagaactcttccagtttgccatccagttcttctttcatttcagcgcttatctggttagctcttttaccaataatagatatggtttcataaatattcccggtttgagcttccagtttacgtacgtccctggtgatggttgatgcgggtgcggtgctttttttgaagtccattgttcttgtttttattaagatttcgttagatttttctgaagagacaaagcattattatacattgattcagcttcctttaaaaactcgcttttaggatactggtctacaaatttaagataatcttgcacaactgcctgcaatctggtgtttttttgccattctacgctgttaatagcatataagtagtcgcattttataataaggaagttcgattcttcaacatatttactgctcgggtaatcctttgtataattggtaagtgcaacagtcgctgagtggtaatattcagttatataataccctttagcaatctcgaaatatttcttttccagcttttcacgcaacatatcaatgtacttgttgcattcctttatcttatcgctatttggataatcgtctacaaaggtctggaatgcttcaattgcctttttagtatcggtctggtcgaggctatagataggtgaaagcaggtattcgcagaatgccctcataaactcgcattcttcagcgcgcttggtatgcggatatgttttgtaatacgtactgaaataaaaaccgcccattacataatcgccaacgtaatagttgcaatacgcatagtagtaggatatttcttcagcctttgcggttcccctgtaaatactcagtaattcttcaaataactgtaaggctttaacatagtcggcagacttataatatttcagcgcagcgtcgtatttaccttgggcatcgccactcttctggattctgttaaagtcgccaccacacgatccgaacaggataccagtgagtatggctaaaacgactatgatttgtctggaagctcttttcatcattttttaagacgtacaaaggtatgaaaaatattaacgcactccttacttagttattgtttggttttaaatctcgtcatactgagcttgtctaagtatcttcattgcttcgtgtttgccccaaacccctaaaccttaattacgcatgtcttctatcaaagattagcgatttctgtaaaagctataaatagttgatttttttattttttttatgatatttatactaaaagcagatggaattaggtgtaaaatccaatgaaattgttaattctaataaatcaattaacttcgttaaagattttaacgagtcctctatggaactaaatataagaaaggctgcggcattatttttcccaaatccgtcttttgagatgatgtactttgaagctattcgaaattctatagatgcatatgcaagtaaaatagaaattattatcagtttaacttcatataacgctccagaaagtataaaaatagagataaaggataatggagaaggatttactgatggcaggttttcgaaatttcaaaaactattagagactgaagaagatgatcataaagggttaggaaggttagtgtatctgcattatttcgatagtattttcatatcaagtttttataataccggaacagctattaaaaaaagagaatttacatttagcgataagtttattggtaaaaatgaaaacatcgattcttctatagataaattgggtacatgtttgactttcactaaatatagactacagaaatttcattcttatgattgtattaagccttcaacaatcaaaaaagagctcctccttcatttctatccgttattttatcggttaaaaaaagagaaatcaaaattgattattaaaatagcggtaaatacgcaaacatctaatgtagaacatgattttaaaacagatgtacaagaaataaatgtcaatgaattacctgatttaaaagaagtaccattagataataatttggatcttttatcagagttgaaattatgttattcagtaaaaaaaatcaaaaattcagatcagaagtcatatccaataacagcaatttgcgtagatgaaaggacggttaacgttgatattatttcaaaagctggaattcctactgggtatgaaattatttttattctatactctaattttttcaccggaaaagtggatacctcaagacaaaccttaggctcttcccatggattggggtcaacggctgcgtgaaccctgtattagggcataaaattgcctgataatgtctattattaaataaaagtactacctggattagggtcggaatgttagctggattagggttttattagccaactaccttatgtggttaaaacgtgaactaatagctaagttaagtccagtatttagatttcttttaaagactcgtaagcatcagctaattcatcgtcaccgttttttcgaagggtcttcatccactcctcttttttacccattttaattacctcgttaatctttttctgcatccacttatatttaattcttatttctggcttaggggaaccaataccacttctaactacatctgaaaccttatcaatatattcaggaaatccataataaggttcgtctaactcactttgggctccaaggaaataatcaatataatacatgccgtcagtatcttcttttaacaatgcttctacatattccatttctgactttgaggagtgagagcgtttattatagttacgtccggctatttcaattatctctttcgacaaaattattcttggatacagggctgctttgctttcaatttcataagcctctactaacgccggaccaaataccatttgatctgtgtgaaatagtttcccgtaagctaaagctcctctgcataaaaagccatgagatattagtctcattatcatccatttcaattcgataagggtgaaaaatatctcactttcttcattttccagaaaggaaataactatacaatcagaaaacattgtaataatcttcgattttgttttcccttttttaattatcgctctcattttcggtgaatgtttgcccaaatccaagtcccaaacatcccgaattgactcgtaagcttcaattatagagtctacctccaattggataggctctccgttagcatccactgttttctttattttatccttaaaagcaagaatatctacaaatgctacaacacgattatcgtagccttttttctttttccccatttgtttagaatgaaagataggttatattactaaaactcatttctaggctcaatacaatattattaatcatcactatcttcttcctctgcggttacggatgtatcacacaattcataatcacagttagggcattcgtaatgtgctccatcttcatcgagtatgtcgaaatgcatgtcttttccacattgtgggcattcaatcgtgtcttccactattgtaaaagcctggtcatttcggttagaataatagcaggtttccctccattgtaaaacatttctgttgccattcttgaagcaagtatttctaattgaaacaatttctccttgtcatcaagaaattgcagaatgttttttacctcccagtttacctgaggacctattaatttagtgtgtatttctaaagcaattatatctttctttttacctccggcaaaccccacaattacatcccaaagaataatatctgcccaatctgaatcaaaggaaaattgttcctcaagcgtactataatcaaacctccgtttggcactatttgtaatatagtcccaaatctcaaaaccttcttcactcatttctaatgactattttgctgttattgttaatgtataatgcttattttaccctgtaatcgcagcactttcgccatttccttcggatacagtatcaattttgtcaaccgggatatcttttcctagcattttttctttttttctataaaccttcatgattctccttttagcagtctcagagtcttcgccctcaataatttctctttttataatttcttccaacaatactttttttatttcatcagcctgtacctttatatcaggaaatatcaggcgcaattcctttttaatagaattaataatagattctgtacaaattaaattgccaattataaatttgcttgtagcctgtttctgggaataaaactgatcaagagaagatctgttaatggcttctttagtgaaaacaaacattcgttcaatatcttcctggcttctatgcttcaagctaaggaaatcaatatcgcatataagtacaggctgaatggatttatttaacacaaccttgaaaactttccaatggacagcgttggatagtattacccattccagaccttggttagcagcataatcaattgcttgttttgcatgaggatcctttaaatcaatgccgatggcttttacttcgattagcagtttcagtttcccatctatttttaatgcaaggtcacaatatgtcccttttatagcatgctccgttgttatgtcggtatatttatcgaacccaaaaacatgggataaaatatcaatcattaatacaactgtatctgattcattaatatctcttgattttgcaagttcaacaatcggttgaaatttcttgataccctcgctaatgcgagaagcaactttggatggtactggtgacatgtatatgaggttttatggttgcgagacgaaatatagaaatgtaagataatgaagattatagtaaaacacaactatattcttagaaagaagctcattttaggtatttatacctatgctaactaggtatttatacttatagactgttcggcaattcctttgagttgcgttcctcagccacttgctatctttattgggctctcacggcaaacattaacagatagcaaacttaaataaacaacaataccgcatttctgcggtactactgtggatgttttcacaacggaataatccttattgtgatttgctcgtattgtaaggcgaatgtatatctttttcttaaattgcagtataaaatttaccgcaaatcatgaaaaaagttttgggacttgaccttggagttgcttctatcggatgggcatttattcaagaaggtgacaataaatctgagatattgggattgggatcaaggattattccgctggatactgatgaaaaagatgaatttaacaaggggcagaaaatatccaaaaatcaaaagcgaacacttaggcgcactttacgtaaagggtatgaccgctatcaattgaggaaaaaggatcttcatgaaaaactggaggagcattcaatgttgccggatgcaaaatacttctccttatctgctttagaattatatggactccgtaataatgcggtacaagaccaggagattagcctaaaagaacttgggcggatatttctacatctcaaccagaagaggggctacaagagcagcaaaaaagaaatcactgcggatgataagactaccgattacgaaaaggttattaatgaccggtatgacataatacgcaatgataatataacagttggtcagtatttttaccagcaactacagaaagatgaaaggtttagaattaaggaaaaagtattccctcgccacgcatatctagaagagtttgataaaatctgggcagtccaacaaaaatataacccggaaactcttacagaagatttgtataaaaagattagaaatgaaattatattttatcagagaccattgaaatcgcaaaagggcttggtttcagtgtgtgagtttgaaggtagttactatactaccaaagaagaaaaggaaatattctccggccccagggtttcgcccaaaagctctcctattttccaagtttgtaaaatatgggaaagcattaataatattaggattaggaataagagaggcgaagaatttgagattacacttgaaaagaaatatgagatgtttaattatctcgataataatgataggcttagccaaactgagctgtttaaaatacttgagattggtaaaaatgaggggtattatacagatgcattaacaaaaaagaaaggaatacaaggaaatattacaaaggcggatctgcgaaaagctattgacaacgatgagttatccgaaaaactttttgtttttaacttattaatagaagagagtgatgcagtagatacagatactggtgaaattgtaaaacgtaaaaaaatcaaagctgaatttgagaagcagcctttatataagctttggcacatagcctactccattcccgaagagaaggacattgtcaacaagttacaaaaagagtttgggctaagtgcagaagttgcggcacgcattgcgaaaatcgacttctcaaaaggtggttttggtaataaaagcacgagggcaataagaaaaatattgccatatcttcaagaaggccataaatatagtcttgcatctgcatttgcaggctataaccactccgattcaattactacagaagaaaacatggcaaggaagctggcagataaattaaaactattgccaaaaaactcacttcgccagcctgtagttgaaaaaatacttaaccagcttatcaaccttgttaatgctttaatggagaacccaaaatatggtcgcccggacgaaataagagttgaactggcaagagaactcaagcaaagcagagaagaacggaatgatacatatagtcgtataaatgatgctgaaagctatcataataaaatcagagaaaagcttttagcccatgaggaattcaagaaaaagaaagtcacccgcaaggatattgaaagatataagttatgggaagagtttggtatgaaatctccttacgagcccagcaaagtaattggcattggcgaattatataatggaggatatgatgttgaacatgtaattcccaaatctcgtgtatttgatgatagttttagcaataaaacaatatgccctcggcgcttgaactctggtgaaaatgcaaaaaatcaaatgacagcttttgatttcatggagactcaaggtgacggtaagtttcatgattttcttgctctgattgaggctgcttataataataggaagatcagcaaaacaaaacgtgacaaacttcttatgccagttaataaaatacccggcgattttattgaaaggcaattagtagaaacaagatatatttcacgtaaggcaaaagaaatacttactcaagtatgccgtaatgtatggtcaacaagtggaagtattacgaattatttacgttatcaatggggctgggatgatgtattaattaaacttaattgggataaatatcctgaagaaatgaagcgggttgaggaagttgatgggaaaacacggtattttatcgatggctggacgaaacgcgatgatcacaggcatcatgctattgatgccttaactattgcctgcacaacacaaggcacaattaaacgattgaacgacttaaataaggtggttgaagccaagcaaaaccaatcccaacaacaggcacttaaggaatcaaatgaaaatggcttaaaagcgtacattgataaaaccaagccattttccacaagtcaaattgaaagcataacttctggcgtgctgatttcttataaggctggcaagaaagttgctacatatggcaagagaatgataaaaaagcatggtaagacgatcattgcccaagataaaataattgtgccacgtggtcctttaagtgaggaaggtacttacgggaagattcgttttaatggcaaagatgaatacgttgtcaaatataaattgggagcaggtttgggatatttgttttctgggaatgaaactgttaaaacttcgaaaaagggtaaagaaaaagatcaaatacaggttgtgcttgattcggttgtagataaaggtgtccgtactgctatccaaaggaggcttcatacatttaataataacccaaagctggcgtttaaagatttggataacaatccggtttggatgaatgaagaaaagagaatacctattaaaacagttcgctgttttactggtctaagtgctgttgaacctgttaaagttcacgatgcacccaataatatagtatacaccaaatttgtgaagcctgggaataatcatcatattgccatctatacagatgagaatggcgagaagcaggagcactcggtaaccttttggcatgctgtagacagaaaagcacatgagctgccggttgtgataacgaagccaaaggaagtttgggataaaatattgcagggcaaaagtaactaccccgatgatttcttaaataaactaccgaaagataagtgggtgtatgaatgcagtatgcaacaaaatgagctattcgtttttaatctaaccaagaacaaaattgaagagcttttatcacaaagggaatatagttctatcagcagtaacatatatcgtctacagaaggtttcaacaaataattattacttcaggcatcatttagaaacaaaggttgataataaaataaatggcgttaaaaatgaaatgttgttcaagaaaatgcgtagaataattcttattcaaagcttagaggcatactttaaatataatccagtgaagattaaggttagcaatctcggtgaaatcataaaaattggtgaatgataaagcgaactctttactttggcaacccggtttatctaagtatgaggaattcccaactcgttattaagttaccatccgtggataataacgatgaattgcctcagtttataaaagatgaatctgttaccgcaattccaatagaagacattggtgtggtgattttagattaccagcaaataactattacacactcgttgatttccagtttacttgagaacaatgtagcattcattacttgcgactcgattcaccatcctaccggtttaatgcttccgcttgccgtgcataacactcaaacagaacgctttagagctcaaatagatgcatcagtacccttaaagaagcaattatggcagcaaactataatgtcaaaaatcaagaaccaggcaacgcttttacagcgccgagagattggtattgaaaatatgctccactgggcagatagtgtaaaatcagatgacatagagaatcacgaagcccgtgctgctgcatattactggaaatcaatatttccaaaagaacttggctttttcagggaacgtttcggaccacctccgaataacctattgaattatggatattccattttaagagctgttgttgcacgtgggttagttggttctggcctgttaccgacatttggtattcatcaccgtaataaatataatgcctattgcctggcagatgatattatggagccatatcgtccatttgtagacgaggctgtttgtaaaataatagacaatggcgaagaccatacagaacttagcccttcaattaagaggcaattattggagattcctactatagacattctaatcgatggagaaaaaagc

SEQ ID NO: 2016 - DNA, 6965 bp, synthetic construct
  source 1..6965: mol_type = other DNA
  misc_feature 1..6965: note = Synthetic
taacgttgtcattgtatagaaatccttgctataagtgtctgaattttgattcctaattactaattattaattcctaattaaataagcagtcattgactttttcgaagatcaggtaacagagtcaagataaaataggaaaaatcgccaggcttattattatcaactactgatattatatactgataaacaacaacataattgacatagcaaacgaaaaacagataggtaatttatatctgaagactgttatatatcgccttgaaaaagaaaccgcaaattgaaaataggatgtgtattttaagacaaaatctaacatttccgcgctcaaaatccgcactcaatccccactcatttttagtgaaaaattaggtagccaaaaatggtttgtctcccattatttcataaattctctgagtatatcgagtattaaagtctcctttaattactgaattatcaatttctaccggtatccctggtcgttttatcggaatcctttctacaaatttaaacaatcctccctgtaatggaagatattgtacgatatccattctgggaatatgtttatcggcagtaccagaatcactatttctgtctctaacgacctcgtgagttctgagatatgagcacttttttattgcgtctatttcgtagtctaaacataagtaccatccaaaaaagcgataatcaattcttcttgcatcaaaatgtaaaacctcaaaacactcgttcaccttaccatcatctttatatatggtatcactaagaaggtagttatgcagcccattaatagtattggatacgaacttttctaagtcattataatcgctgagttctttcactttttttgaattaagcaatccaaaaatacgataaaataaacgcagccaccatttttttattttaaatagaatatgcataccccaaatataaacacgcaaaaaataaaataaagggcaatgtgaataatactattgttttacttctgaattgcatttttccttattttgtgccaaaccaaaaatcaaaacgccatgacaaaagcagaacttgtaagagaaatttcggagaagacaggaattgacagggctgtggtagaagccaccattgaagcctttatgacctccgttaaagaacatataataaagaaagaaaccgtctctttgcgggggttcggtaattttatagttaagaaaagagcagccaagattgccagaaacatttccaaaaacactgcaattaacctgcctgcccattatattccaaaatttaaaccttcaaaaaagttttcggagaaggttaaaaaagctgtaaagtaaataacttgggcagtaaattccgagaaaatagaaaagcctaaaatgatctttctacctttcttgagactaaataaattaataatcccaaggttatatatccaataattacatcggtactggcaataatatggccacaatgacttataggatacatatcaccgtaacctagcctgattttacaattgataataaaattacaaggaaaagattttattgggaacatttgggaatgatgacagatgagcagtacagaaaaaaatgggaaaagaaactgcaaggatacttggaagatggttatgttctgcattcacaagcaaaagaaggtgatgataagatactcattctaacagaagaaaacccattaggaggcatcgatagtcaatattttgataaattaatacaagaagtaattttggagagaattaattaaaaagaaagcgactgtttccagccgctttgaatgttttcacaacggaataatccttattgtgatttgctcgtaatgtggtacaaatatagagatattttataacttgcatgataaaaaacaactattgacataatttactttaaaatgaagaaagttttagggcttgaccttggggtaacctcaattggttgggcttacattttggaaaatgagaataaatctgaaattctcggtctcggcagcaggattataccacttaatgctgacgaaaaggatgagtttaaccgaggaaataaaatctcaaaaaatcaacaacgtacccttaaacggagcctccgaaagggttatgatagataccaattaaggaaaaaatatctgcgtgaggaacttgagaaaaactcaatgttaccgcagcctaaatatttttcattgcctgcattggaattgtatggccttcgtgaaaaagctattcaggaaaaccatgtggtcgggttagaagaattgggaagagtattccttcatcttaatcaaaaaagaggatataaaagcagtaaaaaagagcttgcctccgatgataaagcgaccgaatatgaacaggaaatcaatggtcgctatgatgaaattcagagaaaaggaataactgtcgggcaatacttttatcaggaattaaaaaaggatgagcgtttccggattaaggaaaaagtatttcctcggcatgcatacattgaagagtttgacctgatttggaaagcccagcaaaaaaatcatccggaaaaactaactgacgagttatacaagagattaagggatgaagttatttactaccaaagacctttaaagtcacagaaaggtttagtttcagtgtgcgaatttgaaggtaaattttatacgacgaaagaaggtaaggaggtatttgccggacccaaagtagcacctaaaagttcgcctctattccaagtttgcaaaatatgggaaaccattaataacattactatcaaaaataagcgaggagaggaatttgaagtatccattgaaaagaaacatgaaatttttgaatatcttgacagcaatgataaacttacccaaacggaactatttaaaatacttggtatcggcaaaaacgatggatattacgcaaacgcattaattaaaaagaaagggcttcagggtaatattactaaatcgggcattatacaggctcttgacgggcatgaggttctggaaagtcttcttaaattccggatgacagtagaagaagcggagccagtggttgattcagaaaccggtgaagttgtaaagagaaagcagattaaagccgattttgaagcccagcctttttataagctttggcatattatttattccataccggaagaaaaagaaattgttgagacgcttaaaaaggaatttggattgagcgaggagatggcaaagctactggcaaagattgatttttcaaaaggaggttttggcaataaaagtgcaaaggcaatgcgaaaaatattgccgtatcttcaggaagggcacatgtacaacattgcatgtttatttgccggatacaaccattctgattttttaactaaggaagataatattgcaagaaaacttgcagataagctaaaattactgcctaaaaattcattgcgtcagccagtggtagaaaaaatacttaaccagctaattaatcttgtcaacgctttaattgagaaccccaaatatggacgcccggatgaaatcagggttgaactcgcaagggaattaaagcaaagcagagaggaaaggaatgaaacgtttagccggaacaatgagatggaggcgtatcatactaaaatcagaaatctcctgctggaacatcctgaatttccaaagaaaaaggtcacaagaaaggatattgaacgttacaagttatgggaagagtttggcaatagatcgccttatgaacctaataaaattataggtgtagccaagttatttaatggcgagtacgatgtggagcacatcatacccaaatcccgtgtatttgacgacagctttagcaataaaacaatttgtcccaggtatttgaattccggggatttggcgaaaaatcaaatgacagcctatgattttatgcaaaagcagagtgaagataaattcaacgacttccttactgtaattgacaaggcatttggtacaggttataatggtagaaaaattagcaaatcgaaaagagataagttgcttatgccggttgaaaaaatacctgccaattttattgaaaggcagttaaccgaaacaagatatatttcacgtaaagccaaagaaatcctttctcaagtatgccggaatgtttggtctacaagcggaagtataacgagctatctccgccaccaatggggttgggacgatgttttaatcaggttgaattgggataaatacccaaaggaaagcaagagaacagaagttatcggtgggcgtacacgttattttatagacggctggacaaaacgcgatgaccatcgccaccacgccatagatgcattaacgattgcatgcacaacccaaggtattataaaacgattgaacgacttgaatcaagttgttgagacaaggcaaaatcagtcccagttacaggctattaaagaaactgatgatggactcaaagctactattgacaaggcttgcccatttactactaaagaaattgaaaatatcgcagcaaaggtcttagtctcctttaaaccaggtaaaaaggtggctgcgtatggtaaaagaaccattaggaagcacggcaaaaatgttgtagttcaagaaaagataattgtgcctcgtggagctttaagtgaagagtttacgtatggaaaaataaaagttaatgggaaggatgaatatgttattaaatataaactgggtgcaggacagggttttttattttcaggaaaagagaccgtaaaaaaatctgaaacaggaaaagaaaaagaccaaatccaggatgtgcttaattctattgtagattggggtgttcgtgaggctatccgcaaacaccttgtaaaatttaactacaatatcagagaagcctttaaagtgacagtttggatgaatgaggagaaacaaatacccataaaaactgtccgttgtcttaccggattaaatgccgtggagcctatcaatgtggtggatactggaaataatattgcgtaccagaaatatgtaaaaccaggcaataatcatcatttggcaatttatattgacgagaatggtgaaaaggttcaagatactgttactttctggcatgcggttgaaaggaagaaatacggagtgccggtaattataagtaacccgaaggaagtatgggataaaatccttatgaataaagaggactaccccaaatcatttttagaaaaacttcccaatgataaatggaagcttgatgtcagttttcagcaaaatgaaatgtttatactgggaatggcaaaggaggagtttgaaaatgccatagcaaataataattatgcgttattaagcaattacctgtatttaacctggtccatttcagaaggcgattattggttcagacatcatttggaaaccaagaattcggaattaaaatcatcgccaggagccaagcaatctaaaaggtattatcggtgtcaaagtatagcggcatttgaaaatttacttccaagaaaaatccaaattaattacttaggagaaattataaaatgataaaacgtactctttatttcggcaaccctgcatatttgggcatgactaacgcccaacttatagtacgtttgccggaagttgagaaaaacgatacacttccggagattctaaaaaaagaagcggttactaccattccaatagaggatatcggggtagtcgtgatagaccaccagcaaatcacactcacccattcattaatcgcaagtttattggaaaataatgttgcgttaattacctgtgatcaaacacatcatccaaccggcttgatgcttccactatctgttcataatacacaatcggaacgtttcaaagcacaaattgaatcgtctgttcctttaaaaaagcagctatggcagcagacgatttctgccaagataattaaccaggctaaccacttaaaaaggaaaaatattgaaatagccaatatgcttcattggtcaaacagtgtaaagtcagatgactcggagaaccacgaagcccgtgcagcagccttctactggaagtcattattcccaaaagaacttggattttttagagaacggtatggtcctccacccaacaatattttgaattatggttatgcaattctccgggcaacagttgctcgcggattagtcggctccggattgctacctactttgggtattcaccaccgtaacaagtataatgcttattgcctcgcggatgatattatggagccgtatagaccatttgtggacgaaattgtatgtaatataattgatagcggagaggattacactgaactaactacatcaataaagaagcagttgcttgaaataccatctattgatataattattgaccgagagaatagcccattaatggttggcttgcaacgcaccactgcatcattagcaaaggcttttgagggagaaggacggaaaataatttatcctgagtttgtttaatgctacttaacgaatacagaatcttgtggatattagttttttttgatttgcctaccgaaacaaagaaggagcgaaagattgccgcccgtttcaggaaagaaatcatgggagacggttttaccatgtttcaattctctatttatataaggcactgctccagcagggaaaacatggatgtgcatattaaacgaataaaaaggatattgcccgaaaaagggcatgtcgggatgcttactgttactgacaagcaattttcatctatggagatattttacgggcaaaaacttgccgaccagccgaagatttcgcagcaattagagatgttttaaatagaaaaaccagtgtccgcttgcagcggacactggtttcgggcacacattttttaattctaatttcggctttagttgtctaaaaatcaatgaaatcgttgcaggtatagtgtgcgaactatttcaaagatacattacggcggcaaatcacaactgatagtccttgcgcctttattacgcgtggagtgtgcgaactatttcaaagatacattacggcggcaaatcacaacttcaaacatcatcaaccttcctacac

SEQ ID NO: 2017 - DNA, 17417 bp, synthetic construct
  source 1..17417: mol_type = other DNA
  misc_feature 1..17417: note = Synthetic
ggctgcgaccgtcgggccggccgtcaagataggccttttcctgcgcgttggtcatcacacgggcaatcacttcaatcagccgttgctggacgaacaggtcgggattgcgctggtactcgggcagcaaatccttgaagctccgggcctcggcggcgacggcctggacctgccgggcgcgttcggactgggccagattgacgcggctggaggcgtcggcgccggcgcgactgagaacctggttctcgaaggtgcgggcttcgttgagcttcttgctgcgctcgacctcggattgaagcacaaggttgaaggcgtctttcaagatgcgcggcggacggctttcgatgtcgcattgttcgatggaaacgcccaggcgctggacctccacctgctcggtgaggcggcggcggacagcgtccttgaacgccgcaatgtcgcgggtgaggatggcgtccacggtgaagcgcgcggcggtgctgatgagggcgttgtccagcgcgtgctggagggcgttggtggcgttggcaaagtcgaggatgaagcgcaccggatcctggatgcggtagaacagggcggcgcgagtgtgaacgatgttgccgtcggcgctcagcgcgtagccgtccacggccgggtggagcgaggtcgcgggcggcggttcggtgccagcgcgctcctgttccggggtggtggcgtaccagccgacggtggagtccacgcgctggatttcgctgatgggaattttcttcaccacatcaatcggatacggcagggcgaagtgcagtcctggtccgagcaacaccttgtccccagtgccgagcggttcgccgagacgaagaatcaacgcgcgctccgtcgggccgacgatgaagaagttggagaccagaaacacgaccaccagaaagaccatgacgatcttgaccaagccgaagctgctgcgcagcgcctcggcaagggcttgggcgccggtgtcctcggtgttgaccggggacggcggcggaacgggtgccggatggggatggtggtgttcgccgttcatggcttaacgcggctgctgcgggacgcttgggaacggaaccagcggtcccgcgggcgccgccgcggggacgaggctgcggaacaggtcaaacggcggcgtgttttgatcgaagatcagcgtcgagcggtctttgagcgagctttccaaagcgctgaggcggaagatgaagctggccaggccggggttctgctggaagacggcgagggacttcgcggcctcggcctcgcccttgccgcggacctcggtggcctggctttcggcgatggaaatcatgtcggcggcctgacgctcggcattgctgcggatcttttgagcctcggcctcgccttcggactgggtcttgttgatcagcacctcgcgctcggatttcatgcggtcgaagacggcggtggtgacagtctccggcagcccgagtttcttgaggccgaggaactccagttggaggccgtagttgttggcggtgagctgcgcctggacggcggtgagaatctccttctcgatggcgtcgaacttcaactgcttcggatcggtattgaccagatcggagagcggatgctggccgatgacggcgctcttggcgttgcggatgaggctgcgcagagccttctcggcctccgggatggagccgccagcgaagcgcgggaaaaacgccttcgggtccgagatgtgccagccggcatagaccatcgccagcaggttgaagctgtcggcggtgagcacttcatcgaacttgtcgtcctcgaaattctggatgcgctggtcgagcttgtagaccttctggatgggccagggccacttgaggtaaagctggccgggcgtgttgaggtcgcgggtgggcttgccgaacgtagtgacgacggcgacttcggactggcgcacctggaaggcgaacagcagggcggcaaacaccagcagcagcaacagggcgacgatcaggatcaaagggttcttcttcatggcgcatcattttttgtccaccggcggcggggtcaggccctccagcaaatcgttccgaatcttgtcctggaggtcaaactggatgacgtcggtggtgttggtggtcaggacaaggtatttgcgcgccccggcgaccgagcgggcgaacgtgctcagataggcgcgctgggcatagacggtgggcgaagcctgggaggcgatgatctggttcgtgaagagggaggcttgggccacggcgctcaactcgcgttgcaggcggttggcgtaggcgcgattggtgatctccaccgcgcgagcgtcggccagggtgttggtgcgaatggccacggcattggccgccaagagcttcgcctgccgggtctggatggcggaaatgactttctcgtactccgcagccaccttcaccggcggatggatgtcttccagaccgacgaacgcgacgcgcacgccgagccggcgggccgtggcggcgtcttggatgcgctcgcgcaaggcgtccccggcggcgaaccgtccgcgcgccatcacctcggcgaggtccacgctgacgaggtatttgacaacctcgtgcgtggcgaggttgcgcagcaactgcgcggggtcggcgtcggtgtaggcccacgccatgacattggtgatctggaactgcaccgggatgctcaccaccagcaggcttaccggcgggcggcggcgcgcggtggtttcgccggcaccttcggccggggccaccgtctgggcgagagcgcgactggcgacgaggaaattatcttcggtgccatgcccgacggtccagagcacgacgcgcgagttcgccttctcttcttccttgtcctggcctacgacaaacctctgcacttgttccgtctggtagcgatacacgcgatccatcggccagggcagcttcaagcgcccgccgggatcaagcgtcgccaccggccgaccgaagcgctccaggatcgcctgctcaccggggtcaatgaagaccacgcacgtcgaaagcagcaacacgccaacttggagcaaaatgagccagcccagcgcaccttcgaggaagcggtagaaccaggtgtcggaaaccttgaaaccaaattggtaatccagcgtttgcgccgccgtggtgatgaggccctccggttgccccatcaggctgacaagccggctttcatagaccggccgcaccgccttgcccttcacgcgcggacggtagatttccaaaatcaacgcgcccagcgtttccaaggccagcactcccagcaaaaccaccagcgcccgcccgatgagcaagtccgccgtcttcaaccccgcctcgcccaacccgacgccgatggccgccgtgaagcacaggtaagcgccgagcaggaggtagccagccgccggacgcaacaggcggttctcctcgacccgcgaaaacgccaccgcgaaacgtcccacgatgaacagcaccagcccgcacaacgcgtagatgccggcggagatcagcgcgcgaggtgcgccgccaaccacctgtggcgccagccacttccagagcagccacgccgccgcgccttccagcaggaaaagcacgaccgtgaagccggggacaaaccatttctcaaacaactcgcgcgcctgccgcgccgggaaagtctccgcgtcgctggtttcaaacagactggcgcgaccctgcccgcgcgccagttcatccaggtccaggcgctccaaccgctcgcgctccgccaggcggatttggaacccgctcaccagcgccaccagcacgccgaggccgagatagacgctggccaccgtgccggcgaaggaattcgcgtagcgcgccgtggcaaacgccgccacgcccacccccagcagcaccagcaggttggtcaacgcgttcttttgtatgcttcgttccatgtccggtcagtgtttggaccagtgcggcgcggaaatgttagagggttaaaaatgttagaaggttaaaaggtgattggtgaaaagttaaatagtcggcgccatcggcggccgtggcggctgtggatttacgatttaaccattttaaccattttaacgatttaacgatttaacattttaaccattcaacgaatccccgcttccgcgtctcagttcaattcccgctcttcaaacaacgccaccgccagcgccagcgccgcgcccgcatagcacgccacataaatcagcgccttgcccacgtagctccacgggaaaaccgtcgtgcccttgtcgagcaggtcggccatccagaaaagctgccaattcggcacgaccgtgtaaagcaccgacgcccaccacggaccaccgccatccagcttgcccccgagcagcatgtagatgtagtcggaaacaatccccgccaggaagaacgccgagcatatcgccagcgtggcgatcgtgtccagccgcgtcgagcaggccagtgccagggccgcgagaatccacagcgcgaacagaatcaaaatcgccgccggcaccatccgccagtccgtgcccgcggcaaacgcctgtggctggatttccttgttgaagaaactgatcaccacgaaggccacgacggacatgaccaccagactgaacaccgcgtccgagacaaacggccggtggagaaagaaattgctgaagccgcccagcgcgtaggccaatgccagcgcccccaggaatgcgcccagcgcaaacaggtccgtggaaccgtaggcgtcgaacgccatccggctggccaacagcgcggcgatgaggttcacgccggtcatcaccgtcagcgccgccgccagcccggcgtatttggccagcaggaactgcgcgcgcccgacgggcttggacagcacggccagcgcggtgccggagcggatttcccgcgccagcgaggccgaggcgctgagcaccgcgccaaacaacccagtcagcagcagcaccgccagcgcgctgttcttcaccagcttcggctcgtcaccgaaggcgaagtagtaaggcgtggccaggaaaatgatgaacaccgccgaactggtcatcagcagcagaaacaccggctgccggaccagttccatgaaagcattgacggcgatagtgatgaattgtcgcatgaggccgtttggccgggcgggaagcctactcaaccgccgccgtttggcaaacggtttatccagccgggtgcagaaagccaacgcctccccaggtcagttttgtgccgaaccttgcgatccgtctcaccgaaggctcagcgggtttcgtgctttgggcttcatcattctttcgccattcgtaactcgtcatttgaatttcacagtttgggtcaaatccacccacgccagcggtacacccaatcgccaatgacctcgtgcagataaagcgagagcagcacgaaccggcgctgacgcggaaacggcgaccactgtcccgaaatttgcggcacgcccgccacctgaaaatccgccgcgaccggcacgacctccacgcccgccttccgaaacacggccaccgaccgccgcatgtgcagcgtcgaggtcaccaggatcacccgctgccagccgcgctcatcccgcaaccggcggaacgccaccgcctcgtcgtgcgtgtcccggcaaatccccaagttcgtgaccgccccgcttgtcaaacgccacgccgcgacccagtcctgcaccacggacatcgcgggtatgcttgatccctccgacaatggccaactgccgccgagcaccaacgtgttcgcctggccccggcgtactagctccacagcggtgagcaagcgcgcccccgcatcgccggtcgtgaaccccagcagatcgttatgggaaacttggtgcccgccgcccagcgccaccaccgcgtcggcggggggttggttggtgcccggttgcggcgcgtagggttgctcggcacgttccaccaaaatgttcgccaagggcgtgctgccgagcagcaggatcagcagcgtgggcgcgcccagccaggcggcgctccgccactgtttgcgccggagcagccaaagcacgcccagcgccatcagcagccagaccgcgcccaacggttcgaagaatggagtgataaaagatttcacaggaggaatgcggaaagttgaacctgaactctgaaatggcagcgcggtagcagaaagcagcagatgaccgttcgctttcagctttctgcttttccccctgccctcacgccatagccggtgagataccagaagacgaccgcccccaccccgttcgccacgatgtcgctgaactcgaaagtccgatggtattggacgagcactcgttgcagcacttccattaggaatccgtaggccagggccgccaggggaatgatccagtggggaatccggatcgtgcgcggatcgggccaggccagccgcgccagcagcaccaacccgccatacatggtgaaatgggcaaccttgtcgccgtaccgaaacgtcggatagagccggtacacgagcgaagccggagccagggaaaaccaagtcagcagcagcccatacgccaggcagaggccggcgcgcagcttcacgggcaatctaatgtaaaaaccgacgatcttgctcacaaattaaagtcattccctcgcccttcgcccgggcagtaaccagagcgagtgcgtgaggggctgagagtattgcatagcagagagtctggccagaagtcttctgcaaaacccagccaaccgggggcctctcagcttctggccgtcgcggagcgccagggccacggcagccctgggcttactacaggagacggtaacctaaaccacgaaccgatgagccacgaagaggcgcaaaaggaagaacgggggaacggggaacgcggagtgcggtgcgacaacgtgctgccggcatcttgccggcagatcgcgcgcctaggcctgcctgcaggaggccggcagcacgttgcctctcagccgtgtctattcaaaggagcaaccccccaatgaaccgcagagacatagcgcggcgaagtcacaaccaaaaggcaaagccagcaaaccgcagagacgcgaagaacgcagagaagacatcctttctgccaatctctgcgttcttcgcgcctctgcggtttactcggctctgccgtttggttgcggcttaaccgcagctaggcagtagtagtgggccgaagttaacgcagtgccgcaacggagcaggaacagcagacagaaaaattgaacctagaacgagcagttgtttaaccacaaagaaaattgattctatgcggtctcggcgttcttttgcggctcaactgctctttttaggttgaagacagaaaaatagagaggaaccccatttttctgtctccattttttctgtctcctgttcccgctccgttgcggctctgccgcgctatgtctctgcggttcattgggggggctttctgctgcatggttacggctaagagaccagagggtgaacgtcgttccgacctgaatccgcccggcttccgcgaagttggcatatttcgcacttcgtcgttttacggcccgcgcccatccgaaaaatcgctttacatcccaggcccggctactcagtctgacgtggcttcgggcgtccttgaatctcggcgccgaacgacatgtatatgatcttcacctttgcctgcggaggaaagcggggccgtgcctttgccccgcagagcgccgccgccgcctcgcgcccgttccatggtcgcggccggagccacgctcctcgcgccgtgaagctcgcttggcccgacccgatcaacctgttcgccggaaccactaactcttaacttgtaactatcaccatgtatctcgactctctccgcctcgccaacttcggtaaattccgtgaagcccaggtccggtttctccatccgggacggccgacgatcagtcccgatttgccgcggccccactggcccaaccttaacttagtcctgggtctcaacggtgccggcaagagcaccttgcttaaagctatcgcactggccgcgctaggaccggcggccgaacctgccgccgcccagggtctgggctgggtgcgacgcgcaccggccactcccggcctccgggcgagcgctccgccggaggcagtcatcgaagcttccttcttcgcgcctagccaagggaagcggagcgcggccacggcgctgaccacacgcgccaccattgcccagcagcagggccgggaagtctttcaccgcgaaccggtgcctccccgcggcctggccaccccagaacagactctcttgatagtcggttatggcgcgacccgtcgggtggaagacacggcgacttttcgcgccggacaccggctcgccagcgtcccggaaagccgggcgcacgggctgtttcatgaggcccatgcgctgacgccactggcggcgtggctgccccaggtgcaacgcgataacccggtgcgtttcgctcaagtgcagcgcctgctcaaccgtctcttagctcccgctggctgccgcttttccggcacggtggagttaggcgattacctgttcgagcgagatggtttattagtgcccttcgcggcgttgtccgatggcatccgcgccttgctgggttgggtgggagatatgctggctcacttagccactcattacccgccgccggtccggctcggagcggcaccgggcgtggtaatggtggatgaagttgacctacacttacacccggaatggcagcggcaactcctgccactcctggcagccgcgctgcctcggttacaattcctagttacaacgcacagcccgctggtcgtcggcagcgtggagtggatgaatctgattctcgtgcaacccggcccgcaggctaccggtgaagcggtgcgagtggtccatcccgtgcatggcctcgacgctgaccaagtgctattgacggagttctttggcctggaaagcacgcgggcaccggcgaaagagcagcgcctgcaacagctcacggcacgttcgagcgcgggtgatttccaagccgcgaaagacttgctcgccgccctaagccgcggggaggaggcactatgattcgctacgccatcacactgaccgaactgaagaagcgcatcgagaaagcccgtccgggctggctggcgctggcggccaagcgcacccaacacttcaccgacgttggcgacttcgacgaacccgccgcccagtccatctggggcgacatcaaggaagtcttcatgcaactccagcacagcaaatgcgcctattgcgagtcccgccgcgagtcggaggactacggcacgattgagcatgacgtcgagcatttccggcccaagagttcggtgcaaaagtggaagccgccggccgggtttgcgcggccggatttgccgttcggcaccccggaggattcctcccttggttactatctgctcccttaccaaccgctcaactacgccacttcctgcaaggtctgtaacaccatctgcaaaggcgaccgcttccccaccgccgcgccccgcgacctgaagctcgccgacccagccaaaggtgcgaaggagaagccctatctgctctatcccattggtagcactgacaccaatcccgaggaactcatcaccttcaacggagttagtccagtggccaagaaagccagtgggtttgaccgcgaccgggcgctggtggtaatcgagttcttcaagctcggcgacccgaagcgcaagagtctcttccgccggcgggcggaggtgatagccacgctcttcctactgttggaggcggctaagaacgcggccaatccggtagataaacagctctatgtgaagttactcgacggacttacccaagacgccgccgagcacgccaactgcgcccgcagtttcgtgcgactctaccagcaacgaccagccgacgcccgcgagttctttgtcctcactcaggaatacctcggcaccatgtcaccctgacgacgggagcctttccccgcaaggtgccgcccatgaaagggctgagagccagcccctcggtctctcccttgcagcgcccggctgaaaagcaacaaaccgccgggagcgacccggcggtttgctttaagaaacgcttttgaaccggtgtgaccgcatggcggacagggaagcggtttgcgttatctaactttgtcttgattcctaagacgggttcagaataccgtttccacgtcatgaatgcaatggaaatatctcccgatctcgaacttgcttttgatgtgggccacagctctatcggctgggctgtactgcaaagggccgccgcaacgccaccggccacgccgtcggctgacgatcccgccctctccgtcaatctgcttggctgcggcgcggtgatcttccgggcggacgattgtctcgccagcgaccggcgcacctaccggcgacagcgccggcacatccgcagcacccgccaaaggatcaagcgattgaagcttctccttggccacttgggcagcttgacgccgccgcaactggaccaacccggctgcgcctggccgtggcagcttgccgcccgcgtccttcagggtggccgcctgctaacttggccggagctttgggacgtgctccgctggtatgcccacaaccgcggctacgatggaaaccggcggtggagcggggctggggcagcggccagcgataactctgattcggacgatgccgcgctggacaatatcttgaacgacgcctctgcgactgaggatgagaaggatgatgccaagaaggtaaaagaggcaaaaagcatcatgcgcaagtttggcgtgcgaacaatggcagaaacattctgtgcggtttgcggcattgatcctttaggcgacaaacggtcctgcaacctgccgggcgagaaacgaccgaagggcatgaacgccgccttccctcgcgccactgtggaaggcgaagtgcgccgcatcctccaagcccacttcggcaagctgccgcaggtgaacgccgaccttgaacgctccctgctgggccgcgacaaccgggacgcgctcgcctggcaggccattccgcatcccggcctcaagctccctaatcgctaccaaggcggcctcctctttggacaactggtcccccgcttcgacaaccgcattattgcgcagtgccccatcacctttgcagaagaatatcagcgcctcaccggcgagggttactcagaggcagaggccaaagacaaggcaggagtcttggcaaaggtgcccggaaaatactgcacggagtttctgaacttccggtgggcgatgacgcttgcgagtattcgcatcgggcatagctccgaaacgtaccgcgaccgcgacgggaagatggttaaactccgatcgcttaccgccgatgagcggtgcaaagtggatgcgcgcgcccggcgcctcggtttcctaaaggttgaggctgacaaaccaggcaaggacggtttggtgcgcgagggcaagaacgagcttcgccagattgtcacagaagaaaccaaatgcgaccgccacaacctcgacacacttttgttggatccgaatgcgagagacggcttggagctggttccggctgacggaagtgcagccgccttccggcttgcctgggcctgctttgacaatccggggcatgatgccaatgggtcctatcgcgattccaccctgcgccaccgcttctttgtgcaattgctccggcaaaaaaagctctcgctcaacaggatgatccaacagttagacaagaccggaggaagcgccgtggccagccgcatccgcgaggcggcacgcaaggaagttgcggacaggcggggaaacgtgaacgaggagaagctcgacaagctgatggctgcggagttcttttgtccgaaactcaggggccgggcctgcttctcacgcgccaagcttcgacaagcctttcaagaagtcttccggagggaaaagcccatccacccacaagaaaccggtggctgcctcgcacaaactgaagatgtcaaacaagccaccatggtaaaagacctggccgagcaaacgaacaaccacctcgtacgccaccggcttttgatcttggctggcagcgagagggccaagccgcaacgcaaagaaggattgctacaacacatcgtgcaggaattcgcaggcggtgatcagcggcgcatcgctcgcatcaccatcgaattggcccgcgatctccaagcgatgtcgggcatgaaggtcaaagataaggcgcaagctctttccgccaagctggcgcaccaccagaaggtttccgccgatttggcggaaaagttgcgtgatgcaaacggtaatcccttgcgcgacgcgaacggaaggcctttcgctgcctcgccggggatgattcgcaaagcgcgcattctcgctgacctcgaaggcaagtgcccttacactggacgcgacattgagtttgtccaccttgccaacccccacccccaactcggcactgcggataaggaccatgttgttccgcgaagcctgcggctttcggatgccttggaggcgcaagttatcactttctcagaagtcaaccggctcaagggacaacgcactgccctccagttcatccgggacatgaacctgccagagaacaaccacaacaaggaccggtttggcattaagaccgaggcgcagttccggcgggacgtggacgcactctggccaaagtccgacccattcaggcgcgctcgcgcaggcggatcgaagcccacggacgacgaagcgcgctgctggcggcgaaagcaactcttgttgaaggtggcttgggaaggcaatgagttcacacctgccgaccttgccaacacccgctatgtcgtaaaactcgccaaacaacagttggaagccagcttcttcggcctgccgaaggaagcgcgtccgcccgttattgccgtcacgggcgcggtgaccgcctccttccgggagaagagttggcggctttggggtgaactcgccgcagtgaatcctgcggtaagggcagtgctggcggaagggatgaacgaatgggatgcaggcaagaacttcaatcccaagaaggccgtgcgggaaatcagtcatctccatcacgcggttgattccgtcgcgctcgccttggtgacacatctcctggttccgctcaagcaccaatcccttgatggcaccctcgcccggttcgtcgtcaaaggcaagctgagcgtggacaaggagaaggccatagacgaggtggcggcgtttcgcgccctctgcgcaaggcttggcctccctcgcttcgcgcggttggacagccaaaaccggctgcatattgcagagctgcccgaatccctcaaggcgcaaatccgccaacggttggccgagaagcgcgtggttcagcatatcccggcggacacgtccgggttggcttgcgacgatacggtttatcgcgttctggacccgcatgacccttcgcccaatgcccgtcgcctgcggcggtggtttgagggaatcctacttgccgggcaggtcaagaagttgaaggaattgcctgacccgaaagatccaactaagccgctcgttgtactcgtggcccgcaagcgccgcaacccatcaggtgccgaaacaggtaagacgctgcatgacaccggcaaggaatggcgctggatttatcttgtcgctgccaagagttcgctccacggacttgagccagcggctggccatgaggggaagttggcggctctaaaaggcgtcaaactgctgggcgagaatttcggagtggccgctataaccaaagccggggagaaaccaacttttgagatcatccgccctcgcaaggtatggaagcaagtggacagcctgcgttcggcacagcctggagccaaaattcggcttatccggaagggcgcactggtagagcttcaggaagctgacggccaaaggacccgcctccgcatattcggttgtggcgaacgcccgggccgaggcatttacttcgatgcgggcgtaccggatgccattgatcgcgaacgcgagattccggttagtgcatttgcgaacggccgggcgaaactggtcccggtgtcgcttaccggtgctgccgcatgtccttccacatcgtcaacattgatgccgcccactgttcgctgagttgccgggatggccagcttacctgcacgacggccgaaggcgagcgcaagctgccgctggaggacgtggcgtccatcatcatcaccagcttctcggcgaccattcacagtcagctcctcctggaagcggccaagcagggggtggccttgatcatctgcgaagccttcaaaccagtcagcctggtgctccccgccaaccgcagcaccgatacactgctctcacgcgctttactaaacctcactcccaaacatcggcaggcactctggcaaaagacggtggatgccaaatgcctgaaccaactcagcctggcgcaaaagctcgcccccggcgataaacaactgccggtgctggaactggaagcacgcagccgcaagccgcacaaggagcccggttgtgcccggaccttctggcagattttgggccgcgccttgggcgagccgggcttcacccgcgaacgctcccaaccgggctttaacagcctcctcaactatggctacgccgtcctgctgtcctccgtgctgcacaagctctttgccttgggcctggacccgaccttcggcctggcgcatgtcgtgcgggaacgcagcacgcccctggcctacgacctcatggagccgttccggccctgcgtggactggcgggttttccagtatgccaaggcccatcccaaccaggccgagtggcaggtcaacaaggaattccgccaatgggtgaccggctttcccctggtgcgggtggattacctggatttcacgctggaaatccagggcgtcatcgagggcatggtccggggcttccgccatgcggtgctggacgcggacccgcgctgctacaagccctggcaggccaaagaaggagcgtggaccgcctgagccaccggccagacaacctgccattctcacttgtgcccggagcgcggacattcctgtccgcttggtgcccagtccgcgcacgccggcggaccagaatgcccgcgctccaagccaaagtgaaaactgctgccagccaatggacacggagaaatacaaaatgggctggttgatggtaaccttcgacctgccggtcggcaccaagctgcaacgcaagcgggcggctggcttccgccatttcctgctggacgatggctatctgatggtccagtggagcgtctatgcgcgggcttgtgtcaccttcgcccgccaggaaacccatctggcgcgcgtgcgagccaacgtgccgcccgaaggccatgtccgggccatcttcgtcacccggtcacaatgggagcgatcctttgtgatccaaggctcccccgcctccgaagtggaggcggaggagcttcccgaacagatccagctttggtaaggagcggcagatcagcatcttacgatcaccaattctgcccgccccgtctttggaatcaaggcaaagcgtccacccctacgaagtaggagtcgccatattctgcccgccccgtctttggaatcaaggcaaagcacgctggcccaccgacaaaggtcagcgatgattctgcccgccccgtctttggaatcaaggcaaagcgttctcgccaagcaggcgaagcaaaaggaaattctgcccgccccgtctttggaatcaaggcaaagccgtcagggaggcggcgcgcaggccgtccccattctgcccgccccgtctttggaatcaaggcaaagcgggacatgttcaccaaggtgacgattttcaattctgcccgccccgtctttggaatcaaggcaaagctacgcgttggttattggcccgacaggcgcaattctgcccgccccgtctttggaatcaaggcaaagccgtcggcgtgcgagtgagccgtaaattcagattctgcccgccccgtctttggaatcaaggcaaagctcgcggctggtgccgctcttgtatttgcgaattctgcccgccccgtctttggaatcaaggcaaagcaggcgtccgttgcggcgggcggcgcgggctattctgcccgccccgtctttggaatcaaggcaaagcgtgacctcgaccacggtgcaggtgacgaatattctgcccgccccgtctttggaatcaaggcaaagctggcctttgcgcgcgccgcctgggtagctattctgcccgccccgtctttggaatcaaggcaaagctgtccgcgcgcgccaccccggaggggcggaattctgcccgccccgtctttggaatcaaggcaaagctcgggactgtccatgcgggagccgtgcttgattctgcccgccccgtctttggaatcaaggcaaagcttgctcggttaatgtccatgctctgcctttattctgcccgccccgtctttggaatcaaggcaaagctggtgcctaccagggcgtccatgcgcaggtattctgcccgccccgtctttggaatcaaggcaaagcttctccggctcataccattttggcgttgtgattctgcccgccccgtctttggaatcaaggcaaagctaccggcgtcagcaaggcgcggctgaacaaattctgcccgccccgtctttggaatcaaggcaaagctacaagcctacagcatggccgcgagcgatgattctgcccgccccgtctttggaatcaaggcaaagctgcgcttctgtgccagccgttgcggcgcgcattctgcccgccccgtctttggaatcaaggcaaagctatgcgaggtgaacaccgctggcggcgcgaattctgcccgccccgtctttggaatcaaggcaaagcgactcgcctccgccgcccgccacccgcgcaattctgcccgccccgtctttggaatcaaggcaaagcatgatcgccctggggcaggagttccaagacattctgcccgccccgtctttggaatcaaggcaaagctagctcgcctattgggatgatcgcggccagattctgcccgccccgtctttggaatcaaggcaaagccgccgggctggcgtggaatggcatccgcgattctgcccgccccgtctttggaatcaaggcaaagcggtaacacgtttcacgtttcacgtttcccattctgcccgcctcgtcttgggaatcaaggcaaagcaaatcctgatggcaccgacaccttcaagatagagcgtaccggctggccgatgccgattcatcagttactcgcagagaaccgcgtcagcatcgtcttccacggtcacgaccatctctacaccaagcaagaccgcgacggcgtcgtgtatcaggaagtcccgcaacccggcgacccaaaaggcagccccggagcgcggcggaatacggttacaaggaaggtgttatccttggcggttccggccacctgcggattgtagtttccgccagccaagcgacggtggattacgtccgcactgaccgttcagtggcccactcttagagcatgtttgaaaagtcgcccagcggtagggcgaggctcctgccgagcctcaacgacagcg

SEQ ID NO: 2018 - DNA, 23747 bp, synthetic construct
  source 1..23747: mol_type = other DNA
  misc_feature 1..23747: note = Synthetic
cgctgggcgaggtaacggaagaggttgctcaggagcgaggccgtgaccactatgcaggccaggaccgtgagcacgtccatgacgtcgtagtcgacgccgaagaggcggtagatgaggtggtggagcagggcgttcaggtagtcggccgagagggcgaatcgcggcatttgggtgacggcctccagggtgccctccggcgagaagagcgagttcacgatgggcatgatcagggcgaacgtgcagacgttgaagaaggcgtagaacagcgtgcagaaaaaatagggtatcgcgtatttctctatcggcttggcgaaaccgagcaatctccagtaggtcttcatctctctcctttctctctccggtgtggagcaaaagtaggtaaaaatgggtaatatctggtttttttacttacttttgttcgacggcacagctcgccggacaccatttcaagaaggagagtatggatatagtacttagcggtatcaggcccaccggacagctccatttggggaactatttcggggcgttgcgcaatttcgtgaagatgcagcatgatgcgaaatgttactttttcatcgcggattatcatgcgctgaccacccacgacgacccgtcccgtctgcatgagaacgtccggacggtactcgccgaatacctcgccgcgggcatcgaccccgaggcggcgaccatctacgtgcagagcgacgtgccgcaggtgaccgaactttcgctgctgctgggcatgcacgcctacgtgggcgagctggagcgcacggcctctttcaaggacaaggtgcgcaagaatccctccaacgtcaatgccggattgctcacctatcccgtgctgatggcggcggatatactgctccaccgggccacgcatgtgcccgtgggcaaggatcaggaacagcacctggagctcacgcgcgtgttcgcccgccggttcaacaacatgtacggcgtggagtactttcccgagagccgtccctataatttcggtgccgacctggtgaagataccggggctggacggcacgggcaagatgggtaagagcgaaaacaacggcatcttcctcgccgatagcgaccaggtcatccgcaagaaggtgatgcgggcggtgaccgattccggacccacggaaccggattccccgctgagcgagggcgtcgccaacatattcaccatcatggaggcggtctcttcgcccgataccatcgcttttttcaaggagcggtacgcccggtgcgagatccgttacggcgatctgaagaagcagcttgccgaagacatcatcaagaccgtcgcgcccatccgggagcggatagaggccattcgcagcgacgaggcttacctgcacagggtggtttcggaaggtgccgagaaggcgcgggcgagcgcggcgcagaccgtttccgacgtgcgcgaaatcatgggcatccgcccgttctgatattttctgccggaccgcgcaagacgggcggcggctgttgatgcggtatggagcattcgagaaggatactgaacagagcctatctccggttgatggagatgacgcggcgactgtcggggcagcagttgatgatcgtcctggcgatcgtcgtcggtctggtgtccggttttgccgcctatgcgttcgagcggcttcttcatctcatccgcaacgccttggtaagctggataccggccgatacggcggggtacctcttcctgatctatccggcggtgggcgtcatcctggcctcgctgttcgtgaagtatatcgtcaaggacaacatctccgagggggtcacccgtgtgttgtatgccatcggcaagcgcggctcccgcatccgggggcacaactgctactcttcggtggtgggcggtgccgtgaccatcggcttcggcggttcggtggggcccgaggccccgatcgtgctgaccggttcggccatcgggtccaatatcgcacagcttttccgactcaattaccgcgacaccacactgctgctcggatgcggagcggcaggggccatcgcggccatcttcaaggcgcctatcacggggctcatcttcgtgctggaggtgctgatgctcgacatcagcatgcgggccatcgtgccgctgctcatctcctcggtggtgtcgaccaccctcgtgctctttctcaaagggttcgatcccatgctggccgtgaatgtcggagggacgttcaatctccagcacctccacatgtatgtggtgctggccgtgctttgcggactcgtgtcgttctacttcctgaccgtcaacggcaaggtgcagacgttgttcggcaggatcgacaagcagtccacccggtgggccgtcggcggcgtgacgatcggattgctcatctttctctttccgccgctctatggcgaagggtacgagtcgttcatcgacctgatgcacggacacgtggagtcgctgttcgacaactcgctcttttaccactaccgcgacattccctgggtggtggtgctctttctgctgggtacgctttttctgaaagtggtcgccatggccgtgaccaatgccgcgggcggagtgggcggttcgttcgcgccctcgctcttcaccggagcctttgtcggcggaacgctggcctatatatgcaacacctttttcggcatggagatgtcggtggtcaatttttcgctcgtgggcatggcgggggtcatgacgggggtcatgaaggcgccgcttacctcggtgttcctcatcgccgaactctccaacggttacggactgttcgtgccgctgatgctcgtggcatcgctgtcgttcgtcatctcctattacctcgaacccgactcgatatacaccaagaagctgcgggccaaaggggaactggtcacccacaacaaggaccgtgcggtgatggtcttcctcgacctcgacaagctgatcgaaacggacttctcgcccgtggacaaaggggctgcgctgggcgacctggtgcgtatcgtctcctcctcgaagcgcaatgtctttccggtggtgaaggcggggggcgagtttgccggaatcatcctgctggacgatatccgtaccgacatgttcgaccagagcaagtaccggacgccggtctccaaatatgtcgtgcaggcaccggatatcatcttcaagaacgagatgattgccgaagtggtggagaaattcgagggctcccgcgcatggaacttgcccgtggtggacaagaacaaccggtatctgggcttcgtctccaagtcgagcattctcgacgcctaccgtcagcagctcatcgaaatcaccgaggagtgacccttctcctgcgccatgcaggacctttcccgcgtcatcccttttttgcagttctctgtgtagctccgcagagcccgctctggcgttgcggggggcgatggggcgtgcgtagcccgattcggccggggcgtgcggccggcggaaatccgtgtccggcaggggactgcggatgcggctccgtagccgcgagaggaacggataaagagtgagtagtataataggaattccgtgtaaattatcttatatttgcttccggcgagtcgctgtgcggccgtgtttcgggttgtcgcccgacgggcgtgtccgcggttcgccgaacgctgttcgtgctatttgcctgccgagggcggaacgcagatggcattgtcccgagagaactcaataaacaatcgaatagaatgatgaaaaaagaatttttgcgcatgctgcttccgttggcgggagtcgttgcgctggcgggatgtcgtccccagggttccgatgcggggcattatatcaagctcagcgatgtggtgttgacattcgccgcggaggacgaagaggtgaagagcgttacggtgcgttccaatcccgactggagcttcacgggcgacgcctcgtgggtggaggtgtcgcgcgaagggaatacgctggaaatctcggtgaagcccaatgccgatgccgagcgcagtgcgaagatcggactgaccgcgggcgaggcgaccgccgagatcgaagtgcgccagcttgccaacgagggaccggatgcccgctacaggctgttggataagttggccaatgccgccatgtcgccctccggacggtatgtgggcggattttacagggatgttctcggggagaacgagtggcagtatacggcggtcatcatcgacctcgacacggacgagtggctggaattcggcccttatccggagacgttgctcggcctttccgagaccgaggtgatgaccgaccagggtgtgctgtatatcagcgacacgaccaacggaggttgcgtcgctttcgacctggaggggaactatttcgtgcccggctcggctcccgggtacggttcgctcgtgttgcagggcgtctcggccgacggttcggtgatggtaggctataccgagggcgctccgggcggtgtcatgtacggtgcggtgaaggtggtcgacggcgaagtgcggccgctcgaactgcctgacaccaatttccgcggagaggagtggtgggccggcgtgctggtccgcggtatttcggccgacggctcggtgatgtacggcacctcgtgggagaactacgattacggcatggtttactgggataaggaagggaatgtagattgggtaggcagcgacctgcggacgatgacgaccgtgcagcgtcccgaccacctgaccggcgatacctatccctacaacatcgtgaacgggatgatgtgcggcgcgaaccagatgcagataagccccgacggaaagtggattgcgggcaatttccgcaaggagcgctacgacggggagtcggacgaggtgctgagtacctcctgtcccgctttcttcaataccgaaaccaagaagaccgtgctgttcgaggagtacgacggttgcacggccatgggcgtgacggccgacgggctcggcctggtgggtgttatgggcatgggagtgaccgacggtttctttgtcgacctcgaaacgcagaccaaggtggccgacatgcgtccgtggatacaggaccggttcggcatcgctcttacccagggggcgatccattacgtggcccccgacggccggaaggtgttgggcattacgctgcgggcggagccgtacggcggcgtgaccgcattgtactggtatgtggctccggcgctttgataccggagacatccggctttgtcggatagtggaacaggccggtcgcacttcggggtgcgaccggttttttcggaccggtgtcgggcggtttccgcgttcttctgcacgttgatgaggaaggggccgggtggcggtgtgcggggtatgttccgaatttgcagcaaaggtattatcgccgcacctaaggttgtgtgtttgttttttatttatcaaaatgtggggtaaggtgtgttgtgttgttttcataacaaagaaatggcggttgtaggttgtggatttttagaaatagtcatttgtttatgtgaaaaaaatcactacatttgtgttcaacagccggagccagcaaaccttgccgcctggcggctttctccggttagaaccctaatcaataaaaaaacacaaagttatgttcaagtatgtacgcgcagttttaattgtcgtatctctcctttttgcatggagctgtgaccccgagccccactccatcaaactcagcgatacctatatcactttcaacggaaagggaaacgatgcccgtaccgtgacggtaatctccgatcccaccggatggaaggccgtggcatccgcatcgtggattcagatcaccgagatgacggcccagacccttaccttcaccgtcgacgacaacgaaggaacggaggagaggcgcggttcgatcgacattacggccggaaaggctcaggtggctatcgagattcttcagttgaccgaaactgcgaccagtgcgcagtatcgcacaatgttcgattatgagaacggtgtggtcatgtcgccgagcggtaaatatgccggcggatggtatgcgtcgatagccggcgatgccctgtcgttccatgtcgtcgtttatgacatcgaggcggataagaagatcgaaatcgggacgtatccgggttctctgctggagttcaactggcccactgcaatctccgacgatggtcttttctttatcgaaaccgttgccgacggtgtctatgcgttctcgctggatggtacgtatgaaaaggtagcgactccggcaggcatggtcggtcgtgcgatcgtatcgggcgttgcgacgaacggtacaaaggtcggattcgccatgaaggacatggaggacggtcatggttccttgtattggcccgtgaagtgggttaacggcgaggcgcaggagttgcaaatgcccaagacctaccgtgacgagcttgagtataccagtgccgagttcctgaacggtgtgatggcccgcggtatctccgccaatggcgagatcgtctacggtacctgctgggataactgggatttcggtatggtgtattgggatcagaacggcgatgtacgcttcgtaggagaggacgtacgtaaggttacgccggtgaagatgttcaacgaggggggtgtcgagtacgattacaacctcgtagagggtgtgatgtgtactgccagcagtacgcagtcgagtcccagtgggaaatggctggccggcacttttacgaaggaagagctgaatgccgaacggacggagatcctgaagacgagctatcctgccttctataatacggaaacgaagaagacttacttactgtccgagtattccggagtatacggacttaccgctacggacgacggcaagggaattgtcgggggtggaagcacttgtacggtggtagatatagagtcgggtattcggatcggttcgggtgccgaatggattcagtcggagttcggaattgtggttcccacctgccgtatcgacttgtgctgtgccggcggaaatgtagtgtttgcttccgttccctatgccgatcagttgataggaatgatagacggtttcttttatgtcgccagataacaataaaacctgaaataaatctaaaataactttaaaaatgaaaagaagtttgctgttcgctgggttgattgccttgttggtagggtgtcaggcagaagacatccccgccattcggctgagtgatgcggcccttacttttaagggcgcggagaattctccggttgtgatcaaggtttatacctcggctccagaaccatgggaggccacggcagaggcctcgtgggtaagcatcaccgatgtaacatccacctccttcgcaatttgcgtcaaggataatgagagcgaagaggcccgtgtggccgacgtgtgcattcgggccggaaaagcggagaatcgtgtcagtgtgcggcagatggggaaagatcatacgtttgcacgttaccgtagttatccgaattgtgaagcggtcgtcatgtcgccgagcggtaaatatgtcgggatgtatgattatgactgggacgagaacgacaatacggtacagtatgcgataataatcgacgtcgcaacggacaagaaaaccgtgctcggtccttacccgagggaattgtataccttcatctccgtttgctgtatttccgatgagggagaccttattatcgctaccgaaaataaggggaattatcggtttactctcaacgaggagattatggagatcgtacctcctgcaggttttaccaaaagacccgagataagccaggtggctgtcgacgggaccatggttggatggtcgggaaaaggcggtgtatcgtatcctttcaagtgggtgaacggcgaggcgatcgaactgcccaagcccgagttgaactatcgtaacggcccgataggggacgtgcaggctcgcggtatctcggccgacggtcggatcatctacggaacgacgtgggataacttcgactttggtatgatctattgggacgagaacggcgatgtgcattatgtgggagaagacgtgcggtattgtcgtacggtagatcgccccaagggagatggtacatccgtgaaatacaacctgtgtgacgggctttggtgtacgtctaccaacacctgcgtgagtcccaacggcaagtatattgccggtacgttccgccgagagagcatggatgaacaggggggcataggtgaagtcaattgtcctgcattcttcaataccgaaacgcagaagacggtcctcttcgaggaacttttcgatggatgcggagtatccgcgacgagcgacgggttgggttttgctaccgactcttcgttgggtcccaccggcggatatgtagtggacatcgaacagggtatcgtgctcggaaatacacttgactggatttacgccaattacggtatcaggcttcaggcaggttatatcctgtacatgccggacacgaaagaccgttttctcggagccatgatgatgactgatggtccggcccttatgggtgtcaactggtacgtcggcccggagaggtagataaaacggtagaaccgaaaattgcatgattgcggcagggccggacacaagttgtccggcccttgtcgtgcgtgggtggttcgtcaaagcgagggtgtagcactccttttcagccgttccggatattgcctttccgtgggcgggcggtataactttgtgttttaaagaaagatgacgctgtttctgtcgagccggcggggcggataagttgtccggcccttgtcgtgcgtgggtggttcgtcaaagcgagggggggtagcactccttttcagccgttccggatattgcctttccgtgggcggaaagtataactttgtatccgagaaaaagatgaaatcgtttctgtcgatccggcagggcggctgaaaacctgaagtccgaaatttatgaagagggaggcgtcgaccttcttcggagcgcttgcgtggcagcattccgatatgctggtgaattccgtagggggctttctccgctgtcgtagctatggaaggaggcgggtgcgcctatcttgaaatgcggggcgttgcagtcggcctttgccgccctcgtcgttttcgctgctctcgccattttcgttgccctcgttgttttcgttgaaggattacgatgcagtgctgtcgcgctgcgacagcgccggggcgatgaatgacaaactcgcccgactcctcggcggtcccgagcacgagaaacggcaggaggcgttgcgtgtcgggaaaaaggaggtaaccgtgggcgaggtgcaggggggcccgccacacaaacgtcgccacataaatcgccggcaggcgctccctgtcgaccccgacggtcgtcctccgtcggcgtagtatctccgtcggggcaaacgatgaacgcctgtcccgacttacaatatagggcatcgggaacgaaagcgggagggcggacggtcggtcggacgattccgggattcggtagaggaggcctccggcgggtactcctcggccgggggcattcctggcgggaacgggtcagcgccggcggtagcgggccaccgagcccgattccacgaaacgctccttggtagcgatccaggtccggaaatggggggatgcgttgtgcaccgcaacggcctcctcgtccacccatcgttcgatgaagcagaacgcctgcggatcggacgtatcctcgtaaaggtcgtaaaagatgttgcccctttcggcgcggctcccttcgatgagcggttgcacggcccggaggaactcctcctgcatgcctacgtatatcctgtttcttgctacgatcgtaatcattttcgtatcgctcttgttttgtgcttttcccattcgggcaccccgcccgacacggtggagcggggcggaaggggccgggcgcccggcggctgctccggccggtgcgggtaactccggcgtcgggtctcggggcggtgcgccgctgcgggaccgttggcttgcggcgtcgcgcacaggtgacctttcaagaaaaggttccgggtttcggtgcggaagataataaaaaaatctccacggagtacgcggagatataggtattaaaccttcggcatgtagccttattgtggtaagatgtagaagttcttacattgcaaatataggtgaaaaaattgaaattccaaaaaaactccttacatttacaaaaacagatactcgatatatggaaaaacgattggggatagacatgggaaccaactcgctcggttgggcgctcgtcgaggttaccgacgaggggtgcttactgctcgataagggcgtgaatattttccaggagggggtggcccgcgacaagagcagcgaaaaacctgccgtccaggacaggaccgatgcccgtgccctgcgccgccactatttccgtcgtcgtctgcgtaagatcgaactgcttcgggtgctggtgcggcacgacctgtgtccttatctttcgcccgaacagcttcgcgagtggaagaacaagggcgtctatccggtgaccgaggagtttatccgttggcagcggaccgacgataataccgacaagaacccgtatcgcgatcgtttccgggctttgaccgaggagctcgacctcggtaaccgggcggaccgccatacgctcggtcgcgccctgtatcatctgtgtcagcgccgcggcttcctgagcaatcgcaaggatgcgggaaacgaagccgaggacggcaaggtgaaacaggagatcaacaccctctcggccgatatgtcggctgcggggtgtacctatttgggcgagtatttctaccggctctaccaaaacaaggagaagatacgcaagcattatacctcccgcaacgaacactatctgtccgagttccgtgccgtttgccggaaacagcatctcgacgaggagctggagcaggcgttggagcgggccattttctatcagcggcctctcaattcgcaaaagggaacggtgggcaaatgtacttacgagaagggcaagagtcgctgcccgatgtcgcatccccgcttcgaggagtatcgcatgttgcagtacatcaataatgtccgggtcatggggcccggcgatgcggagctgcggcccctctcatgggaggaggtggagaagatccgcccgctgttcctgcgcaagagcaagccccatttcgatttcgacgacatcgccaagaagatcgcgggcaaaggaaattatgcctgcaagggcgagttgctgcaggcgccgtatcgtttcaattatgcggagaaggcgacggtgatgggatgtcccgtttcggcgctgttcgcctcggttttcgggaccgactggctgaaggagttgtgcagtctttatacgctcggggcggggaagagcgaggagcagatactcaacgacgtgtggcacgccctcttcgagttcgaggacgaggcgcggctgcaggcctggttgcaggagaagctgcaactttcggccgacgatgcgaagaccctggcagctttccgtctgccgcagggatatgcgtcgttgagcctgaatgccgtcaacaagatacttccctacctgcggcgcggataccgttacgacgagtcggtatttttcgccaacctcggaaaggtgcttccggcggaggtgtatgccgacccgaccaggcgccgcgaagcggagcaggggatcaccgcccagatggacgatctggggcaggaagagaaagcgaggaagggggagcgtgtccgcgactatctgcgccgttactggggtgtgggcgatacgcggctggaactcctctaccatccctcgaaggacgagagttatccggcggcgcatgccgacgagaacggtatacttaagttaggctcgccgcgcatctcggccgtccggaatccgatggccatgcgtgccctcttccggctccgcgcactgctgaacgaactcttgcgcgaagggaagatcgaccgcggcacgaagatcaacatcgagttcgcacgcgaactgaacgacgccaacaaacggaaggccatcgcacgctaccaacgcgagcgggaggccgaaaaccgaacctatgccgaggagatccgccggcagtatgccgaagcgacgggacgggtgatcgaaccctccgaagaggatattctcaaataccgcctgtgggaagagcaggggcatcgttccctttatacggggaatccgatcccgatttccgattttctcggcgacggccggaagtacgacatcgaccacaccgtaccccgttcgcgtgagggggcggatgcgcagtacaacaagacgctgtgcgaagagaagttcaatcgggaggtaaagcgcgacaaactcccctcggaactggccaaccatagcgaaatactgggcgttgtcgaggcgtgcggatggttcgagcggatcgagggcctcgaacggcgggtctggggtgcggaccgtcgcgcgaagggtgcgccgaccaagtcggcgaaggatttcgccattcaggaccggcactactggaggatgcacctcgactactggcgcgggaagtgcgaggcctttaccatggccgaggtgccggaagggttccgcaaccggcagggggtggatgtcggcatcatcggcaagtatgcgaagcgctatctggagacggtgttcgaccgggtctttccggtcaagggtgccgccaccgctgcattccgcaagatgtgggggcttcaggaggagtatacggagaaagagcgcgtgaaccatgtacaccactgcgtagatgccatcaccatcgcctgcatcggccgtcgggagtacgaccggtgggcgcggttcaaccgcggggaagaactgtatcggtggggcgaggcggacaagccccattgcgagaagccgtggccgacttttaccgaagatgtccgggcggtgaccgaggagttgttggtgtcgcatcatacgcccgacaacatgcccaagcagagccgcaaaaaactgcgtgtgcgcgggaaggtgcggcggaacgacaacggcgaggagctctactgccagggcgataccgcccgcggagccctgcatcaggaaaccttctacggtgcgatccggcgtgaggacgagatccgctatgtcgtgcgcaagtcgctcggccagttgttgcccgccgacgtggacaagattgtggacgacacggtacggtggaaggtgcaggaggcgatcgatacgtacgggttcaagctggcgatggataccacgaagcatacgatatggatgaacgaggagaagggagtgccgatacggaaggtgcggatattcgccgggaagatgatgtcgccccagccgttgggcgggaagacccatcgcgacgcctccctctatccctataagcgtccggtgtacgtgtcgttggggagcaactattgcatggcgctctacgaagggacggatgccgggggaaaactcaaacggacttacgagataatcagttcgctgaaggccgcgcaatatttcaagaaaagtgccgacaagagagacgggatgctcgttccgcagtcggatggcaacggatatccgctccggtgcatattgaaagccggaacgatggtgttgttctatgaatcctcgcccgaggagcttcgctactgtacccgggcggagttggcggcgcgactgtataaactgacgaagttcagtacgcagcagtccaagtacggggtgttggttttcaggcatcatcaggaggcccggcccgtgggcgaactgcaggagaagggcggtccgtggaagaggggcgaagcctatcgaccgcttatcaagatgctgcataccggttttcaggcgtatgtcgaagggtacgatttcgacctgaccgtcacgggcgagattcgtttcaaacactgaggcgcctatgcttaagcgtacgctcttcttctcgacgccctacagcctgagtttgcgggacaaccagatggtgatccgcacgaaggaggcccccgacatgcagaagagcgtacccgtcgaggatataggcgtggtggtcctggaacatccgcagacctccgtgacgctgcccctgctgaatgccctgtcggaccataacgtggcggtgatcttctgcggcgatactcgcatgccgaacgccatgctgatgagtctcgattccaaccggacgcagggcgagagctaccgggcgcagctggaggcgagcgaacccttgaagaagggggtgtggcggcagatcgtcgaggccaagatacgtaaccaggcggcgctgttgaccaagctgggcagagagggagatcggttgaagccctgttattgcaatgtccgcagcggcgatgccgacaatcgggagggagtcgccgcccgcatctactgggcggagctgttcggacgggagttcgtccgcatgcgtgaaggcgctgcgccgaataacctgttgaactacggctacacgattctccgtgccgccgtcgcgcggtcgctgatgggggcgggcctctttcctgcgatggggattttccaccgcaaccgctacaacgcttttccgctggccgacgacgtgatggagccttaccggccgtatgtcgacgaagcggtgtacggactctatgcgcaggggcgcgtgcagcttacacaggaggtcaagggggcgctgttgcgtgttctgttcgccgatacgcggttcgcgaaggtgatgcgcccgctggaggtggggctgaccttcaccgccgcctcgctggcgaagtgttttgccggcacgggaaaaaagatcgtctatcccttattggagtaaccggatgtcggaagtccgtctgaatgcttaccggatcatgtggctgtttgtgtttttcgatctgccgaccacgaccaaaacggaacggcgccacgcggcccagttccgtaaggcgctggaaaaggatggcttttcgatgatgcagtactcggtttatgtgcgtcactgctcctcgcgagagaatatggaggtgcatatccgtcgggtgcggaagtcgatgcctccggcgggatataccagcatactgagcgttacggacaaacagtacggcgatattcgcaactactggggaaagagcgaacgggccaggcccgacatgccacaacagttggaattcttctgatgcgcccgccttcgcctgccggtgcgtgggggcggttcgatcgtcggcggagtgcactgtgcgcatcggtcgtcgggcacctgctgctccggcgacagcttgtagggggcgtttcccccggcgaaacgggtaacggccggcgtgacgggtgtccgtcggtgggggggatttccggtattattccagccttccgtgatcgttccaatctccgtagaggatgccttgccgcgtgttttgcaggaacttgtccagccggctcctgaacagcgggggacattggtcctttaagaactggattcggtctatgcggattgttttgtagagttccggcagacggcagaagttgtcccacaggagcgggtcggcttgcagttccttcagaatgtcggggtcgatcgtaaaaccgttctccgacatctccggcaataccgcccttcccgcatccgtcatcaggccgagccgctccagacgtcggcacctcgctttgttcagttccgtccagttgcctttgttctttcggggcgatagtctttgcagggtcgtgccgtcgggtgtttttttgatcgtgctgtcgatccagccgaaacacaacgcctcctcgacggcatcgagataccagaatgtcgtgtcgtctttcggtttgccgcgttttaccgccacccagcattcggttgccgtccgatggttctgttgcagccattggcgtaattccgcccgcgaccggacttctgaaagatagttcatattccgttgggaacatcctttcggggatgtcgggttaaagatactcaattttgtgaggatcgtgtatggacggaatgcaagacgacggtagccgcaggggaagcgtacgcatggggcggaggaaacgtgtcggccgtggcggatgtgcgtgccgaagccggtagccgggatgcgaaaggtgccggtcgtcgaccggattcgggaggttggatgccgtaagaaatccgaaatgcgctccctttcgatcttcgtaaattaataaacccgctgaatttcagcgggtttattgcgtgtttcgtacccggagccgggatcgaaccggcacggattgctccactggtgtttgagaccagcgcgtctaccgattccgccatccgggcgaaagacgtgcaaatatagcgattaatcgattatttgcaaaatcgggcctcttattgttgtttgtctgcggtccggcggatggccgtcagaataccttcggtgtcgtagccgcagaggcgtttcagttcggcgatcgtgccgtggtggatgaatttgtcggggatgcccaggcggataatctccgagccatagccgtgggaagagatgaattccgccacggcgctgcccatgcccccctctacggtgccgtcctcgaccgtgacgatgcgccggaacctctttcccacgtcgtgtagcagggcggtgtcgagcggtttggcgaaacgcatattgaccacttccgtcgaaataccctccttttccgcccgtgcggcggcttgcagggcgtcgttgacgacggtgcctatggccaggacgacggtatcctctcccttgcggagagtttcgccccgtcccgtttccaggcggcggaatgcgccgctccagtcggcccctgtgccgcggccgcgcggataccggatggcgaacggtacgcccgaaaggagcgccgtgtacatcatgtctctgagctcggcctcgttggccggagcggctaccgtgagtcccggaagggtgcgcaggaaagcgaggtcgaacgcaccgtgatgggtgacgccgtcttcgcccaccagccctgcgcggtcgaggcagaagatgaccggaagttgctggatgaccgcgtcgtggatgatgtggtcgtaggcccgctgtatgaaggaggagtagatgttgcagaaggggaccattcctccggccgccagtccggccgagaaggtgacggcatggccttcggcgatgccgacgtcgaagcaccgctgcggcatttcgcgttgcaggatatccatcgagctccctgtgagcatggccggtgtgacgcccaccacccgtttgtcgagacgggcgagttccagcagcgtatggccgaacacatcctgatagcgggcgggttggtcggcggtcggggaggcgagcaaggtgcccgtggcgggatcgaacttgcccggagcgtgccatatcggcggattcttttcggccggttcgtaccctttgccctttttcgtgacgacgtggagcaacttcggtcccggaatattccgcatgtcgcccagcacccgcacgagtgacttcaggtcgtggccgtctatcggaccgaaataccggaagttgagactctcgaaaaggttgctctgcttgaggatgctctgtttgaccacttcgccgaagttctggatcgtccggcgcagccgggggacgcccgacatggcgttccacacgcggtttttgagccggttgtagcgtttggacgtggtgatgcccagcaggtactccttcagcgctcccacgttgggactgatggacatgttgttgtcgttcaggatgacgagcatgtcggcgttggaggcgccggcattgttcagcccttcgtaggcgagtcctcccgtcagggcgccgtcgcctatcacggccacgacgttgcgccggatgtcttgcagtttgttggcctgggccatgcccagcgccgccgatatggaaaccgaggcgtgaccggctccgaaggcgtcgtaggggctctcctccatgcgcggaaagccgctgatgcctcccagtttgcggttcgtgtggaagcactccctgcggccggtgaggatcttgtgggcgtaggcctggtggccgacatcccagaccaccttgtcctccggcgtatcgtagacgtaatggagtgcgatggcgagttccaccgctccgaaactcgatgcgaagtggccggggttcacgctgagttccgcgaccatgaaatcccgtatctccgcggcgagcgtttccagttcgggaacggcgagcctgcgcaggtcttccggggagtcgatttcgtcgagatatttgtagcccttctttgccatgggaggagtgtacctatcgagggacaaagatacccaattataactactttctgaaaaaaatcgtatcttcgtgtcgtataacgtcaagagaagattatccggtatgaaatataaaaggatattgctgaaacttagcggggaatcgcttgcgggcagcgagggacacggcctttcggccgaggtgcttcgttcgtatgcctcgcagatcagggagattgccgagtccggtgtggaggtcggcatcgtcatagggggcggaaacatattccgcggtttgcagggggccggcaaaggcttcgaccgtgtgaagggcgaccagatgggaatgctcgccacggtgatcaattcgctcgcgctggagtcggcgttgcgggcggaaggggtgcaggcgaaagtgctgacttccttccgtatggaacccgtaggcgaatacttttccaaggacaaggccgtggattacctgaatcggggctatgtggtgattatcggcggcgggacctccaatccctacttcaccaccgacagcgccgccgcgctccgcggaatagagatcgaggccgacgtgttgctgaaagggacgcgggtggacggcatttatgatgccgacccggagaaaaaccccaaggcccggaagtttgacgagatcacgttcggggaggtgtatgcccgcggactgcggatcatggacctcacggcgttcacgctgtgccgggaaaacggcctgccgatgatcgtcttcgacatggatatgcccggcaatctgcggaaagtcgtccgcggcgaggcgatcgggacgctggtgaaggagtaggtcgcagggccagggaaaagagtggcggagttttccggacagagaataattttacgagaatcatgaaaaggatattgacagtgcttttcgccgtgttgcttggcggcgggtgcgcgtttgcgcagcaggatgtggagcgtacgaccctcctgaaaaagggcatggaggtgcccgaattttccgtgcggttgctcgacgggacgacggtgaattccgccgatttgaagggcagggtggtgttggtgaatttctgggccacgtggtgtcctccctgccgggctgagttcgcacggttgcagaaggatatcgtggagcgtttccaggggcaggatttcgtgctgcttccggtgtcgatagatgaggaggaggataccgttcgggcattcctggagaaaaaaggctacgcctttcccgtggcggtcgacagcggcaagaagctctacgggatgttcgccgagaagtatgtcccgcgcaacttcgttatcggcaaggacgggaaggtcgccttttacggggccggctacacgcccgaggagttcgacgagatggtcgggggcatcgcggctctgctgaaataggatttttttgatttgctacaaatttaaatagttatgactgaagaagcaaccttgatattggacattgccggcgagaagatgacccgggcggtcgagcatcttgtcgaagcgctgctgggaataagggcgggcaaggccagccccaacgcgttgaaaggggtcatggtggactactacggttcgcagacgcccgtttcgcaggtggcgagcgttaccgtgcccgatgccaaaacgatactgatccagccctgggagaagggaatgattcccgtcatagagaaagcgattctcgtgtcgaacatcggccttactccctccaacaacggcgaacacatccgcctttccattccggccctcacggaggatcgccgcaaggagttggtcaaacaggtgaagggcgagggggaaacggcccgcgtcagtgtccgcaatgcccgccgcgaagcggtcgaggctttcaaggcggctcagaagaacggcatgcccgaagatatggcgaaggacggcgaggcggaggctcagaagctcaccgaccgtttcagcaagcagatcgacgaggcgcttgccgagaaggagaaagagatcatgaccgtgtaacttcccgcaggcgaacaggacagaggcgccggtacggactccgtaccggcgctttcgtgttcttatcggtcgacgaggggagggaggcaggtgtggcggtgggtggtggttgtcggtgaccggatcagtcgcacggagggaaggagagggggacgtcctctactttgatccggtatttggcgagcagtcccggcagggatgccagcgagaagtgcgcaccgttgagccggttggtctcgggatcgatcgtgaatccgtacgaggataggaaatccgtattcgtcaggtcgttgccgctaaaggtcgctccggataggtcgcatcggtcgaacgaggcattttttagtgcgcaatggtcgaaaacggtatccttcatgcggcatcggctgaaaagggtaccgacggcggggaggttctgaaaaagtgcgttgtccagaatacatgccgtgaaggaggccgagaatcttcggtggccgccggtacgttctccgaacgaagcacccgacattctgcatccggagaatgtcgcgccgtccgtgacggtacccgcgaaagaggcgaggctgaagtcgcattcggtgaagaggcagtcgagcagcgtcgttccggagagctgcgattgcgtgaagatgctgcctctgaaggtgcagcggtcgaatacggttccttcccctacaagttccgtcgtatccgttttcccgaaggtctcttcggtgaagatgcgcttttccatagggcctttcagagcgtgatggggattccccggtagaaatcgaggattttggttttgaaaaggtagctgtagcggctccgggcgagctgcgaccgggcgttcgccaggttgtagagcgcgatgctgtagtccaccggcgaggcggctccgagggtgtatttctcctccagcattcggaacgactcctcggtggtggccacgttgcggagcgctgcttcgtactgccgataggctcccgttgcgtcgatgaaggcctgccggatctccttgtcgaggtttttctgcatcacccggtagtcgtattcggcccgtcggcgggcgatgcggtagctcttcacattgttgcgggccgagagggagttgaagatggggatgttgaggctgagcgatatgtggtagctggcattgtcgcgcatctggtcccggaaggggtattgcacgtaggtggccgggtcgttgaggttcggtttccgtcggccgtcggagaacgaggaaccgtaacctgccgagaggctgagtgtggggtagagactcgaccgggcgatgcggatgtcgcggtcggccatttcgagggccactgcggccgccttgacctggggaagtgcctgtgccgtttcggaaatctcgtccgggtcggcggcgattccctccggcgagaggggacgcggctccggaacgacgatgcggaacgtttcgtggtcgtcgatttccagcagttggcagagggtgaagtaggcgagcgtccggttgttgacggcttcgatgtcttggaattgcgcttcggccagctcggcctgcaactgaagcaggtcgcccgtggtcttgcgtcccgacgccaccagcatctccgtctgccgaacctggagcgcgagcgtctgcgtgcgccggtcggcgatcgtgacctgctcttcggcgaacagcacctcgaggtaggcggcggtgatggtgagcgcgaggtcgttgcgggtcttctccaccagcagcagcgtctcctgcaggtgcaggtccgatttcttgagccggtggtatttgcgcatgccggcgaagagttccgtgccgaccgagagcgacgcgctgaagttggtgttggtggcgttttcgcggaactcgtaggttgtcgggtcgaggacgcgcccgaaggaggtgcccgaaccggccgaggcccctacggaggggatgtagtcgagacgagactgccggcgggctagttgtgcatcttcgatggagagctcctgacgccggagttcgatgttgttctcccgggcatatcggatgcactcctgcaaggtccagggggcttgcatcgcggcgggttctgtcggagccgcttccggcctggcggcaggtgtcgtttcgggcagcggggaggaaggagggaccgattgtccgtcggcctctgcggaggcgaagagcgcggtcagggcgaacaggacggtgacgatcgttttgcgtttcatggtagtaggggttttacgttgcatgcgggctatctcttggttttcggcatcgccgggccgcgcaggcggtcgctttcggagagcccttccaggatctccatgttcatgccgtcggagaggcccgtggcgacctcgtgcctctcgaaggtctgttcctcggcctcctcggggctcgtgaggaggtagacgtaggtttttccgccttcgaactcgaggacgctttccggtaccgtcagtacgttttcgcggttctcgatcatgacgctcgcattggcactgtatcctgagcggacgaaaatgtcggcgtccggctccacggcggctttcacctcgaacatgatgacgttgttgtccgtggtggctttcggggagatatactccagtcgggcgttcagccgcgcatgctgtacggcaccgatggagagcgtgacgggcatgccttcgtggagtttgcccacgtcggtttcgtcgaccttgccgcggaaaatcatgtcggtcatatcggccaccaccgcgatggtggttccgtcgttgaaggtgttggactggataaccgagttgccgaccttcacggggatgtccaggatcatgccgtcgatggtggaacgtatctgggtgttgcttatcgcggcgttgcggctgacgataccgtcgcggacgatttcgaggttgtcgcgggcgctctgcaagctctcctcggcgatccggagctgtgtctccgtcttctcgaactcgtcgagggtgaggacgttccggcgatagagccgttcagtacgttcatactcccttttgatttgggcgaggttgatctccgcctgtttgacctgcgattccgcgctgttgagggagctcatctcggggatcaccttgaccgtggcgatcacgtcgccctgccgcaccatctctcccgcctctttgtggagggcggagacgatgcccgatatctgcggcttgatgaggacttcgtcgcgcggttccacctggccggtggccacgacatattgcgagatggtgtcgcgcacgggcgtcacgatcgtgtagacggtcttgaccggtcgcgttttgttccaaaggaatacgaacgtcccgatgaagagtcccgcgagcaggacgatgagcaggattctaaagacttttttcataactgctatgttttgattctcatttcgtatccgtaggcggtctcctttctgcgctctctttccggagcgggttgcgtcgtcgttcccggggcggagaggagtgtctcgccggcgcgggcgttactcttcccggatggcgtccaccggtttgatcttcatggcgcgggcggcgggaatgataccggccagcaggctccccgcgatgatgatgagggtggccgtgatgcccaacccgaaggagatctggagcggttgcagttcgccttccgtcaatgcggcggctgctatcagcgtttcgattaccgagagtatccccaccccggaggccaggccgaggatgcctgcgatgaaagtcagcaggaagctctcggagaggatc

SEQ ID NO: 2019 - DNA, 23720 bp, synthetic construct
  source 1..23720: mol_type = other DNA
  misc_feature 1..23720: note = Synthetic
gcacaacctgaatacaaaacccttaaataccagaacaacatgattacacgattttccaaggcactgtgcgccgcagcgctggcggcactctcactgaccggctgcggctcgggcgaaacctacccgatggcctccccggagggactcgaccggatcaaggagctgatccgcacgaacgtcgatacctcgaagaacaagatctaccaggtgtcgtggcacgaggaccgcggcgaccgcaagctggagaacatcctcacggaggtggaggcatactacaccgacaccgaaaacaacgactaccggatcgcgttcacactcaccgacggccagttcgtcaccgacgggcccaaaaagagcgaccggcagtacaactcctacgagtgctcgacgccgctcgacctcgaggccatcaacctcgaatacctcaagaagatctgcgaggaggccgaggccatggtcaaggccgacgagcagggacagaaactcacgctccgctcggccgggatgttccgcttccgcgtatggccggtgctgctgcgcgagaccgaccgctggaatcgcagcgaggagttccgcgaggagtcgaagcagctggaggtggacttcgagttcaacttcgtcgatgagaacgaatcgcccgaataccagggccgttcgatcgtgacgaactactacaccgtagccttcacggccaacgccgcgggcgaagtctccatcgacgagtaacggccgcatgggactgctcggagggccgaaaggaggcccggagccggccgcagcgaaaagtcctgcggccggtcccttacacggagaccgggccggtgagctctttgcggcgggggtaacctgcctctgctgcgaagcctggggcgaggcctacgcctgctttgccgagacggggcgccgcgatgcgccgacgctttacaacatggcgctctgctgcttcggggtcgggtggtacgaggagtgccaccgcctcgtctgcgaggccgagcggatgctgccgccggacgaggagccgcgcccgaaaggctcgctcggcagcgcggagcagggaggcagccccggggatgagcttcccgaaccgttccgccgccgggaggccgcagacgggccgccccgctgcccgatgcccggcggccttccccgcaaccgggcacgcacgctgatgctgcgcctccgggccgaggcggcagcccggctcggccgccgcgaggaggtgcgcgccattgccgcacttctgggcaaccgatacggacacatcgaaacctggatcaaaaaattcgaccgatgacaccactcagagaactgtacgaatactacaactacccgaaagccgccaccgaggagcgccgccgtgcgcttctcgaagagatcgcgcccgacgagcgcgacgaagacaacggcggccgcacgtcactgcacctcgccgccgaattcgccgacacggaggccatcgcgcagcttgcggcacgcggggccgacatcgaggcccgcgacgacgagggatgcaccccgctgctccggctggccatgcgccggggagagaagagcatcccgggcgaccggatcgccgatgccggccggctgctgctcgacctcggggccagcctgccccgctcggggcgcggaacgacggccctgatcgaggcggtgcgcaaccgccaccacgcactcgccgcggcactgatcgactcgggccagcggatcgactcgacggacaactacggcaacagcgccctgcacatcctctgcgaggcggccgcgcatacggcccgggagatccgccagacggagcggcgcatcgagggctttgccgagcggtgggtctccgacaaacaacgtgcggagacccagcgcgaactcgaggagcagcagcaggaggccatgcgctgctacatgacggcggggctgctgctcgacagcggcgcattcgaccccgaggagaagaacagctgcggcaagacgccctttgccatcgcctccgaaggcggggccaaatgggtgagcgccctgctgtcggggcaggacccgttcgacgaggcgacgatgaagaccggaggcatggatatcttccaggcgctgcggcagcgcgacatggaggcactcggagccctgctggaggcgggagtcgatctgcagcaggagtgcaccgattcgaagatgtacgacttcggggggcagacgccgctcgtgtgcgccctccgatgggggcagaccgaggctgcggccatgctgctccgggcgggcgccgaccccaacgtcaggacctcgaaagggacgacggcctttgccgtcctgatcgaggaggggtgccgtatctccgacggcgtggagcgtttcgccccgctcgtggagctcttcgaagccaacggatggaaccccgatgccgggcagaacaaggccaacgagcgggctctggcactcgcctgccagcacgacgactacccgctggcaatgtgggttttgcaacgtctgcttgaacgaaaggtggaggtggacggccgcgatctggagggacgcacgccgctcatgcgcctcttcggcccgcacagcgccggaccctaccagagtcagatgcaggagctgctgctcgaagccggagccgatccctgcgccgcggacaacgaggggcgcaccgtgctgcactgcgtggccgagggttactcgccgcagcaggcccgcgaggcggccgcgatgctcttcgatttcgggcgtcccgacgtgtcggccgccgacaaccgggggcgcacgccgctcgacgtcgccgcggagcgcaacaacgaaacactgctcaagttcctgttgaaatacgcatagtcatggacaacaaccagacctttctgaacgcctgccgcaacggccagaagaacatcgtgaagatccttgccgaccggggaggcatcgacctcgaccggcgcgatgccgagggcaacacacccctgtactacgcctgccggcagggataccgcgacgtggccgccctgctgctcgaacggggtgccgacccgtcgctggcgaacaaccgcggcgaaactcccctgcatgccgcggcgcggagcggcaaccgcgagatcatcgaccgcctcatggcgcggggcgccgatcccgacgctgccgacaacgagggatgctcgcccctgatgcggctgctggagaaccggcgcacggacgccgcgctgtggctgatcgaccacggggccgacacagcacgcacggaccggacgggccaccgcgccctcgactacgccacggcatacgggctgcgcgaggtggttgtgcgcctgagccgcccggacgacgatgcgcgcgacgccgagggcaacacgccgctgcaccaggccgtatacaacgactgtgcggaggttgtgcgcacgctgctcgacgcctcgaaggcgcagctcgacacgccgaacgacgcgggcgagacgcccctgctcgtggcgtgcgggcgcgggaacctccacatcgcccggatgctgcttgcggccggggccgacgccgaccgcgcgcggcccaacggatcccgaccgctgcatgcggcggcgcggtcgggaaaccgcttcctcggggaggcgctgctggaggccggggcgtcggtcgatgcctgcaacgatgcgggcgagacgccgctgcttgtggcggcacgcgccgggaacaacgacttcgtgcggatgctcgtcgagcacaacgccggggtcaatacggccgacaacctgcagcacacggcgctctactatgccggcgagcgcggcttcacggagatcgtcgagctgctgctcgcggccggagccgaaggataaaagagatgaagtacaacttaaagcaacaaaaacaaaatggctgacaaacaaaccaaaccacagactccggaagagatcgcgcgtgccatgcagcaggccgccctggagcagatgcaggcaatgatgggcaacatcccgggactcggggcgtccggcatgggcgacatgcaggcgcagatcatggcccagatgcaggcggccgtgcccgatctggccgagatccaggcacagcaggccgcgatgggcacgctcggcggcgtggatgccgccaccgtggccgaagccgcacggcgcaacatggcccaggcctcggcagcggcgcaggcactgcaggacgacaacctgctgagccagttgcaggcggcgaatgccgcggccctcgacctgctgggcgaagagtgggagatcaaacacgcccctgtctgccggctgacgccgcaggagcgccgcctgatggccttcgccgccccgctgctggtctacaacgacgagtgcgtggacgccgtcgagagcgagatcgaacccgagacgttccgcgcgcagctgcagagttggtgggatatcaccgaccgcgactcgacactcgggatcgtccggtggctgctcgacgaggggcaccatgccgacgccgacgccgcactggcgctcatgcgcggcgagaagcctgcggccggcgacccggaggagaaggccggggatgtgcagctcatcgccgagagcatgatcgggaacggatgctgcacggccgcgacgctcccgaagacggccatcgcctgggatctggtgcgcatcgccaacctcgggcgctgggccttccactgcggctacctctccgaggcggagatgtggcaggtgatgcaggtggcggccgacgccgcacacgggcacttcgcatcgtgggaggagtacgggttgagcttcactctcggacgcggcgtatggcacggcgacgaggaggattgccagacggcctgggagatcgtcaccgccctgcagaaggacgaggcgtcgccctggcggcagcttgcgtggaaagagtaaccgaacaaacggacaaccatggaacggggactcgaattctacgtcatgctggcggtaaccgccgcaggagccctgatgtggctctacagaaaaggaagcaaggcaatcacgacggtacgcaagctgcgccgggcattccgggagatctgcctcaatccgaaatcgacgctcgacgccgagcactgccgccgtctggccgtcggggcgatgtatgcctcgcagcagggagcctggcagaactcgatggagacgggcattctggacacgctgcccgagatcctcggcagctggtggggcatcgcctcgaccggggaggcccgcgagcagctcgactacctctgcgagaagggattccgctactactggcccacggtgctcgaagccttccggctcgaagatcgtcagcagcaggatgcgctgttccagcagcggatgacctcgcaggaggactacgacaaggccacctcgcagctgctcaacctgcagcagacgtgggacgagctgacctcgtgcggggttgtcgcctcgcgggaggagctgctccgctacggcgtgacgggctgggatgccgggcgcatcgtcttcgtggcgcgcgcctgctgcgagatgggatacctctccgaagaggaggcgtggcgctacatcgaccgggccgacgcactggcgcacgaggcgctggggtcgtggcacgacctggcgatgagctacatcatcggtcgctcgctgtggggcggcaaacgggcctacaactcggtgatgaagacgacggccgacgtcctgctgagcgacccgaagagcccgtgggtatgctacaggtggcaataggcggacacagggcatgaaggcctcactgaaatacccggtcttctacctcgcgcccgaggagcacatggtccatgtcttctggcgggaggaggcggagacctcacaccggctgctgacggaggccggcggctgggccgggcaggaggtggtcgatgccgcggggcgcaggtatctcatccgccgctgccgcgagacgggaccggccggactcaggggccgcatcgggccgcgcgaaggacgcacggtccgctacgagaccgacttcgaggaggccgtccgcaattgcccgctcccggagctgcaggagtggatcgcccgcgagtacccgcagtcggcgtggttcggggaggagatctggcgaggcccggccgatttccggcgcgcggtgttccgctgccggaatttcgaggagctggcccggatgttccgctgccgtcccgaagaggagccctcgatccggcgcggcctgctgcagttcctggccgtggccgcagcggtcgggctcgccatctggctgctggcccgctacacgtaaccgaaaattgcaaaaaaacatgaaaatcagacacctgatcgcatttatccttctgctcgccgccacaagctgcgcaagcacccgcaaatccgcggagatcgacccgacgttcgtggcctccgaatcggcctggctctatcgggatgccgaggtggtacaccgccgcctgaagcccctcgaacgtccgcaggtgcgcttcgaggtggaacacgccatccggcacgcggattcggtctgggtggtggtgcgcgtgacgataccccaccgctcgatccgccgcggggagtgtttcaaggccatgagcgtgctccaggcccccgaggggttcatggaactgggcgaactgtcgctcgactcgggccatttcctgcccgacgaagaaggagacgtggatgtggcaacccgtcgcggacggatgaagcacctctatctctcgtggcgttttgcctgggacgagtgcatgcggatgaataccttcatcgcgctcttcgccagcctgaccgacggccggcacctgttcgagtatcagcccctgatgctgccgctcttctggagcgacgatacggaggatgaatttttctggccccgctcggccggcattcccgcgagcaccctgctcgagcggtcgccttttgaaaatcgataaccccgcgattccatgacacccctgcacatccaacccctgcccgacagtactcccgacgccgtacaaaagatcgacgcactcaaccgcaagctcggatcgtttatccacgcaccgctcaatctcaaggaggtgctgcgcatggagccgttcgccgccgacgcggaggtggcgcgggccgtcgcggcgacactcgacgactactccatcatcccgacctcgcccgaggagcgcgaaggccaacctgcggcgggtctgccgaaggattacgacatcgtgcggttctggtactgcgtggcgcttctcgccctttcggcggagccggcagccgtgcgttatctgctcgtgctggcgcgcatgctgatggtcgaggatcccgcggaactgtatctgctgcggcgcaccgtccgcctgctggagggattcccatttccccacctgcaggagctccggagccggatcgaagccttctacgacaccgtcacgcaccagttggaggccttccggtggctggaagccgccgggattccgtggcccgagtcatacgaatgggaggtcatcgcgcaattctcctccgacggcgagccctatgccgatccggcggctccgaaggaggagcgccgcaggcgcgtggtgctgaagttccagctgaccagcccccgcagcctttacggcagctgtcgtcggcacagcagctaccagatctcgctccgcaacgacgacaacacgacgcgcggcctatggaacgaaggccacggcgacctgttcatcgacgaccgccgcgtgatgcagcagcagatgttcacgccgctgcagctcccggagctgttcgacgcgctggaggggttcggcatccggctggtgcgcaagcctgtgatggtctacacgagccaggggatccggagtgcccacgtacaggtgttccggatgcttgagaatcagctcgggcgcaaaccttcggaggccgggcaggctgccgtggaggcgccgggacaaccgaaggaggagagcgatgcgggcggcacgccggacggaaaggggaaattcccggaggtcgagcgggccgtggaggaggcgctggacctgctcaaatacgacggagacgtggatgactcgctctgcgagatgcgcggccgctggggcgacgaggccgcggcgctgcacgacgggcggttcgaccgcatcgtcgaacagtatgcctgcctcccgcacgaggaggggatggcggcgatcggacaggagctgacctgcctcggataccgcctatacgacctcgacggcgacgagatctacctgctgacgctgcagcccgaggcctgggccgaagccttcgagcaggcctgccgccaggcggggcaatactgccggctgctcaagcagccccggcgcgacccggggatggcggcccgggaggtcgatcccgggcaggcgatgccctgcgaggaggcgctgtggcccgatgatgccgactacatgctcgattcactggccggcgacttctgcagcgggcggtggaaggagcacggccgggaggagtggcagggcaacttcgtcgccgacctgcgccgacgccccctgcagccggtcaaggtacgctggaaggggttctgccggctcgtctactccccggaactggatttctacgccgccttccactacattccggccatgcggtgctggatgctgctcggcgggaagaacccgctcgaagccgacggctggaagcggctgtgcagcgtgccgatgccgggcgatccggtcctcttcccgggcgaacggccccggtggctggggcgcttcctctgcttcgacgacgggctcggcgccacggtgctcacgatgaacggtcagggcgtggagcgcgtccagcggctgccgctacccaaatcggacaagcgctgctcgttcgcctgcgacggcctcgggcgcatctacgtcggacggggccgggaatacctctaccgcagcgacggcaagagtttcacgcggctcgacttcggcgtatcggagtacgcggatatcgacggctcggtgcccgaagcaggcagcgggcgcatcctgacggtcgccgccggcaaccgggagtcgatggcccggatgctggagatcgacctcggcacccgccggtgccgggccgccgcgatgccgaacctggatccctggtcggaactccggcccttcggcgacgggcggatactcatcctgggctcgtgcgactcgatgcggatagacttcgcgcggatctgggaccgcaggacgggcgaggtgctgcgcctgcgccccgggatgctccgcagcgaccggctcgaacacatcgggcgcatgagcgacgggcgcgtcgtgctgaccacgctccgctcccgcgtgggacaggtcgtactcttccccaccgacttcgaaggctacctccgctcggcctcccggccgctgcacatggctcccctgcagccctacggggagctctaccctgccatcccgctctcgctgcccgacaatacggacccggcaggtgaaaggtaatccgcctccccgacaaaacaaaagaaacagagaaagagagcttcgtggctctctttctcgttgtggcaacttgacgtttggtcaggtcttcggcaatgccgtccaggaggtgcagtcgggcagcacctcccgcaggtgatcgtaaaggcggcaactcaattgttccgagccgtacagccggtccgtggcaaactgctccttgccgaacaagtagcacaccgcgccaccgaaggattttcaggttacgactttgccgatcgccgtttttgagtttttgtttcagccgtccgatcacctcgttgtagaagcggaggatccgccccgacacgatcgccagacgagcatattccgagaggatcgacctttcatcgtttctccatggacgaatctttgtttcagcaagcttcctctcggacaacactcacacccctcgaaagtttcgtccgcaatgctactgcgattgacgccgagaggcaggacatacagcaagaaagacatcagatttttaaatagacatacataaataaaaaaagtctccacggagtacgcggagacggtaggttgaaaaccttcggcctatagccttattgtggtaagatgtagaattcttacatcacaaatatagccccaaaaatggaaatctgcaacattttatttaattttacaagaaacaacttctttcatatggcaaaagtattgggtctggatcttggcaccaactcactgggatgggcgctcgctgacgaatatgaacaggggtatgcgctgctggacaaaggggtagaaatatttcaggagggcgtcgcccgcgacaagaacaatgaaaaaccggccgttcaggatcggacggatgcccgtgcactacgccgtcactatttccggcgacggcttcgcaaaatcgacttgctcagggtactcgttcgttatgacctctgtccaccattgacagaggaacaactttccacctggcgtcagaaaaaacaatatccgctcgatgaggagtttcttcgctggcagcggaccgacgacaacgaagatcgaaatccctatcacgaccgttatgtagcattgaccgagcggctcgacctcgagaatcgcgcacagcgatggctactgggacgagcattctatcatctggcacaacggcgcggattcctcagcaaccgcaaggaggccgggaatgaaaaggaagacggaacggtcaaggagagcatcaagaatctgtcggccgagatggaagcagccggatgccggtatctcggggagtacttctacgggctctaccaacataaggagcggattcgcggcaaatacacctctcgcaacgaacattacctgaccgaattcaatgccatctgtgaccgacagcaactgcccgacaaatggcgccgagccctgcatcgtgctattttcttccaacgcgacctcaaatcacagaagggatcggtcggccgatgtaccttcgagccgacgaaaagccggtgtcccgtttcacacccccggttcgaggagttccgaatgtggtcgtttatcaacaacatccgggtgacgggaccaggcgacctccagccccggcccttgtcgcgcgaagaggccgaggcgataaagccgctcttcttccggcgaagcaaaaacaaggtctatttcgatttcgaggagattgcccgcaggatcgccggcaaggggaaatacgcctgcagggaggagcgcatcgaagccccttaccgcttcaatttcgcccgcacgaccaccgtgtcgggttgtcccgtcacggcttcgctcatggacattttcgggaaggagtggcttcgggaaatccgcagtctctatctgctcggcgatgggaaaaccgaggaacaggtgctgaacgacatctggcatgcccttttctcgttcaaggacgaggagcgcctccgggactgggcctgtgaaaaactccagctttcggaagaacaggccaaagcgtttgcggcgatcaaacttccgcaggattatgccgccatgagcctgaatgccatcaacaagatcctaccctatctgcgttgcggctatcggtatgacgaagcagttttcctggccaacttgcgcgcggcactcccaaaggaggtctacgcagacgagaatcgccgacacaacatcgagcaggacatcgcctcgctgctgctcgactacaagcggaatccgtatgacaaattcgattcgaaggagtgtcgcatcgccgactacttcagcgaccacggactcgatatgtcccgtttggaccggctgtaccatccctcgaaaatcgagacctacccggatgcaaagcccaatgccgaaggaatcatgcagctcggatccccgcggacatcggccatccgcaacccgatggccatgcgggcgctgttccggttgcgcgacctgataaacacgctgctgcgcgaaggccggatcgaccgcgacacgaagatccgcatcgaattcgcccgcgggctcaacgacgcgaaccgccgcaaggccatcgagcagtaccagcgtgagcgggaggctgaaaatcggaaattcgccgaagagatccgccgtcaatacaccgccgaaaccggccgcgaaatggaaccatcggacgacgaggtgctgaaataccgcttgtgggaggagcagcagcacatctgcccctacaccggccggcaaattcgcatttcggacttcatcggggccaatccgggtttcgacatcgaacatacgcttccgcgtgccctcggcggcgatgattctcagatgaacaagactctctgcgagaaccggttcaaccgggagaccaaacgggcaaaactgccggccgaactctccaaccatgccgaaatcatggagaggatcgaatcgttcggctggcgggagaaggtggaaagcttgcaaaagcagatcgaagcccaggtccgcaggagcaaaggtgcagctaccaagcccgaaaaggacagcgctattcaacgtcgccactatttgcaaatgcaacttgactattggcgcggaaaatacgaacggttcaccatgaccgagattcccgaaggtttcagtaaccgacagggagtcgatatcggcatcatcgggaaatatgcacggctctatctgaagacggtttttgaccggatctatacggtcaagggctccacgactgcagcgttccgcaaaatgtggggcttgcaggaggaatacatccgcaaggagcgcgtgaatcacatccaccactgcatcgacgccatcacgatcgcctgcatcggccgccgggagtacgaccgttgggcgcagtacgccggcgacgaggagcgattcaattacggtgaaagcgacaaaccccgcttcgagaagccgtggccgacctttaccgaggatgtcaaggcggtggccgacgaactgcttgtggcccaccatacgcccgacaacatgaccaaacagacacgcaagaaattgcgggttcgcggccgggtcaagctgagtgccgacggaaagccgatctatcaacagggcgatacggcccgttgccggctgcatcaggagaccttctacggagccatcaagcgagaagacgaaattcggtacgttgtgcgcaaatcgattaaactgttgcaacctaccgacatcgacaaaattgtggacgatgcagtccgggatcgcgtacggatggcaattgatgaagtcggattcaagacggcgataaatccggacgaatacacgatctggatgaaccgcgaaaagggaatccctatccgcaaggtgcgcatcttcacgcccggcgtcacacagccgattgcactaaaaaaacagcgagatctctccgacaaagagtataagcaggattatcatgttgcgaacaacggaaactactgtatggccgtctatgaaggtaaagacaaaaaaggcaagctgaaacgctcctttgaacttgtcagcaaccttgaagcagcacaatatttcaaagccagtgccgaccgggaaacttaccccgatatggtaccgctggccgatgcgaacggatttccgctgaaatgcattttgaaaacgggaaccatggtcctgttttatgaaaattcgccggcggaactttatgaatgttcacgcaaggagctggtaaaacgactttacaaagtaacggcaatggcggcagaaggacgggtacaattcctctttcatcaggaagcccgagatcagaaaacgcttaccgccctatatggggctggaacctctcaattctgccagtccaacccgtcgccgaaattgcgcctcagcgtttccaattttaacatgttggtggaaggttatgattttgaactgaccgtaacgggcgaaataaaattcaaaggtgatcgaccatgctgaaacggaccctgtttttttcgacaccctattgtctgagcctgcgcaacggccagatgatcatccatacgcgcgaggctcccgatcaacggaaaagcattccgatcgaggatatcggcttcgtggtgctggaggaccagcagacctccattacgttgccgctattgaatgcgctgtcggacaacaacgtggcagtaattctttgcggggagaaccgcatgccgaacgccatgttgatgaatctggattccaatcgcacgcaaggagaaaattaccgtgcgcagatcgaagcaagcgaaccgctgaaaaaagggctttggaaacagatcgtcgaggccaagatccggaatcaggccgcattgctgcggaaattgggacgtgacggggataaactgaaaccctactacatgaatgtcaagagcgccgatgcggacaatcgtgaagggactgcagccaaaatctattggacagagttgttcggcagcgaattttaccgctcccgcgaaggttctccgccaaacaacctgctcaattacggctatacgatcctgcgggccgctgtagcccgtgcgatcatgggatccggactcttccctgctctgggtatcttccaccggaaccgttacaacgcctttccgttggccgacgatctgatggagccctatcgaccgtttattgacgaaatcgtataccgtctttatacaaacggccatatacaactaaccagggaggtaaaaggggaattgctgcggattttgtttgtcgatacccgtttcgacaagattgtacgaccgcttgaggtaggtttaacctttacaacctcttccatagcaaaatgcttcgctggtacacaaaaaaaggtatcatatcccttgttggaataagaccatgtcagaaacgcgattgaatgcctatcggatcatgtggttgttcgtctttttcgatctgccgaccaataccaaaacagaacggcgtcatgcggcacaattccgcaaagcgttggaaaaggacggcttcacaatgatgcaatattcggtgtatgtcaggcattgtgcctcgaaagagaacatgcaggttcacatcaatcgcgttcgacggtcgatgcctccggctggatttacgagtattctgtctgtgacagacaaacagtatggagacattctcaacttctggggcaagagtgaacgggcaaaaccggacatgccgcagcagttggaatttttctaaaaaacagtatctttgttctttgaaatacaaaaaagcacatcaaactcacttcgacgaaggttccgcattcgatttcccggccggacaaaacggcataaagcactgaaatcgaacaaatagcgaccccggcgttgtggtttgatgtagaaattcaataagatacaacagagcggaaatagccgagctcacgaccttggttgtggtttgatgtagaaattcaataagatacaaccatgagcgtcgaccagcttctcgacatgaagttgtggtttgatgtagaaattcaataagatacaaccatggtcaagacgctcgtgtatccgaagttgttgtggtttgatgtagaaattcaataagatacaaccgacggaataccaccgccctcgacgctcagttgtggtttgatgtagaaattcaataagatacaacgatgctacggcgacaatcacgccgttcaagttgtggtttgatgtagaaattcaataagatacaacacccgcagacggaggagacgatcaaggcgagttgtggtttgatgtagaaattcaataagatacaacaatgtcagccgcttgcgttcggtgtcgatagttgtggtttgatgtagaaattcaataagatacaacctgtcggcatggtaggttatacactcgacagttgtggtttgatgtagaaattcaataagatacaaccatgagcgcgggaaacaacctgcatgtattgttgtggtttgatgtagaaattcaataagatacaacgcctgtacgcttgaggcacgaaacggtagtgttgtggtttgatgtagaaattcaataagatacaactccctgcgagtaagagacaatcggaataaagttgtggtttgatgtagaaattcaataagatacaaccttgtaagggatatccggaagaccgaataggttgtggtttgatgtagaaattcaataagatacaacctcggagggattcagcctgggcacgcttggttgtggtttgatgtagaaattcaataagatacaactgtcagactgcgagaggcgttcacgacgggttgtggtttgatgtagaaattcaataagatacaacgtagcactcgtgcggttcctccacgccatagttgtggtttgatgtaaaatttcaataagatacaacggcgcagcagaaagcagacacgacctacaattgtggtttgatgtagaattggtttacaaagcacacaaagaacttaaacatcatgcagggaagaattaataaattccggtagatcgaaaacgagatgctttgacctgtaaaatatgaacagatacctatagcgtcttgtcattatcatctactatgccgtcagcaccctaccgatacgacgcatctcacggctgatgttcgcctcggagatcttcgcatagcgtcgtgtcatgttcgtattcgtcatcgggatggatccgctcccgcatacccgccctgcggatcgctgaaaagcgcccggtgaaactccgactcgtagacgtgttcgccgcggtgcaggccgaagaccgaaacggcacacccggacaaaagggccgacgtggagagtacggcgatgtggcggtcgagcgcggcgggatcgagatcctcctcgccgaatcgctggctggactgcagtccggcatatgtagtctttgcagggcatctattcaggtcggagattgtggaggcaaagattataaatcggaagttattcccggttgaaaaagcaccattcgagacctcacacaagacaggcggcagggacttgcgaatccataaggatctccgccttacagctcggactcctttcggtgcaatcgccccactcgccggacaagccccggcatgcgtctccgctccggacaaacgacgcgcatgtcaaaaaacaaccccgcaagccccaatcatggagaattattttctacttttgcaatacgaaacaatcagttcgaatttatgattcagcctgcatcgaaaaccgcaaggattgcctattccctcattgcgggtgtaatgattatcctcttctggagaaacatcggctttgcgacagcacttctcgatatgccgggcagctctattctcgggctgtcgatcaaggcgttactcctgactcttgccgttctcatcctgacggccgtcgtcgtcaagccgaaagaagtgttttcttttctcgggctgagtggaaacatgctcaagggattcgggatcgcactcctttgcgtgttccccctgtatcttgtatttcctttcttcggcagcctcaatacagaattgacattcaccgtgttttatgaccgatgcatccttaccgggttcaaggaggagctggtgttccgggcgcttatgttcggtttgcttttccgatatgcaaaaacaggattcttctgggcggtcatattgccggccctctactttggctccgtacatctctatcaaggacacgatgtcctttcgtcgctcgccgctttcggtgtaaccttcatcggcgcactctatttcagctggatgtacgtcgagtggaatttcaacatatggattccggtcggattacacatactgatgaacggagcctggcatattttcattatggagggtacggaggtcgcggcgggtggcctgatatccaatatggcccgaatagtcagcatggcattggctattgccgttacagtctgttaccacaaaaggagaggagaaaaagtccttgattatcccatttggaagttctaaatcgcggtctgctttctgtccgggcagaacagccacgatgaaagcgtgaaaggattgccgtcttttgcctcaacaggagtgggagaataaaagaaaaagccttgcatatcaatgacatacaaggctctttgctttctatcgggttcctttctgaccccctctggagcggaaaacgggactcggacccgcgacctcaaccttggcaaggttgcgctctaccaactgagctatttccgcattgctcgattgcgagtgcaaaggtaggcaaaaaatccgaatctccaaattttttctgaaaaatcccgaaattttctctccggagagacggcaaccggccgtttcggagccggaccgttccgcccccgaagccgggttgccggacaaaaaacagcggtgaagcgcattttgcgttcgaaatccgtcgccgatgtgctatctttgccgtaatgaaaaacgcgatcaaactcttttccgcgctgggggaacgcctgcgcacgttcggatgcgacgacacgagccgctgcgtcatcgcccaagcgtgcgcggagaacggatggttcacccccgacgacatccgccgcgccgtgaaggccctgtgcgacgaaatgctgcaggaggagacgctcggccgatggctggagctctaccccacgctccccgtcgcgaagccccgccgcgtgctggtcatcatggccggcaacatcccgctggtcggcttcttcgacctgctgtgcgtcgtggcaagcggccaccgctgcctggtcaagccctcggccaaggactccgcactgatgctccacgtcatcgggctgctgctcgacatcgatcccgaaacggccgtcgaacaatacgacggcacggcgcccgtcgatgccgtgatcgccaccgggagcgacaacgccaaccgctacttccgggcccgctatgccgggattcccgccctgctgcgcggaagccggcagtcggtggccgtgctctcgggctcggagagcgcagcccagctggccgggctctccgacgacatctgggcctactcggggctgggatgccgcaacgtctcgctcctgttcctgcccgaaggctacacgccgcagctccacacgccgccgatgcaccccggataccgcaacaactgccggcaggcccgggcgctgctcaccatgcaggggcgggagttcctcgactggggcgactccgtggcggtcgaacaggaggagtttcccccgatgctgagccaggttgcctgcgcgcactaccgctcgacggacgaggtggcggcatggctcgcccggcacgacgaacgcatccagtgcgtcgttaccgaatgcctgccccacagccgccgcgtagcgttcgggcaggcccagtcgcccgcactgaccgactaccccgacgaccgggacgtgatggcttggcttgccgggttgggataaatttctatttttgcaaagagaaagacctttaatacagtatcacaatgtcgatggtattccgattccggatgttgagcgacgagaacgaccacttcgtacgcgactatgaggtgatgtacgacacgacgctgctcgaattccacaacttcattctcgactcgctggagtacgagccctgcatggcatcgttcttcacggcggacgaccgctgggagaaacagcgcgaattcaccctcatggagatgggcgacagctcgggcgaagggcccgaaacgatggagagcatccgcctggggcagatcatacacaacctccgcgaccggctgatctacctcttcgacctgttcggcgaccgggcctactacctcgagctcacgggggcctacgaggccgacccgcaggcctcctacccgcgcgagatctacgccgtggccgaggccccggaccagtacgacccctcgaagaaccgcgaagacgaggacgagggttcggccttcgaggagatgatgggcgacttcaacgacttcgagggcgacgacaactacgacgatgagtattaagcgcctgctggtcatcgtcgggccgaccggttcgggcaagacggacctgagcatccgcattgcccgccgttacggcgcgccgatcctctcgaccgactcacggcagttctaccgcggaatgccggtcggcacggcgcagcccaccgccgaacagctgcaggcggccgagcaccacttcatcgccgaccgcgaaatagaccggcacctcaactgcggggcctacgaggcggaggcgctggcgcgtctcgaagcgctcttcgccacacacgacgtcgtggtggcggtcggcggctcggggctctatgtccgggcgctgtgcgaagggatggacgacctgccgccggccgacgaggccctgcgcgagcggttgaacacgcgcctgcgcgaggaagggatcgaatcgctcgccgacgagctgcagcggctcgatcccgcctattgggaacaggtggaccgcagcaacccggcgcgtgtgctccgggccctggaggtctgcctgcaaacgggacgcccctactcgtcgctccgcacgggacggcagcgcacacgaccgtttgccgtcacgaagatcggcatcgacctgccccgccccgagctctacgcacgcatcgaccggcgggtggagctgatggtcggcgaagggctcgaggaggaggcacggcggctctacccgttccggcacctcacggcgctgcagacggtcggctaccgcgaatttttcgaatacttcgacggccgcatcacgcgagacgaggcgatcgaactcatcaaacgcaattcgcgccgctacgccaagcggcagctcacatggttccggcgcgaccccgcgatccgctggttcgccccgaacgacgaccgggcgatcctcgagtatatcgacagtacggcggccgtaccggcggcctccggcgaagcgtaaccgacaggacggtcaccacggagctcgtctctgaaaaaacctcccgaatgcgggtctgttacggatgcgccggccatgggaaggggctgcaagccggaacaggaatccggagtgccggctcgaatccggctcggtttccagccgaggagcggatcggagatcacggctgcaggtgcaaatcccggcttcggaacacgaatcggcaacggttccaacgccgggattttgcggatcgcaaattatttcgtacttttgccgatgtcttccccgcggaaggctgcgcccggatggtggaatcggtagacacgccggacttaaaatcctgtggccagcaatggccgtgccggttcgatcccggctccgggtaccaggaaagaatcccagatgacttcaacggtcgtctgggattcttgcttttggtacgcggccgcagtccaagagccaggtctcgtgccgcagcaaacaggagatcagcgacagagtcaatcgatacgcctcgggcagatggcccagtcgccgcccgacaggtgtgtgggcatcgtcgcctgatccgcaaaaccggacacggcatgccccgtcggccgcaactccgtcagtccatatgcagggcctccatgaagcgcctgatcgtttccggattgcccgtgtgtttgccctcgtcttcgctgatcttgcacgtctcgttatagaagggccacgattccgtaatctttgcggcgatgagcttgatcacgatattgagcggccggatcccctcgaaatcattggttatgtgcgtgcctatgccgaaagagggctggcaatagtccttggcgtactgttggatccggatggctgcggacgtgtcgagggcgttgctgaacacgacctgcttcgtccggggatcgattcccagcgaacggtatttcccgacaatcctcatgagctgctcgtaattgtccccgctgtcgatgcgcaggcccttgaactggttcgcaaaatcctcggaaaagttcaggctgaagatattccatccgaaactgtcatagaggaagagccccagcgccccgcggaaggtgttgcgccacaggttcatggccatgtggttggccatctgcggaccgtacatgccgccaatggcgcagatgaattcatgcgccatcgtgccgatcggcagcaggtcgtacttcatcgccagatgcacattgctcgttccgacgaagcggccggtcccgttcgatgccccttgacagctcttcagggcggatatggcggtatcctgcgcctgataggaagcccgacggcgtgttccgaaatcactgaatacgcacccggcatccaacagccgccggcccttttcggcggtcttgtcgtaataggcccgatagtcgaagcaccggtcggcaccggtcatcatgtaatagagttcggagatgatggcaaggagcttcacctccagcagaatggtctccgaccagcagccttcgatatccaggtgcagatgcccctgcccgtcctgccggaccctgacccatcggtggtcgaaccggaaacccttcagataggtatagaaccaggaggggatgaagcggcaccgacgtttcatgaagtcgatctcctcatcggttatgatgaccgactccagcatcaggatctgctcctcgagcgcctgtgcgaatccagccggatagacggtatcatccctgtccgtaaatgcatatttcacacgtgctctggggaagttgtcgataacggcacagcacatggtgaacttgtaaaggtcatcgtcggtaaaatgatttatgatctgtctcatggcaataatgttttgatgacagtcgcggggtaccccttccggccaggcggaaagcccccggccccggcaacagcatcccgctgcatcgaggttcccgttcgttagcgttccgaagaccgaaaagcgcgcgtcggaccggtatgaaacggcccggcagatcggcgaaaccggaaatcgcacacaaatttaacaaattgtcccgttttttcaccatacgggaaccgctatctgatcatcccaaccgacaggaaggccgcaatacgggaaccgaaggggcatgttcgggaagttcgacatgttgtcgcaaaaaggatctgtcggacttttcggataatctgcggctgaaaaagacaaccgcccgcacctcccggcatgctatttttgcggcatgcccgttccggggagcgcggctgccatccaaacctgtcgaacatgaagagacttgcaattgccctgctggcggcggcaacggcgacagcctgccaggtggactaccatccatacgacacccgcatcgacggggagtgcggaatcaacgcgaagaacatcgcccgcatcgaggcctcgaccgccgggaagagcgccatccgcttcgccgtgatctccgacacgcagcgctggtacgacgagacccgggaggcggtcagcgccctgaacgcccgcggcgacatcgacttcgtgctccacacgggcgacatggccgacttcggaatgaaggcggagttcgagcgccagcgcgatatcctcaaccgcctgcacgttccctacgtcgtcctgctgggcaaccacgactgtctggccaccggagaggagatcttccgcacgatcttcggcgacttcaacaccgccttcacggccgggaatgtccggattctctgtctgaacaccaatgccctggagttcgacctccgggaggcggtgcccaacttcgaattcatcgagacggagctgaccgaattcccgcccgaggcgtcgaaaaccatcgtcgccatgcacgcgaagccctacacggaacagttcggagacaatgtcgccaagggattccagtatctcgtcacgcgctttccgggcctgcagtgctgcatcaacgggcacggacacaattacaaggtcgtggacctgttcggcgacggcgtgctctaccacgagtgcgacaacatcgccaagagatcctatctgctgttcaccgtaaacgacgagggctatgcgtgcgagcgtatcgaattttaggagggcgctgctcctggccgcccttctgacggcatcggtcgcctccgcggggtcccggcagacggaaaccgccccggcgccccgccccctcgaccgccgggag

SEQ ID NO: 2020 - DNA, 23693 bp, synthetic construct
  source 1..23693: mol_type = other DNA
  misc_feature 1..23693: note = Synthetic
gcgatggtctggtccagcccatcgaaatagatatacagattgtcgcgccccaattgtgcaccataatactgcacccatttccggagatagaaatcatcattccggaccatggtgactgcggcgattctcttcataagcttaaaacgtttcaagaattcagttccctcctcgcaaatatcgcgccgtatagcctttgccggaggcggcaaggtcttcaggcgtcccggcgaagaccacttccccgccccggtcgcccgcatccggtcccaggtcgatgacccagtccgcggcccggatgacatccaggttgtgctccacgacgatgatgctgtgcccgtgggccagcagcacgtcgaaggccttcagcaacttctcgacatcgaagaaatgcaggcccgtcgtcggctcatcgaacaggaagaggatctttttaccattgtccccacccgtcatgctcaggaaataggccagtttgatccgctggctctcaccgccggacagggtactgctgctctggccgagcttgatatacgaaagccccacatccaccagcggctgcagccgggcggcgatggccttggcttccggttcttcctgcgcgccgaagaaagcgatggcctcttccacgctcatgttcaggatgtcatcgatattctttcccttgtagcggacttccaggatatccggcttgaagcgcttgccgccgcaagcctcgcagaccatggtcacatccgccatgaactgcatctcgatcttgatgaatccttcgccctggcattccgagcagcggccgccgtcctggttgaacgagaaataagacggggtatagccgttgatctttgcatactgctgggcggccatgagcttgcggatgtcatcgtagaccttcagataggtcacggcattgctccgggagctctttccgatcgggttctggtcgacgtattccacctggcggatccggtccaggttgcccgccaggccgcgaaacgtgcccggcaggctgccggtctcattgatcttgcggaacaaggcgggatacaggatatcccccaccaaagaggacttgccgctgccgctgaccccggagacgacggtcaggacccccagcgggaactggacgtcgacatccttcaggttgtgttccatggcgccctgcaccgtaatggaataggaccaggtccgtttctcgcgcggcgtgcgcaaccgccggccggtcaggtattgcaaggtcagggaacggtccatgactttctcgctcaccttgtccccgatccgtccctggaagacgatctcgccgccggcgacgccggcttcgggtcccatgtcgatcagcacgtccgccgcccgcataatctcctcgtcatgctccacgacgatgaccgtattgccgatatcccgcaggcgcttgagcacatcgatcaggcggtcggtgtcccgggggtgaaggccgatggaaggttcgtcgaggatatacatcgagcctaccaggctgctgcccaaggccgttaccaggttgatccgctggctctcgccgccggacagggtgttgcaggcccggctcagggtcaggtaggacaatcccacgtcccggatataggtcagccgcgtagtcacttcctctacggccttgtgcacgatccgttcctcatagggcgtcaactgcagggtccggaagaattcgagcaattcatccacgttcatggacaggagctcgtggatgttctttccgcccacccggacatagagcgcatcctggcgcaggcggctgcctttgcaggcatggcaggttgtccggccgctgaaacggctgagcatgtatttgtactggatcttgtagcggttggactcgacccactcgaagaattcgttgattcccacgaaggtcgtatcatccccctcctggtaccgggtgttccagattacgtcccgctgggcctccgtcagttcgcagtacggcgtaaacagcgggatgccgtatttctcggcattcttgaccagcaagtccttgaaccagcccatcttctcgccgcgccagcaggcgatggcgccgtcgtagatggtcttggacttgtccgggacaacgaggtcctcgctgacaccgatgatctttcccaggccgccacagaccgggcaggcccccagcggactgttgaaactgaacatgtattcgtccggctcgcggaaggtcatgccgtccgcctcgaaccggttcgtaaaggtctccatgcggccgtcccgcatcacgtgcatccggcccttgccgacgctgaagcaattctcgacggacgcatgcaaccgcgtgcgcaggtcctcgtccgggtcggcgggcagtttggcacggtccaccagcaagtagagccgggacgggaaatccccggcttccgaacgcttcatcacctcctcaatcgggacgatcccgtcgatccagaaacgggaataaccctgttccttgagggccagcatcagttccaccttgtcggcgcggttttcccagtccaggtcggccagcagatagactgccgacgccgtcccgtccagcaggaaggccatcacatcgttgatgccgtggcacttgacctcaacgccgctgaccggggaaaaggtccggccgatccgggcgaagatcatccgcaggtaatcatagatttccgtcgtggtggcaacggtcgagcgcggattgcgcgtattgaccttctgctcgatggcgatggccggaggaataccctcgatcgcctcgacatcgggtttggtcatccgaccgaggaactgccgcgcataagaggaaaggctctcggcgaaacggcgctgtccctccgcgaagagggtgtcgaaagcgagggaagacttgccggatccggaaatacccgtaacaacgacgaactttcccctggggattttcaccgtcaggttcttcaagttgttgaccttcgctccttttatgatgatgtttccttctgccggcatcgctgatatctaggtaaggaatgcaaatatacacataattccgcggaaaaggaaatacgccattttgacactaaataatgccattttgtcaacatggcatgccaaaatgtctaccttttgaataatttttggcattggtgcaggaattgccatatcctaagtcgtccggcggtcaagaccccggaaccgaaacagaaagtaaaacaattaaaagtataggaggtaatcactatggtacctgtaagaagaaaccagaactggatgtcgaacatcttcaacgacatttttgacgacaatttcatggtccgcaccagcacgaccgctccggcgatcaacgtggtggagaaagatcgcagctacgagctggagctggcggctccgggcatgaccaaggaagacttcaacgtcacccttgacaacgaaggcgacctcgtcatcaagatggagaagaaagtcgaaaacaaggaagagggcgaaaagggccactacctgcgtcgcgaatggaactacaccaagttccagcagacgatgctccttccggacgacgccgaccgcgaaaagatttccgcaaaggtggagcatggcgtgctgagcgtcagcatccccaagatcgcgaaagtcaagacggaagacaccaaccgtctgatcgaaatccaataaggattacaaagccttgaaggaaacccggtcacgggttcccttttcagacacggcctcgaagaccgtgtctttttcgtccatgctgaccgggaacgaccagatcacgccggtcggatcgccgctggctgactgccgggcaatctccgttccgttcttgtaaagggtcaggcccggcgcattgctgtagaccgtcagggtgaattcctggccggccggacgggcttccagacgacgaccggcgatgtacacggtctcgacatcgtggttccaccaggacttatagagatagaaggaatccttcttcgtcttccggtcgcgggttaccaaccccttgtcattcatatacatccgattctcattcggggtgaagttcacgccatccgcgctgtcggtgaagccttccttgcggttggccaccgggaagtcgaacaggatccagatggaggtgaagttcagccagggcatccgggcgatctgctgggcatggcactcgtgaaaacggttgccatactcttcgaaatggaagttgttttccggcgcctgcagacgggcctcatcccaggtgtgggcaaacggattgacaccggcgccatattcggagatgttggacacgcccatcgtatcccggatccaggtcatgttctccgtcagcttgtccatccggccgaagtcgtagtaccagccatggtagcggttctccgaaaagaaatcgcccttcagggtcgtatagccgtcgcggccgtagacggaatcatcggtcacgccgaccaggcggtccggatccagcgtcttcgcctcatcgtacagcagggcggtttcctttaccgcgcgcgcggcatcgaacgcaccctggtaacggttgttgttgccccaattatcgacttcattccacagcccccagaatacgatggacggatggttgtacagactgccgatcatttcgcggagctgctggtggaggttgtcgaaataggccggttcggcccgcacgccgcagacattgacccacggaatctccgtctgtacgatcaggccgaggcggtccgcttcacggaaagcccggtcgttgtgcggataatgcgccagccggacgaagttggcgcccagctccttgacgatctcataatcagccttgtagtcagacgcatccagggccgtcgccttgccgtcgaggtcctgatggatcgacgtgccccgcagcggatacggctgcccgttcaggaagaagccctcctgcgcatcggcccggaaataccggaaaccgacctcggtcgagaccttgtccaaggtacggaaaaggccgcctttgatccggagttccgccgtatacaggtacgggtccttcgtcccgttccaaaggtggggccgggcgatgtcatgttcgaccgtatactggaccgactccccggcagggaccgtcactttttccgattttttcgcgacaatccggcccgaagcatctttcaaacaggagatgaccgtaaccttgcgctccttgccggcagagacgagggtagcggacaactgtgccttggcggcttcatccgagacctcgggcgtacgcacatgcagccggtagataccctgccggacagggcagaaatacaccggacccatctccagcagatgcgccggattgtgcaggccgccgttcttgttgaaatccgaactaaccggcgccagctggacatcctcatggttgtcgcagatcacttccagcacatgctttcccttgccatcgagccggacggtgaaaggcgtgtagccgcccttgtgcgtcgcgacggtcttcccgtccagccggatctcggcagcctgggcggcgccttccagcaacaggaaggaacgcttcccggaaagacggacttcgcgtttataagtcgccgtcccacggtaataggaggcggaatgcccgtcttccgcattgtaggaatgcggcacggtaacttcggtccaggtcgagccgtccttgctgaaagaccagcggtcaagctcttgaaccttgggggcataattctgggcggaaacggaaagggccagcgatgcggcgcagcacagggtcaggattttcttcattggggtcgatacatttcggtttgagtgtaaaattagcaagaattctcttgaaaacaaacggattattcttatcttgggcttacacaagaaaagccaatatgatcaaccccatctattctccgtctccggaccgctatgaaagcggcatccggtatcgtcgttgcggccgcagcggcatccgcatccccgagatcgccctcggtttctggcacaatttcggcgacgtcgaccccctggcccgctcgttcgaaatggcccactacgccttcgaccacggcatcgtccacttcgacctggccaacaactacggcccgtcctacggctccgcggaagagaccttcggccagatcatgcgcaaatccttcgcgccctaccgccatgaactcttcatctcttccaaggccggcttcgacatgtggcccggcccctatggggaatggggatcccgcaagtacttgatgaacagcctggaccagagtctcaagcggatgaacctcgactacgtggacctgttctattcccaccgcttcgaccccgagaccccgctggaggagaccatgcaggccctcgtggacatcgtccgcagcggcaaagccctctatgccggcatttcgaactatccgtatgaggccgcggaattcgcctacaagtacctgcgcgacagggacgtcccctgcctgctccaccaggtccgctacaacatcctcaaccgtgagccggagcaggatggcgtcctcgaccaggccaaggcggccggcagcggtttcatcgcctactccccgctcgcccagggcctgctgaccggccgctatctgaacggcatcccggcagattcccgcatggccaaggagcatttcctgaaatcctccgtcctcacccccgagctccacgcccgtctggtccgcttgaacgaaatcgccgcccggcgcggccagaccctcgccgagatggccctcgcctggtgcctcaaggacgaccgggtcaccagcgtcatcgtcggcaccagcagcgtccgccagctggacgatgacttcaaagccctcgaaaacatccaattcacccccgaagaactcgcagccatcgatgccgcggtcctcggttgaaaccacttctgatcatgaagaagttcattcgcatggccctgctagcagccgccctgatctcccccgccctgaaggcccaggaggtcactagcatcctccaggtgctggacaccaagaccggaaagatccgcgtcgtccaggaattcccctatctgatcgaggccccgaactggacccacgacggaaaatggctcatttacaacacccgcggccagatctggcgcatctcccccgatggcggcgagtccacccagatccctaccggcgaggtcatgggctgcaacaacgaccatgtcctgtccgccgacgggaaacagatcgccgtcagcgcccagaccgcatccctgcgcggttcccggattttcatcctgccgctcgaaggcggggatccccgcctcgtcacgccccagtctcccagctatctccatggctggagcccggatggcaagacgctctgctactgcgccgaaaggaatgggaattatgatgtctataccatcccggccgccgggggcgaggagacccgcctgaccaccgccgacgacctggatgacggaccggaatattccccggacgggaaatacatttggttcaactccgtccgcagcggcctgatgcaggtctggcggatgcgtgccgacggttccgaccagcggcagatgaccttcgacgaagacctgaactcctggttcccgcacgtctcccccgacgggaagaaagtggtgttcatcgcctaccacaaaggagacctgaaacccaacgagcacctggccaacaagaatgtggtcttgcgcatgatgacggccaagggcaagaaggtccgcaccatccacacccttttcggcggccagggcaccatcaatgtcaattcctgggccccggattcccggcacatcgcattcgtaagctatcggctgccataaccggccgtcctgccttatatcgcggtccgtttctcccgaatcgggatggaatggatcgcttttttcatcgggaatccttatctttgcaaacacatataccaactacgatggactacaaggaatatttgaaattctatcccgacttcccggtaccgggagtcaatttcgtcgacatcatcccgctgatgcaggacaaagcgctgttccgcagcctgatcacggacctgggggccctttgtgccagcccgaacatcctcgccccggaagcccgcggtttcctgttcggcgccccgatgctcatcggcacggacaacatccagcggatgatcccgctccgcaagaagggcaaactcccccatgcggaaggagacctgatctgcgtcgacatcatcaaggaatacgggaaagaccaggtattctaccgccggtccgacctggtcgcctgcattgcggaagacggattcatcaacgtcaccttcttcgacgatgtgctggctaccggcggcacggcggagggcattatccaaagccttaacagccaagtggtcaccatcgaaggcaaaacgtacccggtccgcgtcaccgactgcgtcttcctggtggaactcgacgacctgtgcggccgggcgaagctggagccgatcgccccggtcaaatcgctcatccacctttaggtttttttgctaaagatttttcagaaaaaatttgcagaatccgaaattgtccctatctttgcatccgcgttcgacaaaaacgcctgaacaaagcctggtgcggtagttcagctggttagaatgccggcctgtcacgccggaggtcgagggttcgagtcccttccgcaccgcaaaaaagtccaacccgaaaaggttggatttttttgttgtatgctggtcccacaaccctcgacctccgccccccccggagtcctcgaccgcgacatcccggtttgtacaaacgaaagggtaccaaacgctattttcatgtacaaacccaaaatagcagatcgctgcggcatttccggattttcttcatatctttgcctcgaaagcatcaagagtgccccatgagggccaccaaccgagcaggccagatgccacggtggtaaaagcgatgcggattgttcaatcaaaaacaactctgttctatgtcacagatttcatctcaggcggcggaactgcgccgtcaacagttggagtacagcacatccatcacgaaactgtattctcgtcatgcatcaaccctgttcgcccactttgacgagtggaagggcaatgatgccttctatttcatcgagttgcggctcgacatggcctatgtcgcctccagcggattgatcgcggaaatcgcccatccaccgtactatctcggaacgatggtccggaactccttgttacatccggatctgttcgcgtgcgaatgtcccaacggacaccgggcctatgcctatacctatagcggctcacctctgtccggcagtgtctcccaggcaatggcctgcccggtgtgcggttggaaccaatggatacagcgaagcggctggcactcccggagcagggcgctgactgcgacccaggccgaggaccaggagcgcctgcattgcattcaggagtccgatccggatttccatcctgccgacctgcgggatttgctgcgcggcctgggcgtccccgaagaagaatgcatcctgcccgtgatcgataagaagatcctgcgatccgagcatggaggcatcatcttccaacgggatccgtacggcggcgtaaaggtcgaagatacccataccggacaagttacctgtcaccgatggaacggtatcaacgaatagtcctccatatcccacactccagtcccgtgttcccgaagggctacgaggactggatcctctctttctttataaactacccgcattctgctatcgttgcctcatgagtgccgaaatgaaattgggagaagcctacgtcctggtccacaccacaaccggactggtaagcggaaatcattctgggtattgcaatccaccgggaaaccagctagttccgaccaaatcccacgaatagagctctctcacctcgaaaaagggcacagtcaagtcccaattggactccgtgcacagtgcgaagatgaaacatcataataaataaacgcaatcctgttattggattatcggaacaatttgcggaaatttgtaaggagacgacgaaatccgcatcttgcaaaaaagccccaccgaagcggggctttaggataaatccttcggcatttagccttattgtgataagatgtagatttatacgaaacaaagatagaaagaaactgaataaaacgcaagatatggaacgaatattaggacttgatctgggaacgaactcaatcggatgggctgtcgttgaccgaaaggaagacaacgaacgaatcttggtggacaaaggcgtccatatctttcaggatggtgtagcacatgacaagtccggagagaaacctgccgttcaagacagaacggctgcacgggcatcgcgacgacactatttcagacgtagattaaggaagattgaactgctgaaagttctcgttgaaaaccagctgtgtcctcctcttcgcgaagaagaccttgaccgctggaaggcagagaaaaaatatccgatggacccggacttccttgaatggcagcggactgacgacaactgtgaaaagaatccctaccatgaccgccacgtatgcctgactcgcgagctggatatgaagcaaaagagcgagcggtatattttgggacgagccctatatcacctgaatcaaagacgaggtttcctaagcaatcgaaaggatgccgtcaagaatgatgataatggaaaggtagagaaggatatcacgagcctttcaactgaaatggcagagatgggatgcgagtatctcggagagtatttctaccattgttatggcaagaagaagatccgcaccagatatacggcacgggacattcactaccgaaaagaattcgaagccatttgtaagaagcaagggttatctgagcctctcgtccagcaactggagagggctatctttttccaaaggcccctcaaatcccagaaagggacaatcggcagatgcaccttcgagaaagacaaaccccgctgtccagtatcacatcccaggttcgaagagttcaggatgtggcagttcattaactccatccgagtcaattatatgggcgaagggacacgtccccttaaccagtcggaaattaggacgatcttcccgctgttcttccggaagaccaagccagattttgatttcaatgaaatcgcggtcaagatggcaggaaaaggtaactataaatgcgatgatgaaaccattgaggtcgcgtatagtttcaattacaagatgaattctgatgtccctgggtgcccggttattgcttctcttctcagtgctctgggaatagacgcttctccggagtgggatacggacttgtgctctatttatacaagaggggaaggtaagagtatcgaacagattattaatgacatatggcacgcattattcttcttcgatgatgataagcgcctcacctcatggctgatggacgcactacaacttgatgagaaagccgcgacttctattgtcaagtcgcgctttccgcaaggctatgcctcgctaagccataaggcgatcatcaagatacttccttggctcaaaaaggggctcaagtatagcgatgccgtcttcatggctaatttgcctgcgacactgccccgaactatctcccagagtaaacgggacgaggtggaagagaatgtccgaatcttgctggaggattttgatgcaaaccctttgaaccgggagtcgaacaaattgcaagcagtctctgattacctgataactacagcgaaggacgtcaatacaaagaagttgtaccatccgtcaatgatcgacatatacccgaaggctcttccagatgcttccgggaagatacggcttggttctccgcgtacagatgcatttaagaatcccatggcattgagagccctcttccgtctgcgagctttgatcaaccaactgcttgatgagggagtcatcgataaggagaccaagattaatatcgagttcgcccgaggattaaacgacaccaacaaaaggaaagccatcgaggattatcagcgcgaactggagaagcagcgcaaagaagaccgtgccaagattatagaagcgtgcatagatacattcggcaaagactatgagccctccgatgatgaccttattaaataccgtttatacgaggaacagaaccatatctgcctttatacaggaaagcagattggacttgcacagttcctgggagcagcaacagaatttgacatcgagcacacactcccccgctcccgcggtggagatgattccatgatgaacaaaactctttgtgacagtcattttaacaggttcgacaagaaagcgaaattgccgtcggaattagccaatcatgatgaaatcatgcaacgcatttcatcttggaaggaccttgcggatggctatgaaaaacagattgcatcatggctgcggaacaaacgtaacgccgcctcgaaggaagcgaaagattcagcgatacgcaggatccactacctaaaaatgaagcgtaattattggaaaggcaagtatgaaagattcgtcatgccaaatgtcccggacggcttctccaaccggcaaggtgtcgacataggtatcatcgggaaatacgcccggatgtatctggcgaccgtttttgaaaagatatttgttgtcaaaggtgcgactacggctgatttcagaaaagcctgggggcttcagaaagattatgtcaagaaagccaggaccaaccatgcacaccattgcattgatgctatcaccatcgcttgcattggcaagaacgaatacgatacttggaaagagtatatgcttcgggaagaaaactatttgtggggaaatggaaagaagcccgattatcagaagccatggaagacatttacggaagacgtccttcggattcccaatcagttgctggtctcccactacacaccagacaatatggcgaaaaagagtcgcaaaaagatgcgggtacggggtatcatccaacgaaatgaagttggtgaaatcaagtattgtcagggagattccgcacgaggattgctgcatttggatactgtgtatggcgcaattaaacgggatgaagaggtaaaatatgtggttcgaaaagctctagattccttggaggagaaggatatcaagaatatcgttgatgatgtggtccgaaagaaggttaagacagcttacgagcaattcggaagtttgaaaaaggccgtggaaaaaggtatctggatgaaagagaatgtcgttcctatcaagaaggttcgactattcgcttcttcaatcacaaatcctatccatctcaaaaggcatcgtgatgtctcgacaaaagagtacaaacgctcgacatatgttgccaatgacagcaattactgtatggcaatatacggagatgtcaagccctcatttaagctatattcaaaaatggatacggtgcagtattttaaaaagggtctaagtttgaaagattggattcctacaacagacggacaggcgcgtccgctgagatgtattttaaaaataggcaccatggtactactctaccagagtagtccacaagagttatataattgccctcaggacgatttggtcaaacgattatacaaggttgttggcctttcttcatcgcccacgaaaagtgggaatcgtatctacctttttggaagggctacattacgtttccaccaagaggcgagactatcaagcgaactaaaagagaagaaaggtgtatggacagaaggtgaagactaccgagcgattattggcttatcacataaccaattgaactgcctcgttgagggcatcgattttgagttgagcacaactggaagggtttcattcaaggcatagttattatgataaagcggacattgtatttctcttcaccatgccgtttatcgcttaagaacgagcaactgattgtagagagtctaaagacaggtgcaattaaatcttcgcccattgaagatcttggtttcatattgatcgaggaccagcaagtcagtatctccatccccgctttaaacgcattgtctgaaaacaattgctccgtagtgttttgtgataaaaagcatatgcccgtatcgatgttaatgaatctggattcaaactccacacaagctgagacatatcgatttcaagttgatgcaggccttccgctgaaaaaggtcctttggaagcagattattgaatccaagatacggaaccaggcaaatctcttggacaaggttggaaaagatggaagcgtattaaaacccttctactcaaatataaaaagcggtgatgtagataataaagaaggcctttccgcgaagttgtattggaatgcgttatttgggaacgaattcaagcgggagagagagggcagtgggccaaacaacatgctgaattatggctattctattttgagagcagcaatgactcgggctatcatgggctcggggcttttcccagcatttggcttgtttcataaaaaccgatataatgccttccctttagcggatgatctgatggaaccttaccgcccattcgtcgatcagattgtatatcggctgtacaccgaacgcaaaacagaactctctcccgagacgaaacaggagttgatccgggttatgtttgttgatacatccatcaatacgataacccgaccattggagatttccctttcgatatcaagcgcgtcgttggcaaaatgcttacgaggagaacagaaagttctatccttccctttattgcagtgagatggaaaacagattaaatgcctaccatgttatgtggctattcgttttttttgacttgccaactacgactaagcaagagcgaaagaatgccgcaggctttagaaaagaccttgaaaaagatggcttttccatgatgcagtattcggtatatatccggcactgtccttcaaaggagagtagggatgttcacataaaacgagttcgggcatttgtccccccattggggcttgtgagtattctttccgttaccgataaacaatatggggatatcatcaatctctgggggaaaaaacagaagagccttcccgagactccaatccagttggaattgttctagttctttgaaataattggtagaaatgaatagagacatcctagcacttccttggttcttatctcggcacaattacttgaatatgctgataataaaacaaatacaaggctaaggttgtgatttgatgtagaagcagaataaggtacaacaagagtttctattcaaagaacacctgtttgttgtgatttgatgtagaagcagaataaggtacaaccgacagggcaaaggtaatcattctcccggagttgtgatttgatgtagaagcagaataaggtacaactggaggacggaggcggttgtggaggcgagggttgtgatttgatgtagaagcagaataaggtacaacatttctgacacacgactgcaacgcacgtaagttgtgatttgatgtagaagcagaataaggtacaacgtacacataattcttagccttattagacgagttgtgatttgatgtagaagcagaataaggtacaacgatatggccgattaagcgatggaacagaacgttgtgatttgatgtagaagcagaataaggtacaacacaaggcccagggcgcgggatccttcgagaagttgtgatttgatgtagaagcagaataaggtacaacatcgctacgttcaagttcgatgactgcgagttgtgatttgatgtagaagcagaataaggtacaacatggataaggaatacaaccttatcgaattgttgtgatttgatgtagaagcagaataaggtacaacacctgccggactactccgaggtttcatccggttgtgatttgatgtagaagcagaataaggtacaacttcaacccaaatgtttgtttccatttttagttgtgatttgatgtagaagcagaataaggtacaacattgatgaccttttggatcagtccgttggagttgtgatttgatgtagaagcagaataaggtacaaccttccatggtcttctcgggatctccgtaaagttgtgatttgatgtagaagcagaataaggtacaacaatgatggaaaaagtgagcagagaggagaagttgtgatttgatgtagaagcagaataaggtacaacctttgagaaaacttgataaggtctgcttagttgtgatttgatgtagaagcagaataaggtacaaccgcccagggtcagtttggagctgtccagggttgtgatttgatgtagaagcagaataaggtacaacttccagatgatcgagccggaatacctcatggttgtgatttgatgtagaagcagaataaggtacaacattaccgccgccgaaatgcgggcccgatgcgttgtgatttgatgtagaagcagaataaggtacaacttaatcatggcaatagttaatggacaatagttgtgatttgatgtagaagcagaataaggtacaacactgtaagaagaagtcatgaacgcgtgaaagttgtgatttgatgtagaagcagaataaggtacaacggttcaaatccggctgggttggcaacatagttgtgatttgatgtagaagcagaataaggtacaaccaagggatgcttttctcgcggaagaaagagttgtgatttgatgtagaagcagaataaggtacaactacggggtcagcgctccgatcttcgtcgagttgtgatttgatgtagaaaaaaaatggaataaagtacaacaccctgctggtgtacaaaacgatccgcgagttgtatttgccgtttgtctcttgttaataatagttttaagcagaaacaatccaactttgtaagaaccaccgcattattttgaagtaatatgcaacccatctttactatgcaatacggcgaattcgccgttgtgaatgaactctccgataaaatcaagaatgcctcggtattcgttccggcttctgcacaggagaaaggaatcgatttgttgctttatcgctacgataaggaacgagatcgacattcgactgtaactgtccaggtcaaaatgtcgcggacgtattatcctgaagggaaaaggaaacaactgaaataccctttttcactttggtttaatcgctttgatattcaagacaatgcggattggtacatcctcgtaggtatttatgcccttgatccgactaaactcgactcaagagcgaagggaaaaacatgggggaaaatcatgctggcgtttacacgagaggaaatgaaggaattcatgacgggtgtaaaacagaaaaaggatccgacaaaagaagacaagatgttcggcttcggatttgatggcaacaagaaaatctttcagaccagaggatgtgctcaagaaagagatatgacgcagcacctcatcgaaaaccgactggacgaaatcgaagcatcttttcaatgacgaaattaataatctatatttgcatcaggtccatatttgcgaccgaaagttcatattcaaatctggctgcacgttttcggcgcataacgttcttcgtatagtgtcgtagttcagttggttagaatgccggcctgtcacgccggaggtcgagggcccgattctcgtccgcaccgcaaaaaagtccaacccgaaaggttggacttttttgttgtatggcatgccggccgcgctccatggttaccgccctttggggttataaatgtcagtagtgtcccaaatgaatggacacgactcacatttttggccgtttttgacagtagtcccgtctctccagggacactactgacatcgcccgctgtacagaatggtttacggaaaaacaacaaggatcatagccgctgtcggggaactgcaaggctggattctctttttataaagtacccgcattttgttatctttgcctcatgagcgagtattaccggcatttcaaaggcaatgtataccggcttatcgggattgccaaggacagtgagaccctgcagaagatggtcgtataccaggccatgtatggggacggcgacctgtgggtgcgcccatatgacatgtttttcgggaaggtggaacgcgacgggaaggtcttcgaccggttcagtcctattagcgaagaggaggccctcaaagataatatgccggaatgaaactggaagaagccatcgtcctggtcctggcttctgccggacggggcatgcggacagagcagattgccgcggaaatcaatttccgcggcctttaccagcgtcaggacaaacagccggtatcgagcaaacagatctatgccgtcatcatgtcccatccggacacgttcgtcaagtccgacgggctgatccggctgattatgtaagaagatatctgggtttttcgctttttcaaacgttagtccgagacgggacggatcggcatgccggagaaatagattcccttcccatttacactagaggctggaaacaacaggcttgcgctaccagagcttctcgtccatcacttaaaccggtcgaaacgcaggagctcggactgcagggcatccggatccggggcgctgtccggatggaagagggagaccgtggtcttgcttccggcatcggaccagttgccgacaacccggccgtcctgcagcatcacgttccagaacgtaccgctgttgtcgtgggcatggtgccggtggtccggatgcaagacgacgtgccggcttttgtaaccgatcagatattcatcgtacgcgggaagcaagtggacccttccttgtcgaaagccgcgtgtacgactgtcgcagtggatgtaataggtctcccctttccaacgcaccgtgtcaagttccttatccagggacccgatcgccttgcgacagtcgctgatattgagcccgctccaccagacaaagtcctgcagcgtcgccggcgaatggctacggaagtatttccgggcgaggagggccaaggcttcttcgcgcggcaaaggagcgaaagaaggaatccgctccgccgtcagcgccagcgtccgtttctgtgggtgtaggaccccggagcaaagcaggcccgacagttccgccaggcggatatgataggaaagccggtggtcatccatccggatatcccgctcggccagggcccgggccagatcctctttcaagaggtcattccgaccggaaaccacatcggcgaaaatgccgctgatccacgcctcttcctccggggaaatatcgaccccgttggcatgcatccagccgcgcagcccgccaagggccttgcgccggcacagggaaagcatccaggcatagtcctccgccgccaccagctgccaggtcgtccgcagcaggtgcgtacggatgatcttcccgctgtcgtaatcacgtgcaaaggctttcgccgacggtcgtttcgtccgcatgcccaccgcccagcgcatcatccggtagtcctgtgcctgcatggcacccatccacgagaccacctcgtggggcgaagaaaactgcgggcagatgagctgctggttcagcaggcgggcggaaacaggattcatttcaggctgtcatagatgccgatcaccttttggttggcggcacgaaggcccgcttcatccatcttgataaccttccggtcgtaggtcatcaggccgttcacctcgatctccacatcggtcgtctgggtgtagacggctgccgcgcatccctggcggaccaggtcgccaagctgctcagcaaaacgctcatactcagccaatacttcttctccgctcttatactgcacatagccccagttgcggtccggctgccacagatggccctcgaccgccaggccgatgccaccgtattcgcccaggacattgaccagcgccggatcccacagcggcatctccggattcggataatgatggacatccaggatgtcgcccagtccccgcacgaagttgccgcccgaagccggattgaccagccgggtcggatccgcctgtttggtgaaggccacggcggccggcgtgtcgaactgcgcccacccctcgttgaagggtacccagacaacgatggacggatggtttttcagctgggcgatgatctcgccccattctttataataggttgcgcggccagacgccgggatctcccagtcggtaccgtcatagtcgtagttatgccagctgttgtgccggctgtcggtcatcgacggcatatcctgccataccaggatacccagcttgtcgcaccagtaataccagcgctccggttcgaccttgatatgcttgcggatcatattgaatccgaagtccttggtcttctcgatatcgaaacgaagggccgcgtccgtcggtgccgtgtacagtccgtccggccaccagccctggtccagcggaccgaagtggaaaagcggctttccgttgagagccatccgcttatgtccctcggcatcctccacaatggagatatcccgcagcgccgtatatccttccacctcatccagcactttcccattccggatatacttgactttcaatccgtagagataaggatcgtccggcgaccagcagtgcggcgcatccacctgcatcgtcaccggctcgcccggagcggcagacacctcagcggctccgtccagtgcgaagacgacctggtccccagcctgggaaccctccacggcggcggaaagcacaaccctgccgtccgcatgcccctccgccgtataggagcggatatacgacttcggagccggttccagccacacgctctgccagataccgctgacagccgtataccaaatgccggaaggatgggacacctgtttgccacgcggctgggcgtcgttgtcggtcgcatccagcacacgtacccgcagcgtctgcggtcccgatccggtcaggtaaggaacgatgtcaaaagagaaatgcgtatagccgcccgtatgggtaccgacgggttgtccgttgacccagacatccgtctgccagtcgacggcctcgaaatgaaggagcagactccccttccgccatttcttcggcaccgagaacgtcgtctcataccagagcgcatcttccgccgtgaatgtacgtcctacgccggaaagggcggattcgaccgcgaacggcaccaggatctttccatcaaacgcctgaggctcagcgtcctttgtcgtgatggcatagtcccagagtccgttcagggactgccactgcccgcggaccatctgcggacgcggatactccggaagcacggcggcggggtcgagatcttccgcaaaggatgtcaggatatggtctccggccggcgaccagtcaaaggattcggaattaccggcacacccggccaaaagcacggcgcatgcgcaaaaagacaaggagagtctcagtttcatggtttgaaatattttacgtctgatacaaatttactatttttgtgtgacaaccgaataaatcaaagggtttttatgtattctttcctcctctgtctggctgcccttgtcatcgggtatctcctctacgggacttttgtcgaaaaagtgttcggcgccgatgcaacccggcccaccccggcgatcaccaaagcagacggcatcgacttcatcccgatgcccacttggaaagtatttatgatccagttcctgaacattgcgggaaccggtccgatcttcggtgccatcatgggcgccaagttcggtccggcctcctacctctggatcgtcctcggatgcatcttcgccggagccgtccatgactacctgagcggcatgctgtcggtccgtcacggcggcgtcggcctgccggacctggtcgggacctacctcggaaaagggacccagcgggtcatgctctgtttctgcgtcctgctcctgctgctggtcggtgcggtcttcgtctacagccctgcggagattctcaaggacatggccggcgacggcacgtcgaagtcgttcatgatctgggcgggcgtcatcttcgtctattacatcatcgcgaccctcatgccgatcgacaagatcatcggcaagatttacccggttttcgccatcgccctgattttcatggcccttgccctgatgatcgggctctttgtcaaatggccttccctccccgaactctgggacggactgtacaaccgcgggccgtccgtcggcgtgaccggacagcccatcttcccctgccttttcatcaccatcgcctgcggagcgatcagcggcttccatgccacccagagccccctcatggcgcgctgcatgaaaaatgaacgtctcggccggccggtgttctatggtgccatgatcaccgaaggcatggttgccctaatctgggcggccgtcagttcctggttcttctttgacggaggcgcggcctcggtcggtgctgacatgacggcctccgccccgaccgtcgtcaccctcgtttcgaagagctggctgggcacgctgggcgccatcctcgccctgctcggcgtcgtggcagccccgatcaccagcggcgacacggccctgcgcagcgggcgcctgatcatcgccgacgccctgcactttgaccagaaggcacgccgcaaccgcctggccatcagcatcccgatgttcctgctcgtcgcccttctcctctggtacaacatctccgatgtcaacgggttcaataccatctggcggtacttcggatgggccaaccagaccctgtccgtattcacgctctgggccatcaccgtctacctctgcaaaagccacaagggtgcctattacctgatcaccctgctgccggcctgcttcatgacggccgtatgcacgacctatatcgccaccgccaagatcggcctgaacctgccgatgtcgtggaaccaggccctgggcatcggcgtatttgcgctttccgccgttcttttttatatttggaaatcccaaaagcaaaacaaacaataacccgcatatgttagacaaagaaagagggctgtatgtagcccactgcgaaaacggcccgatcagcatcgtgggcaagatggccaaccggcacggcctgatcgccggcgccaccggtaccggtaaaaccgttaccctccaggtcctggccgaaaccttctgccaggcaggcgttccctgtttcatggccgacatgaaaggcgacctgtccggtatcagccaggtcggtaaactgtccggcttcatcagcaagcggctgccggaattcggcatcgaagatccccagttccaaagctgcccggtccgtttcttcgacgtcttcggcgagcagggccatcccatgcgcgccacggtctccggcatggggccgcagctgctggcccgcctgctggaactcaatgagacacagaccggcgtattgagcatcatcttccgtatcgccgacgacaagggcttgctgctgatcgacatgaaagacctgcgggcgatggtcgacttcgtgggccgcaacgcggaagagtttacgacggaatacggcaatgtctccaaggccagcgtgggcgcgatccagcgggcgctgcttaccctggaagaccagggagccgacaagttcttcggagagccggaattcgatgtctacgacctgctgcagtgcgaaggcgggaagggtgtcatgaacgtcctggccgccgaccagctgatgatgcgtccgaagctctattccaccttcctgctctggctcctgtccgacctgtatgcccgcctgcccgaagtcggcgacctcgacctgccgaagctggtcttcttcttcgatgaggcccacatgctcttcgacggcacctccaaagcattgactgacaagattgaacaggttgtccgcctcatccgctccaagggcgtgggcgtctatttcgtgacccagtccccgaccgatatccccgaggccatcctcggccagctcggcaaccgcgtccagcacgccctgcgtgcctttaccccgaa

SEQ ID NO: 2021 - DNA, 23690 bp, synthetic construct
  source 1..23690: mol_type = other DNA
  misc_feature 1..23690: note = Synthetic
cactcatcccggcaccctttcccgcagtgcacataatccgaaacctctgagttccggggacacgcacccgccaacagcaacttcgtttcagacaggcgatcaccacgcgaaacccactacgcccccttcctctttctcgtacgcccgtttcaccataccatcacgccggccattcccttcatttacggcacacatctcaacgtccggaccggcgcaaaatccccctctaactgttccggtactgctgcggactcatgcccacgtagcgtttgaaatactttccgaaaaacgaaacgttcgggaaattcaacgagatggagatctccttgattggcatgttggtcgatttgagcagtgccttggcatccatgataaccacctcggcaatcaggtcggccaccgtttttccagtctgctgtttgaccgtcgtgcagaggtgctgcgcagagaggcgcatctgttcggcgtagaacgacacgcgccgctcctgggcatagtgcttcatcaccagccgcaacagctccttgcaaatctcctcgccacggctcagccggtggtttccgtcctcgttttcgacccgctgatacattcccgagatgccgcacaacatcgactccagcacacaacgctgcatgttgggctgggtcagcatatcttgcgagaacatccgatagagaagcgagaagtagtcccgatagatttccgccatctcctccttgagcgggacgaccggattttcgatcatcaccggaaagaggtccatggtcgacttgaagaggttgacctcgcccatgaacttggacgaaaagcccacgaacgaaaggcggaaattggactccgatccgcggaactgaatgacgctacccggcgccacaataataaagtcgtttttcttaatgctgcactctttcaggttgatcgtcgcggtcagctccccctcgacacacagcacaaagatgcccgccttgattttacagggcacctgataccaccccagcacctcacgggtaatgtccacccacgcaaaaaaatccaccggcaagtcaatatccggcagttgatccgacgcacggtccgtctcaagcaaacgattcttcatgttctccgtttaacaatggattataagaataacggaaatttcccaagattcgtctacaatctgaataaatgacctctttttacaacaattagaccgacaaccctccgtttttcccaataatttccggttccacggccataccatccaaccacgccactcccgacaatccacccccgcatcaccagaaacaaccaccccaagacatttctacgaaagcacccgacagacacacttcacgccccaaaataccgcaacgaaaagacgcaaccggacgcacagaccgtttttcgtcccccaaaaaaccgttttttctaaaccttgacttcgaaaagctcgtcccaggaagtcgtatagttgggggagacatgattccggtttgaacgcagcggatcgaacccctgagcagccgtaaccagcgtatgccgtccgaaacgttcattcacctggtcgagcatctccatgagtcgagcctgccgtccccggtccatcggatcgaaaagcgaagtctgcacggcgccccgcggcacgatctcacccagcaccaccccggccttcttgtaaccaaaccccgacgtaaagatactcttcaacgcccggtcggcagccgctgtcagttcgagcgtgctgtccgtcggcgtcgggaaagcgacgatccggttgacatactgctgcggctcgtcgggacggtgacggttcgtggcgataaagacctgcaactggccgcagacactcccctgccgacgcaacttttcggcactgagcgccgtgaaaagggcaatcgactgacgcagttcgttcagctcggtcagctccgtggcgaagctgcgcgaagtgcatatctgctgtttggccggcggcgcctgctcgaagccgatacagggttcgccctgcaactctttccaggtacgcagcccggtgatccccatccgaccgcggacccatccctcggccatccggacaaactgaccggccgtaacgatcccggcctgttgcagcatccgggtgtgccgccgcccgatcccccagacatcctgaatcgggaagctgcgcagcaccttgtccacatcctgggggcggtacatcaggcagctgttttggagtttcgagtagcgtttgcagagtttgctggccaccttggccagcgttttggagggcgacatgcccagactgatcggaatgccggtatgacgccgtaccgtggcggcgatgcggcggccggtgacaggaagttcctccagtgcaaagcccgaaagatcgagaaaggcctcgtcaatggaatagacctcggtgccgggcaccaggttccgcagagtggtcatcacccggtgcgacatgtcgctataaagggtgtagttcgacgaaaggacctgcacatcgtactgccggatcagcggcgccgcctggaagagcggctgtcccatccggataccgattgccttggcctcgttcgagcgcgagatgatacacccgtcgttgttactcagcaccacgaccggcaccccctcgaggcgaggggcgaaaacccgctcgcagctcacaaagaagttattgcaatccgcaagtccgtacatattgttttcaacaaaaatcactgcaatttcctgcccatctccgccccctcaagcccccccctaccccaaaagcagatcagggagaaggtcagattttttcattaacgcgccacacctcactccggattcggaagcgcacctcccgcgagacccggatagagcgataatcggggaaaaggcagagtggagagatcagaatttcttaatcacgtatcgcaccacaccccggattcggaagcgcacctcccgcgagacccaaacggggctatattcaaaaacagacagaccggggaggtcaaaatttcttaatcacgtatcgcaccacaccccagattcggaagtcatcctcctgcgagacccggatggggcgatagtcgggattggccgggacgagccacaggcatccttcaccccgatcgacccgcacccgcttgagcgtaaagtcaccgtcgatgcagcagacggccaacacgccgtcgcgcacctcggccgcacggtcgatcaccagcaggtcgccgtcgccgatcccctcgtcgatcatgctgaccccgctgacccgcgcaaagaaagtcgacgcggggtttcgtaccagctccttgttcaggtccagcgacatttcggcataatcctcggccggcgaaggaaaaccagccgatacgccgcttccggccaggggcaactgcacagcctcgcccgaaaggtccggcgtcatgaactccaacgattcccgatgtttgtattccatagtatccgattcttcggacaaagataacggacaaccgccctgaaaagtacgccccgtccgcaagttcttcccgagaacatccggcgacaacccgccgtcgtctccgtacaccaccgttccgcgggccctactccccaccgagaccgccccacacattgtcccctccgactccatctcccgacctcacccacaaccgcccttcccaaaaaacaatcgggcgggaagccctccggcacccgcccgaaaaccatacaggttcagcccccggtttgtccgtagcccaaccgctatgaaaccgttctacttaaagacagacatcggcacctcgcccgtccaggcggccggtttttcgacccggaacaggtagagaatcgtagctgccgtgttgaccgtattgttcggttcctcgatcttcatgccggagcgcacgccgggaccgacgatcccccacggcacaatcatctcatccgaagtcgtcccgccatggccgtagttgatgccgccatggtcgctcaggaacaggatatgcgtatcttcatacagcccttcggccttcatcttatccagcagcagtccgatctgctggtcagcctcctcgatcgaacggatatactcggacgacatccacttgtggttgtgtccggcgtggtcggtgtgcaccgagtagaggaacaccacggtcggctcgtcgcgatggtctgccatgaagcggagcgccttctcgtaattgggaacataaccgtcctcctccaggaaacttacctcatccaggtactctttgttataggggtagaagagattgatccagttgtaatagaaagccgtccggaccccttcgacctgctccttcaacacctgaaagaccgacggatagtagccctttgcgtcacgcgctacggccgggtatttcgttttggccagttcccagccgttgtcgaacaccccgtgctgttccgggccgctgccggtcagatggctggtccagttggggagggtcaccgacggcatcaccacccgcgtatcgagcgacagcgccccctgagccaggagcgcatcgagattgggcgtctttgccgtctgaaatcccggcacggagatgccgtccagagcgatcatcagcacccgtttggccttcgggcgagcctccagagcactcaccccggcaaaacataccgataataataggaggagaagttttttcatgattcaatccggtttaggttagcaaataggtccaggccgacaaccaacatcggcattaccccgaggatacagtatcccggcccggaacaggatgctaagatagcatttccacaccccggatagaatggattttttatggaatcacatggacaatccagcggtttaaatccgacacgccctgttaaaatcaatcgaatagtccatgtaaattgaaaatttatccattcccttcccagaatcttcttcccaaatttgcgaatacctcaaaatacacaaaaaccaatgttccggatcccactctccaaaaccctcctggctctatgcgccgccggcctgctcgcctcgtgcggcacaccccagaaacccgtcaccttcgccatcgcctccgacttccacgctcaggacatccccgatggcggcgaccgcctcaacgccttcatcgacacggccatcagccgtcaggtggacttcatcatcgagctgggcgacttctgccgtctggacagcatcagcaaaccctaccgcgacagctggcagcgcttcccgggcgacaagtaccacgtcatcggcaaccacgacatggacgtctacggccccgacgaatacaccgccggcatgggcatgccgggtcgctactactcgttcgaccgcggcgactaccatttcatcgtgctggacggcaacaacatcttcgacggcgagaaatacacccactacgaccacgccaactactacgccaaccccaaattccgcgctttcatcgacccggaacagatggagtggctgcgtcaggacctggccgccacgaccaaacgctgcgtactgttctcgcaccagagcctcgaccaggtggtcggcaaccgcgaagaggtgcgcaagattctcgaagaggagaacgagcgtgccggtttcaccaaagtggtcgccgccttcagcgggcacaaccacagcaactaccagaaaacgatcaacggcatcacctatattcagatcaacagcgcctcatacgtatgggtcgatcaggactccggaaccgaacgccgctaccccgaagagatcaacaagaaatactccctgctgaaatactccatcacctacgaccgtccactgttcggcatcgtgaccctcaccgacgacggcctcacgatggagggtgtcgacgggcagttcctgccgcccatgccgcaggaggtaggtcttggcgacagcctcggccccttcccgctcgttccctggatccgcgacgtacagatcgaatattagccctccgaccggctccggccggttatcgtcaccacgacacggaacacagacggggaatccgcgtcgttcccggtgccgtctttcagagaggcggcaccatttaccccgcatcttattatacccccggcggagctccgcaccccctttatcccttatttacttagtcccggcagcaggccgaccaacagccccgttgccaaacacacccaaccacccaaaccaacaacccaccctaaacgaccatgaaacgccatcacctccactgggcactgctcagcaccctgctgctgaccctgcacgcctgcaaggggcccacctcgatcgacctgtccggttcgtggcgctttgccctcgacccgcaggacgtcggcaccgaccagcaatggcagagccaaaccctgaaagacacccttcgccttcccggttcgctccaggaacagggcaaaggcgacgacatcggtcccgacaccaaatggaccggaaacatcgtggaccactcctggtacaccgcccccgaatacgagaaatatcgccaacccggcaacatcaaagtccccttctggctcaatcccgacaagcactacgtcggcgcagcctggtaccagcgcacgatcgacatcccctccgactgggtcggtcgtccggtcattctggaactggagcgtacccactggggcaccaccctttacattgacgacgaacggatcggtcaggaagagtcactgcagaccccgcaccgctacgtgctgaacggactctcggccggcgagcacaccctgaccctgcgggtcgacaaccggctgctggtcgacgtcggcgtcaacgcccacagcgtctcggaccacacccaaagcaactggaacggcatcatcggccgcatcagtctgaacgtcaaaccctcgctctacatcgagtcgatgcgcatcgaccccgacatccgcaccaaacaggcccaggtaacggtccatttcggcggtgacatcggcgccgctcccgccacgctggtactccaggccgagacgcagaccggcaaacgcgtcggccacgccattgaggttcccgtcgccaccggcagccagcaggtcgaagccacggtcgacctgggagccgacgcacagctttggtccgaatacacccccgtcgtgtaccgcatgacagcgaaactcaaggccgccgacggcaccgacgaatcccaatccctcttcggtctgcgcgaattcaaagccaacggcacccgtttcgaaatcaacggccaccccgtcttcctgcgcggcacactcgaatgctgcatcttcccgctgaccggctacccggccatggaacctcagtactggaccaagatcttcagcaaatgccaggagtacggtctgaaccacgtccgtttccactcgtggtgtccgcccgaagccgccttccgtgccgccgacagcatggggatgtacctgcaggtcgaatgcggcgggtgggctgaagtgggcagcggcaaaccgcaggacgaatggtttatccgcgaaagccagcgcatcatgcgcgagtacggcaaccacccctcgttctgcatgatggcctacggcaacgaaccctccggcgccaaacaggccgaatggttcacctccctgatcaccgaatggaaggcccaggatacgcgccgcgtctataacagcgccgccggatggcccttcgtcgaagtcaccgactactggaacccgatggatccccgcatccaggtctggggcgcaggccttagcagcatcatcaacagcgaagcgtcgcgtacggactacgatttcgcctcgatcatccgcaaagaccgccccaccgtcagccacgaaatcggccagtggtgcgtctaccccaacttcgccgagatcgacaagtacaccggcgtactgaaggccaaaaatctggaaatcttccgcgagaccctcgccgaacacggcatggccgacctcggtgaagcattcctctacgcctcgggacgcctgcagaccctctgctacaaagccgacatcgaagcggccctgcgcacccccggattcgccggattccagctgctcgacctgcacgacttccccggccagggcaccgcactggtgggcgtgctcgaccccttctgggaagagaaagggtacgtcacgggccaggagtacagcatgttctgcaaccgcaccgtaccgctggtacgcttcccgaagatggtttggctgaacaacgagaccctcgaagccccgatcgaattcgcccacttcggcgaacagccgctgaccgccaccccgatccgctggacggtggccaccgccgacggtcgtgaactcgcctcgggcgagctcaaccgcgacctgcccatcgacaactgcatcccggccggttcggttcgctgcgacctctcgagcctcgaccgccccacccaactcgtggtaacggtcagcgccgaagccgccaacgcccgcaaccaatggaacgtatgggtctacccggcccagaaacccgccgtcgaaaaacagccctacatcaccacccgcctcgaccaggccgccctggcccgcctcgaagccggcgaatcggttctgctgctcccctacggcaccctcaccccggaacagggcggcaatatcgccgtcggcttctccagcatcttctggaacaccgcatggaccaacaaacagccgcctcatacgctcggcatctactgcgacccggcccatccggctctggcctccttccccaaccagggggtgagcgactaccagtggtgggacctgatgagccgctgccaggccatgaacctgacgagctaccccgacgatttccgccccatcgtacacatcatcgacgactggttcaccaaccgcaagctcggcctgctctatgaagcccgcgtcggaaacggtaaactgctcgtctgcagcgccgacctgcaaaacgacctcgaccagcgtcccgccgcggcccagttccgccagagtctgctggaatacatggcctcggacagcttcgccccgacccagaccctcccggtcgaaaccatcaccggcaaatagcctccacctgccgaccactccaccaatttcggccggccgataaatgcagtcaggcggtttgctccaccatagagcgaaccgtctgactgttttcgggtcctgcatattcccgcagaaataagtaactttacgcatcgataaaccaccccgaccatgatcgaaatacgccccgcaaccaccgacgatatccccgccattcaatccgtagccgaagtggccttccgttccacctacgccgagatactgacccccgaccaactcgactacatgatggattggatgtactcgaccacctcgctgcacagccagatggaaaacgaagggcaccgctattacgtcgcctgggacggagcaacacccgtcggttacgtttcgatccagcaggagggcgacaatctgttccacctgcaaaagatctacgtgttgcccgagcgtcagggcgagcgtctcggccggcggctgttcgagcaggcatgcacagccgtcaaggctctacacccggccccctgcaccctggaactgaacgtcaaccgccacaaccgtgccctgggcttttacgaacggatggggatgcagattgcccgtcagggcgactttccgattggcaacggctactacatgaacgactacatcatgagcttcagcctctgacccggctgccgacgacgccttcacattgactttcgcttcctcagccgccgcaacccccactgcggaagacacgggtttacctaaacacagacctgcccgagcgctattttcctgacctatcgtcccccacgcatgcccatcggggttccttacccaccctcaagttgcattcgtcggaaaccttcctccccccctgcctccgtccaacattccacataccgaggccccgcgtccccttatctttccccacacaccacatacgtacataaaaaaaagtctccacggagtacgcggagactgtaggtctatgaccttcggcatatagccttattgtggtaagatgtagaagtcttacaccgcaaatataaaaattatcttgtcataacccaacttttatcctaaatttacacaaaacaacacattaaacatgacaaaagtattaggattggacctcgggaccaactctatcggctgggccgtggtcgaagagagtgaaaacggttatcgcctgctcgatcaaggcgtcgatatatttcaggagggtgtcgcccgcgacaaaaacaacgaaaagcctgccgtacaggaccgcaccacagcacgcgcctcacgtcgccactacttccgccgtcggctgcgcaagatcgccctgctgaaagtcctcatcgcgcacgatctctgcccgcccctcagcgacgaacagctgcaaacgtggcgcacccggcagatctacccgcagaccgaggctttcctgcagtggcagcgcaccgacgacaaccgggacaagaacccctaccacgatcgttaccgcgccctgaccgaacgccttgacctcaacctgcagtcagaccggtacgccctgggacgcgccctctaccacctggcccagcggcgcggtttcctcagcaaccgcaaagaggccggaaacgaaaaagaggacggccaggtcaaaagcagcatcaaggaactgaccgtccagatgcacgatgccggctgtcgctatctgggggaatacttctacaagctgtaccagcgaaaagagaagatccgcaatcactatacggcccgcaacgagcattacctggccgaattccaggccatctgcgacaggcagcagctgcccgaaacgtgggtcgccgccctgaaaaaggccattttcttccaacgccccctgaaatcgcagaaaggacaggtcggccactgcaccttcgaacgccggaaaagccgctgtccgctgtcccatccgcggtacgaagagtttcggatgctcgccttcatcaacaacatccgcgtcaccaccccgcaggacgaccagccccggccgttgaacgacgcggaagtgtcagccatccgcccgctcttcctgcgtaagtccaagccccacttcgacttcgaggagatcgcccgaaaaatcgccggcaaaggaatgtatgcctgcaaggacgaccgaaacgaagccccctacggattcaacttctcccgcacgaccaccgtcagcggctgtcccgttactgccgcgctggcgtctctgttcggcgacgaatggctcaccaccatcgccagcctctacaccctcgccgacgcgaaaaacgaggaacagatcctgaacgacatctggcacgcactctttttcttcgacgacgaagagcggctgcaggcctgggccgccgaaaagctccagctatccgccgcggaggccgccaccttcgccgccatccgtctgccgcagggatacgcctcgctgagcctcaacgccatcagcaagatgctgccctacctgcgccgcggctaccgatacgacgaagcggtctttctggccaacctcaaggcggtacttccggccacgctctacgccgacccgcagaaacttcagacgatcgaagcagagatcgcctccatcatcgatgactaccgttccgacccgatgaaccggcatctgaccaaggagcagtgcgtcaaagactacctgcagaatacatgggacatcgacgcgacccgtctggagcgactctaccacccctcgatgatcgagacctatccggccgcccagcccgatgccacgggtcagttccggctcggctcgccgcgtacggcctccgtgcgcaatccgatggcgatgcgcgccctgttccgcctgcgcgccctcatcaacgccctgctcagggagagaaccatcgaccgtacgacgaaaatccggatcgagttttcgcgcaacctcaacgatgccaacaaacgcaaagccatcgaacagtatcagcgagaacgcgagagggaacaccagaagttcgccgacgagattcgccgcctctacgccgaagcgaccgggcgaaccatcgagcccagcgacgacgacgtgctgaaataccggctgtgggaagagcaaaaacacacctgcccctataccggcaagcggatcggtatcacggacttcatcggcggtgccacctcgtttgacatcgagcacaccattccgcgttcgcgcgagggcgacgattcgcagatgaacaagaccctatgcgaaaaccgcttcaaccgcgacgtcaagcaggccaaactccccgccgaactggccaaccatgccgaaatcatagcccgcatcgaggatttcggctggcaggagcgaatcacaaccctgcaaaatcagatcgaaggccagatccgcaagagcaaaaacgccgccaccaaagccgaacgagacaacgcgatccaacgccgccactacctgaaactgcaactcgactactggcgcggcaaatgcgaccgtttcaccatgaccgaagtaccggagggtttcagcaaccgccagggggtcgacatcggaattatcggccgttacgcccgccaatatctgcacaccgttttcgaacacatctacacggtcaaaggggccaccacctccgatttccgccagatgtggggcattcaggaagagtacacgaagaaagagcgctccaaccacgtccaccactgcatcgatgccattaccatcgcctgcatcggtccccgcacctacgcccaatgggcccggtacgccgcccaggaggagtactatcgaaggaatcgtgccacccgtcccatcgtcgagaaaccgtggccgacctttacggaggatgtcaaagcgattgccgacaccctgctgatttcgcaccacacgccggacaacatggccaaacagagccgcaagctgctccgcctgcgcggcaaagcgaagctgaacgcccggggcgagaaggtttacgttcagggcgacacggcccgcggagttctccaccaggagacgttctacggagctatttctcgcgatgaacagatccaatacgtggtacgcaagtcgctcaaccagctcattcccggcgaagttgagaagattgtcgatgaaacggtaaaagagcgggtcaaggaggccataaagttgcacggtttcaaagccgcaatggacccgacccagcacaccatttggatgaaccgcgacaaagggattgcgatacgcaaagtgcgcatcattgccaaactgaccgaaccgcttccctgggataaaaaacaacgcgacctttccaaacatgactacaaacagcactaccacgtagccaacaagagcaactacgggatggctgtttacgagggaacggatgccaaggggcaaactatccgcacatacgaaatcatcagcaactggcaagccgcgcaatatttcaaacggagctccgacaaagccgcccgaccggatatggttccgctgacggatacccacggctatccgctgcgatggttgctgaaaacggggaccatggtactgttttacgaacaatcaccggctgagctgtatgagtgctcaccgcgcgaactggctaaacgactctacaaggtcaaaaaaatgagcaaagatggccgcgttacatttatgcatcaccaagaagctcgcaatgacgacaccttgaaaaacgattactttaaatttcacggacacaccgctccaaacgcccttacggatggatattcttcggtagattttcaatacccacacccaaagttgttattaagcagacaaaaattcaacatgtacgtcgaaggttacgatttcgagctgtcggtcaccggaaaaatcaccttcaaacactaagcccgccatgctgaaacgcgccctgtacttctcgacaccgtacgacctgagcctgcgcaacggacaactgattatccgaacgcgcgaggctcccgacatgcacaaaagcatcccgatcgaagacatcggtgtgatcgtactggaacaccagcagaccagcgtaacgctaccgctgctcaatgccctcgcggccaacaacgtgtcggtcatcctttgcggcgagaaccgcatgccccatgccatgctccagtgtctggactccaacagcacccagggcgaaagtttccgcacccagatcgaagccagcgaacccctcaaaaagaacctttggaaacagattgtcgaggccaagatccggaaccagtcggccctgttgcagaagacaggacgggacggcaacaaactcaaaccgtactatatgaatgtcaagagcggggactcggacaaccgggaaggtacggccgcccgaatctactggtccgaactgttcggcccggattttatccgcacccgcgaaggccatccgcccaacaacctgctgaactacggttactccattcttcgtgccgccgtcgcccgcgcgctgatggggtcgggactgcttcctgctttcggcattttccaccgcaaccgttacaatgcgtttccgctggccgacgacctcatggaaccttatcgcccgtacgtggatgaactggtctacggtctgtaccgtgagggcgccacggaactgacccgcgatgtcaaaagcgccctgctgcgcctgctgtttgtcgacacgcgcttcgatcgtatacagcgtccgctggatgttggcctgacctttacctcctcgtcgctggcgaaatgcttcgccggcactcgcaaaaagatcgtctttccccaaatggaataaacgatgtccgaacttcgcctgaacgcctaccgagtaatgtggctattcgtatttttcgatcttccgacgaacaccaagcgtgaccggcgccatgcgatgcagttccgcaaggcgctggaaaaggatggctttacgatgatgcagtattcggtttatgttcgccactgcgcctcgcgggagaatctggaagttcacatccgccgcgtacgtcgttcgatgcctccggcagggcgtaccagtattttgagtgtgacggacaagcagtacggtgagattttgaatttctggggaaaaatcgagtgcgaacggcctgagatgcctcaacagttggagctattttagtatttttgtgaagggttctttgacatgccaaaaacgcatcaaatcgacttcgtcggagtggttaaattgcatttttcattacgtgtaatcccgataacaatcagtttattagatcaatacctgcccgacgttgtggtttgatgtagaatcctaatatgatacaacaagattgcagtatgggcactgcggaaagtggttgtggtttgatgtagaatcctaatatgatacaacgctctgccgtgaccatcgatacggattatagttgtggtttgatgtagaatcctaatatgatacaacggtcctgtcgttcgagctgctatcaagactgttgtggtttgatgtagaatcctaatatgatacaacaaaacgctctgtaagactcgaccactctcagttgtggtttgatgtagaatcctaatatgatacaactgataagcacaccaatgtgcaaaccaatatgttgtggtttgatgtagaatcctaatatgatacaactggtaagcaaggataggaagaatgttcacgttgtggtttgatgtagaatcctaatatgatacaactgaacgggagaatgttaaatatgttgctcagttgtggtttgatgtagaatcctaatatgatacaactagttggttttttgggaccccgtccccgtcgttgtggtttgatgtagaatcctaatatgatacaacgacgaacttctctcagacagcgcggagatcgttgtggtttgatgtagaatcctaatatgatacaacaattctcgaatagggattgtgaattttttgttgtggtttgatgtagaatcctaatatgatacaacccagccactccagccaatgggcctccagcagttgtggtttgatgtagaatcctaatatgatacaacgtatcgtccggttaacattacaaccgaagagttgtggtttgatgtagaatcctaatatgatacaacgctaccgtcatggccgtcgatgagcagcggttgtggtttgatgtagaatcctaatatgatacaacaaattttataatttcatcatgatatattgggttgtggtttgatgtagaatcctaatatgatacaactggttgaaaaaattctgtttgagaagtaccgttgtggtttgatgtagaatcctaatatgatacaacaatgattcattcaagtactttgtgtgcggcgttgtggtttgatgtagaatcctaatatgatacaacgagagagtcagtgtaccggagccagacttgttgtggtttgatgtagaatcctaatatgatacaacacaaaggaagcgacgggaaaatgtaccacggttgtggtttgatgtagaatcctaatatgatacaacgatagtaccgcggagaataaccgatgtacgttgtggtttgatgtagaatcctaatatgatacaacaacactggccataatctgaccaacgccggagttgtggtttgatgtagaatcctaatatgatacaacggatcggtgttaatcatgtccgtccaaagcgttgtggtttgatgtagaatcctaatatgatacaacatagtaataataaaccgaaatgcaaggtatgttgtggtttgatgtagaatcctaatatgatacaacgggagaaacaaaagagttacctcgaccagggttgtggtttgatgtagaatcctaatatgatacaacatcgtgatggggcgtcaggattaccagtgggttgtggtttgatgtagaatcctaatatgatacaacgtcggacagggagtttacttcgactgcggagttgtggtttgatgtagaatcctaatatgatacaacaggctatgattgctcaatgggccagcgatagttgtggtttgatgtagaatcctaatatgatacaacaaacgcaaagtaaacacattgaccgtcggcgttgtggtttgatgtagaatccaaatatgatacaacctgcttgtaaacgttttcttgatgcaagtagttgtggtttgatgtagaaaccccaatggatacaacaccctctgctgaatcgacataactttcctgctatcagactcggaacaaggtcggcgtaaaagcaacatagaagaaattcatgctgcaagttgcccgacgtacacgccaagaaactttaagtaagaaataatccgaaatgaagattcgcagggaaaattgacgatattgtgcaacctcagacacctcagctcggcaaagggtcccgtgggtccattgcataaaagacttcgcaacagtatccctttcggagttctccccaaaagcaaaacaaaaaaggttgacaacctttcgattatcaaccttctcgtgtgcccagaacaagactcgaacttgcacgccgtaaaccggcactaccccctcaaagtagcgtgtctaccaatttcaccatctgggcagtcgtatgtaagaactaccttcgctgcggaaggcgtagattcttcggatgaaaaagacgttcggcaaatttcagaagactcgctccctccgttttgcccagcgacccctcggccgcccgtcttttcaaactaacctaaaacctaaactactctcgaacgaatagcggcacaaaggtaacgcttttttcattccgtgcaaacaaatccacaaaaaaatttaaaaaaatttctccagcctgcccaaacgcaccaaacagaagaaaaatacataaatttgcaattcacacatttttcgacagaataccaacacagaaccaaacacccaacggtatgatcaatatcaccttccccgacggcagcagtcgtaagttcgccgcgggcaccactccgctccagatcgccgaatcgatcagcccccggctggccgaagagaccttcgccgccaccgtgaacggagaaagctgggacgtgcagaaacccatcgacaccgacgccgaaatcaaactgcacaaatgggacgaacccgaagccaaacacgccttctggcactcctcgtcgcacctgctcgccgcagccctcgaacaactctaccccggcatcaagttcgggatcgggcctgccatcgacaacggattctactacgatgtcgactctcccacccccatcaccgaaagcgacctgcccaaaatcgagcagaaaatgctcgaactcgcccgtcagaaacaacacttcgtccgccgcgaagtctccaaagccgaagccctggagacctacaccaagaaaggcgacgaatacaaatgcgaactgatcggcgacctggccgacggcaccatcaccttctacaccaacggcgcctacaccgacctctgccgcgggccgcacatccccagcaccgcccccatcaaggccgtgaaactgacctccgtggccggcgcctactggcgcggtgacgaaaaacgccaaatgctcacccgcatctacggcatcaccttccccaagaagtcgatgctcgacgaatacctcgccctggtcgaagaggccaagaaacgcgaccaccgcaaactcggcaaagagctcgaactcttcaccttctcgccgcgcgtgggccagggtctgccgctgtggctgcccaaaggcgccgccctgcgcgaacgactcgaaaacttcctcaaaggcgtacagaaacaatacggctacgaacaggtcatcaccccccacatcgggatgaaagacctctacgtcacctcaggccactacgccaaatacggcaaggactccttccagcccatccacaccccggacgaaaacgaagagttcctgctcaaacccatgaactgcccccaccactgcgaaatctaccgcagcaaaccccgttcgtacaaagacctgcccgtgcgtctggccgaattcggcaccgtctaccgctacgaaatgagcggcgagctccacggtctgacccgcgtgcgcggcttcacccaggacgacgcccaccttttctgccgtcccgaccagctcaaagacgagttcaagaaggtgatcgacatcgtgctgtacatcttcaagaccctcgacttcaaggagttcaccgcccaggtatcgctgcgtgacccgaacaacaaagagaaatacatcggcaccgacgaaaactggcacaaagccgaaaccgccatcatcgaagccgccgccgaaaaaggccttcagaccaccgtggaactcggcgaagccgccttctacggtccgaaactcgacttcatggtcaaagacgccctgggccgcaaatggcagctcggaaccatccaggtggactacaacctgcccgaacggttcaacctcacctacaaaggctcggacgacaaggaacaccgcccgatcatgatccaccgcgcaccgttcggatcgatggaacgcttcgtggccgtactgctcgaacacaccggcgggaaattcccgttgtggctgactcccgagcaggccgtcgtgctcccgatcagcgaaaagtacaacgactacgcgaaaaaagttgctaaattgctgaataattgcgatattcgcacccgcgttgacgagcgcaacgaaaaaatcggccgcaagattcgtgacaacgaactggcccggaccccgatattgctgatcgtcggcgaagccgaacaggccaacgaaaccgtcacggtccgcatgcaaggcgaaggcaaagaccgcggcgcgatgaccctgcccgaatttaccaagatggtagccgacaaagtggccgaagagatccgcccgatctcggaaaacctctaagacggcacacaatttgcagcatacgcaacccgtacattaaccacacacacttaaggaggacacagccatagcactaccaccccgccccaaatcgccgcgcaccccgttccggggccgcgtgcagaaagagaacccgcaccgcatcaaccgggagatcacagcaccgcaagtcaggcttgtgggcgataacatagaacggccggacatctacccgctgcccgaagcactccgtatggcccaggaacaggaactcgacctggtggaaatctcccccaaagccgagcctccggtatgccgcatcatcgactaccagaaattcctctaccaacagaagaagaaagccaaagagattaaagccaaatccgtgaaagtcgtcgtcaaggagatccgtttcggaccccagaccgacgaccacgactacaacttcaagctcaaacacgccgaaaacttcctcaaagagggagccaaagtgaaggcatacgtcttcttccgcggtcgccagatcgtcttcaaggaccagggcgagatactcctgctgcggttcatccaggacctcgaagagtgggccaaagtagaacagatgcccaaactcgaaggcaaacgcatgagcatcctgctggctccgaagccgaagaagtaggccccgagacacaacctcggcctgcccctacctgccagaacacactattaaccaaccttaaataatttcgaccatgccgaaaatgaaaaccgtcgccgccgccaaaaagcgtttcacgctgaccggcaccggcaaagtgaagaggaaacacgctttcaaaagccacatcctcaccaaaaaaacgaccaaacagaaacgcaacctgacccacaccgggaccatgagcgctatcgacacgcccgcagtaaaactgatgcttgtcaaataacgcccacacaggccgtttcccaaccgtcgtaacatccgcgaggccgctgctcccgaaggcctcccaaaacaaaacccgggaacaactactttaattaacaaaccaagatcgcgcccggcagaacccccgtcggttccgtcaagcgtcctcccccagcggaagaccgccggccgttcgaaaaacgcatcattatgccaagaagtgtcaacgcggtagccagccgtgctcgccgcaaaaaggtcctcaagctcgccaaaggtaacttcggttcgcgctcgaacgtatggaccgtagccaaaaacacggtagaaaaaggtctgacctacgcctaccgcgaccgtaaaaacaaaaaacgcaatttccgcggcctctggatccagcgtatcaacgctgctgtccgtgccaacggaatgacctactccgaattcatgggtaaagtcaacgccaaaggtatcgccctgaaccgcaaagttctggccgacctggcaatgaaccacccggcagcattcgccgaaattatcaaaacggttaaatagtgacccagaggccgcggcaaaaccgcggcctctgcttttatcaggcgggtcggatgacatgggaaatgtcacccgacccgcctgtttataccccttcagcacccattccccttccactccaccacattcaccccccgcatttcgcagcctaacatcaatcagcaagcgtgatacagtggcagtgagtgtccatttctccccattctactgcctcaaccaaccatactcaaatcgacagcgtgacttactcaagttctcacccccgttcgataagatcctcccctactacgctcccatatattcacccttcatcacacattctgcattcacagcaaacaacctccacagagttttcgccctaccacactcaacaacactgaatctattaccgtcctcgaataaaaaaaccggtgctgcacaaactgcaacaccgggctatcatttacaaatcattttcagttgtccagccccattcgcacccagtcgcgttgacgcaaaactcaccgcacaaaagcgacccaagcgacaggccgggacaaaacgggccctactcggccgtcttgggaaccgccatcagcaaggctaccagatcgccttcagcgttgagcatcaggagccgttcgccctcgaatttgaggcgcttcaccgtgctgagatcacgggtaaagccatcttcaatctccgtatcggggcaaaacttacgcgttgcacctacgttgctgacatcgatattgtggtccgcgtcttcaaacaggctgtagcccgcgaagaaattattacaaggcgccttcccgtagatcgttttcttctcggcatcgaaggtcaacgtcaccgtcttgtccgacggcaccgcttcgccgcggaactcaatcagtttccagttgtcattttcgaggtttccgatcttcggactacccttgcggcacgagcagcaggagctcagcgccacggcggcaaaagctgcggctgccactgcaaacatctttctcatagtgtggttttattattgtttttttgggttttcgttgcggggacgaacatcagcagcaccgtacccttgtcgtccatcaaacggagctgttcgtcactcacagcatagcggcgcgcccgtttgagttgttcgatataaaactgctcacgttcgctgtcgggacacaaagatagcgttattccctcaatcgtaattccgatctcagcgaccgaatcgcgacggcgcgtcatgtatgaaccgtgaaagttgttgcacgaggtcatgccgttgagttgtccgtcgtgctggaattcgatcgagagcggcgaggcggcctttccggccgaggggtttccgaacgacacagtatcgaccaccacccagatgtcgctgtcgagcaccagcgacgaatgcggcacaccacgacacgctcccaacgacccggccgccagaaggagtattgctaatctgatgatatttcttttaatttgcatagcgtcaaactccgtaatacgccttaccaaaattgataccaaacacgtcacaagcatgaaaaaaattatcgccacgcctgaagcaccggccgccgtcggcccgtacagccaggccatcgaggccaacggaaccctctacatatccggccaactaccgatcgatccggccaccaagaccatgcccgaagggatcaaagcccagacggcccagagtctgaaaaacatcgaagccattcttcgcgccgcaggctacaccaagaacgacgtggtcaaatcgaccgttctgctcgaccgcatcgccgacttcagcgccatgaacgaggtgtacgccgaattttacaccgagaatccgccggcacgcgtcgccttcgaagttgccgcactgcccatgggcgcactggtcgaaatcgagaccatcgccgtcaagtaacacccgcggggggcggcagcggctccgcccgagcgggcgacaaccgcatcggttcggccggaacgtgctccacgacgcacgcccccagcctcgaatggccgtgccataacgcccgagctacaaacgcccgcagtacgagtgagtggtcagaccacaaacggccaccacgaaaccaaacaatttccacgtactttacctctaaaacggttccgttccacgaaaacggaaccgtttttgcatatcatgagggagaaccaacaacccattcgacgatgaaacttacggaactgacctataccgagtggatcgaacggagcgccgctctgtcttcggtctcttcttcagcctctccctccgcctcttccaccccggtgcaggagcgaccggtcgtaatcgacttctacgtaccgtggtgcaacccctgcaaggcatttcgcccgctgctcgaagaggccgccgagaggtatgccggacaggtcgacttctatcaggtcgacatcgaccgcgagcgacgcatggccgttctgttccgtgttcggaatgttcccgcgctggcctttgtttcctccgacggatcgtaccgcattgtggcaggtgccatgccgccggccgaactacacgaagccgtcgaaaagttgctccacgcctccgccacgcccacgagcgaataattctaaacctcgcccatacggggacgcctgagaaggctaccgtcggtagcctctgagagtgttacagg

SEQ ID NO: 2022 - DNA, 23660 bp, synthetic construct
  misc_feature 1..23660: note = Synthetic
  source 1..23660: mol_type = other DNA
gaaattttcaaggctcttgaaaaagccggaatgatcgatgacaccatggtgatcatcacggccgaccacggaggcaaaggtaccggccacggaggcacctccatgtcagagatgcagtcacctcttattatatgggggaaaggtgttcagcgggccacgaccatcaccgatatggtagtctcctacgacatcgcgcccaccatagcccgggccctcggactcaaaactccctcctgctggcgcggacgcgccgtcactcaggccctcagataagccaccggtacaactgtcgggcatagctgttttttcgaattttcatgcaataactcttgacacaggggacaaaatgtattaactttgcacgaaatttcggataatagcgctaatgaaaggcagttccagacatcgcaggcatttcgacggatcgcggcttattacgatcataagcgtcgccatggtgttgcttgtcatggggataacggttattctcggcataggcacacatcaggccggacggcttgtgcgctccaatgttggattcgtagccgtcgtcaatccctctttcggacaaaaatctctcgacagcgtgcgcactgccctcaacaatgccccctatgtcagcgaaataaccacacgcaccgccgaagaggttctcaaacgctgggaggaacttatgggtcccgaagagcttatcgacataaacccctttcttccggaatacgatgtgactgtcaaacctgaatgggccaagcctgacagtctcagaaaaatcgcggctgaactcgacaggataagctgtgtcgatcacattcagcttcaggccgacatcgccgccgagataaaccattcggtaagctccgtcttcctgcttctcctgatggtggggatagcattgctgataatctccgtggtgctcatctccaacaccgtaaagctccagattcattcacagcgctttatcatccacacccagcaatacgtcggagctacggcccgctacatagtcgcgccttatgtcaggcgtgccgcgctcaacggccttcttgcggcaatcatagcagctgccgcgctgaccgcgctcgtattttacgccggcgctatcgacccggtggtaccccatataataagcggctgggccgttgcggtaacggtcgctttcatagtgattgttggagtggtcctgtgtgcgctgaccgcgcatatcgcggctatgaaatacatccaccgaagctatgacgaaattttcaactgacgaaaatgaactgaatccgaacatttacgatatataatatattaacagagggcctccgttggccggggaatgtcggggagaaaccggctctaccctgtgaaaacggctgacgcccgcaaaaaagacagacttctaaaaatggcaaaaactccgacgaaaaataccgccgatcccgcctcaggcacggattccgctatccggcgcgaagaccattcgcagcttcccctggtaaaaaagaacttcatcctcatggcaatagccgccctgatgatagtaatcggcttcgccctgacttcgggaggagcttcggccgatcctacccagttcaaccctgaaattttctcaaccagaagaatcgtgataggtcccaatatagcgttcctcggcttcatattcatgggcgttggcataatgtggccttgcaagaaaaagtgagacaatttccccaaacagacaatcagaaaacacttacatagaaaatggactggttagacgccctcattctgggcattgtacaaggactttccgaatatctgcccatcagctcgagcggacatcttgaaataatgcgcagccttctgggtatggatctcgaaggagcggaagcgcttgaaatgatcgtagcattgcatgttgccactgttttaagcacaatcgtggttctctggcgcgaattcgtgccgctctgcacctcgttcttcactttcaggcgtgacgagaacacggtgtatgtcctgaaaatacttgtatcctgtattccgatagcgattatcggcctctgtttcaaggacactatcgacaacttcttcggaggatcactctccacggttggaatctgtctgctcataacggcgttgctcctcgctttcgcctattatttccgcggtcgcaagggccacggtgccgacagcgcagcgactattcttccgaaagaacaccccataacctatcgcgacgccttcattatcggatgcgcccaggctctcgccactctccccggcctcagccgttccggctccacgatcgccaccggacttctgctcggcgaccgccgcgccgacattgcgcagttctcattcttcatggtcatcatacccatcctcggccaggcgctccttgactgcgtgcatatcctggacggcacttctgccgccaacgcaataggccttctgcctctgcttgtcggattcatcgcggcattcgttgtcggatgtttcgcctgcaaatggatgatcaatctcgtcaaacgcggaaaactcgtctggttcgccgtttattgcgccatcgtaggtctgctttgcattttctgctaatcccatccgccatcaacgacgttttttaatggattttcttacaggagaaaccctatacatcgacaagcctctgggctggacatcgtttgacgtggtcaaacgcgtgcgcggaatgctcacccgccgctacgctctgaaaaaaatgaaagtgggccatgccggcaccctcgaccctctggcaaccggagtgatgatagttgtgacaggccgctccaccaagctgatcgagaccctccagcagggggtaaaggagtatgtggccacgattgccctcggagccaccaccccgtcgttcgacctcgagacggaaatagacgccacttatcctacagcccacattacccgcgagaaagtcgaagaggttctgtctcgtttcacaggccgcatcgagcaggtaccccctcaatattccgcatgcaagatcgacggccgcagagcctacgatatggcccgtaaaggaaaagtcgccgatctcgctccgaaagttcttgtcatagacacgctcgaacttctcgacttttcgcctgaaagcataaccgtaagggttgtgtgcagcaaaggcacctatatacgcgcgctggcgcgagacatcggcagcgctctggaatccggaggacatctgaccgcgctgcggcgcacaagagtcggagacgccgcgatagccgactgtctcacccccgatcaactgacggaattcctccgtattgtcccgatagagcggccggcagatgaggcgctggttcctgaaaagctaaaaaattgtaacttcacgctattgtaatagaacacaaatgaaattatcccaattcaagtttcatctccccgaagagctgatcgctcaacaccccgtgcctcagcgcgatgaatcgcgaatgatggtcatccatcgcaaaacgggcgaaatcgaacacaaggtgttcagagaaataataaattattttgacgagggagacgtgatggtattcaacgataccaaggttttccccgcccggctctatggttacaaggaaaagaccggagcgaagatcgaagttttcctccttcgtgagcttaacgctgaaaacaagctatgggacgtcctcgtggagccggcccgcaagatcaggatagggaacaagctctatttcggcaaagatgaatcgatggtggcggaagtcatcgacaacaccacttcccgcgggcgcaccctgcgtttcctctatgacggtcctcatgacgaattcaagaaagagctgttcagcctcggacagcccccgcttccccactatataatgcgtgagcccgaggaacttgacattgaacgctatcagaccatatatgccgagaaggaaggagccgtcgttgccccggctgccggactccatttcagccgcgaattgatgaaacggcttgagatcaaaggcattcatcaggcattcctgaccgtccacagcggcctcggtaacttccgtgagatcgatgtggaagacctcacgaagcaccgcatggattccgagcagatggaagtggacgagcctcttgtcgagctcgtcaacggagtcaaggacgcaggtcaccgcgtatgcgccatcggaacatccgtattacgtggcatagcaagcgccggaagcatgggcggacacatgaagacctactccggatggaccaacaagttcatcttcccgccctacgatttcaccgtgaccgacgccctgctcagtaatttccacctcccctactccaccatgctcatgatggtggctgcattcggaggatatgagaccgtcatgcacgcctacaatgtggccgtcaaggaaaaataccgcttcggcgcctatggcgacgcaatgctgatcgtctgacagaattccctcggccaagtcatgtcaagcgaataccggaccatagcaaatgacagtgaagcggtcatccgcgaaaagatgagccgcttcatcgctttcgcccatccggttcgttccgctgccgaagccaaggactggatcgcttcgattgcctcgaaatatcacgacgcccgtcatgtctgctgggcctacatgctcggagcggaaagttcagaattccagtggtctgacaatggggaaccttccggcacggccggaaagcccatcctcggacagattcgctcgaaagagctctcgaatgtcgccatagcggtcgtacgctatttcggaggaatcaaactcggaacatccggccttatcgcagcctaccgcgaggctgctcggcaggctcttgacggagccgaaataaaaacagcctacgagactgactcggtcagtttcacttttccctacctgtcaatgaattcggtcatgcgcatggtgcgcgattcaggggccgcgatactctctcaagaattcgacaatgtctgcaccatgacccttgagatgcgcgcggaccgcatcgatgaactcacgcggcgcataaccgaaatagacggaacctcaatacaaaccaatccactccaatgaacgatatactcaaatccatttccaatgatcctgacggcctgctcacatacgagttcatggcaaacaacatagagacaatagaggatcagatgccggctctcgtagagaatatgatcagagtcgatgcccacggtcagttctccgtgtcggccgcacgctatctgcatgccatagatgccgggaaatattccgccgaaatcgaccggctcatttcagctgccatcgacaaagaccgcgaacgtgtctatataggctctctcctgaccgacatctggggtcccgactatatggacaaggcttccgaacttgccgccgctgacaacaatttccgccgtatctacaaacgtctctatcctgcaggaataatctgatcatgaaaagaagatttattgcattactcacggtcatcctgacgggagtgacggcattatacgctcagaatagggacattcttgtcgagatgaaaacgaccgaaggcaccgttgtgctccgtcttttcggcgacacgcctcagcatcaggccaacttcgtgaagctggcccgggagggttattacgacggtcttctgtttcaccgcgtcattgaccgcttcatggtccaggcgggtgaccccgattcaagaaacgcagcaaaaggcgccctgctcggctccggcagtcccgactacacgattccggccgagataacctatccccgtcattttcacaaacgaggagctctggcggccgcacgcgaaggtgacgagaccaatcctgaatggagatcaagcggatcacagttctacatcgtgaccggccgcagatacacccccgtcgagctcgaccgtctggaaatgaaaatcatgaaggcccagaaaggcgacggactgaaagggttcactccggaaataatcgaagaatataccacaaatggcggcgcggcccatctggatgcctcctacaccgtgttcggccaggtagaaaagggttacgacatcattgacagaatccagaaaacggatgtcgatgaaaacaaccgtcccgtcgaagacatcaagattatctccatgaaagttctcgaagaggccggccagtgatcgaatacagcatccacacactccctaacgggctccggattgtccataattacgatccttccacctgtcacgttgtcctcgacacgctctacaacgtcggagcacgcgatgaatcgccggagttgaccggaatggcccatctcttcgagcatctcatgttcggaggttcggtcaatgtccctgacttcgacggagcagtggaaaccgccggaggaaccgacaacgcatggacctcaaacgatttcaccaatttctataccgtggtgccggcagccaatgtcgagacagccttctgggtggaaagcgaccgcatgctctcgcttgcgttcactcccgagtccctcgaggttcagcggaaagtggtcatggaggaattcaagcagacatgcctcaaccggccatacggcgatatggctcatcgtctgcggcgcctcctctacacaacccatccctaccgctggccaactataggcaaggaactcgcccatattgacaaggtcaccctccgcgatgtgcgcgatttctttttcagccactacgccccaaacaatgccgtgcttgccgtcagcggccccgtggatgaaagccgcgtgctgcaactttctgaaaaatggtacggcgatattccccggcgcgacatagccccgcgcatcaatcttcctgaacctccgataaccgaggcgcgccgcgagacggtggaatgtgacgtcccgcagacccgcatcaccatagcgatgctgatggacgccgccgatgaccccgactaccgcgtggctgacctcatcaccgacattctcgcctccgggcagtctgcccggttcaatcgcgatctggtgatgggatccgacattttcaccgctgccgatgccggaatctcgggaagcgaggaacagggattcatcagattcgccggagcgcttcgttcaaacgatcccgcttcgctcgaaaaagccgaacggatgatatggcgccaacttgaccgtctgcgatctgaagacgttgccgaacatgaattgcagcgtgcgctgaaccgtttcgaaagcaaccgcacattctctcagatcaattatctgaaccgcgcgtcgcaacttgcgcgcagcgtaatgaccggacgcgacatcaactctgaaaccgttctttaccgacagatcacccccgccgacatacgccgggttgcctcccgacttttcaggccctcgggttcagccactctgatctatcgcccgcgcactctctgactaatagactgacactttcttcatctctgagaaccatgataaaaaaacttcttctcacagcatttctgaccctgacagccgtaatcccgatggcagccgcgacttctgcgacgcgccccgacggacgcgccaccagcacccgcggattggcggaaaatctgatgcgattccgcagaccgatccatgaattcgacacgactttcacccccgaacaatacgcctcatggaaaaaaggccttaaacaggccatgaaaaggctgatgcgtcaccctgaaagtcaggatgccgagccgaaaaagatatgcagcgctcaacgcgacggctatcgcatagaaaaatgggaatcatatcctctccccgcgagcgtagtctcattctatcttctcattcccgatggagtcgatcaatcccatcccgtccctgctgccctctgcattccggggttcggacagactaaagaattgcttgcgggagaacgcgccgggaactacaccctcgaaggcgcgcccgattccatcacccgacaggcggccatggctctccattatgtccgcgaaggcatagtgaccgttgccgtggataatccatcgtgcggcgaactctctgataacggatatcctgattacgccacatcatcacgcttcctgctcgaaaccggatggagttatctcgggcttgcatcctggcaggacaaggttatactcgactggatgaaaacgcagcctttcatacgtcctgaccgcatcatagccagcggattctcgctcgggaccgaaccattgatggtgctcggagcgctcgatgactccatctatgccttcgtatataacgacttcctttgccgcacccgtgaacgtgccctcgtgatgaataaacccgatgctaaaggcaaccgtcctttccccaatggcgacgaacacctgattcctgaatttctcactcttttcgattttccagacattgtggccgcactggcgccacgccccgtgatatgtaccgaagggggcatggaccgcgacttcgacattatcgcaaaagcttttgccaaagccggagtcccggaaaattttgaatatcatcactatgctaaatatgccgatcccgccatgcgtcagtatctcgactcattgccctccggaatcgaccgaacggaatttttccgtcttgtcaattgcgactcaccccgccactatctcaagctcgagtggattctcccctggctgcgcaaacggatcgaagaatagatgtcgtcattacacgggataacctaacaggttcagtataagaggcgacaacaaagccgtgagcaacccgttgagagtcagaccgagcgaggagaaggctccgtaacggtcgctgcgttccatcgccgccgacgtgcctatcgcgtgggccgccgtccccatcgagagacctcccgcaatcgggctcttgacccttcctaactttattatgcggaatcccgccataccgccgaagatacccgtgcagaccaccaccgccgcagtcagcgccggaataccgccgatcgaagcggaaacctccatcgctataggagtcgtgacggctttgggagccagcgacatgacaaccgtctgtgaagcgcccaacaattctgcgacaacaaccaccgagatgatgccggcaacgcaccccgccatctccgctatgagcagcggtagcatctggcggcggattgcaccgagttgcttgtaaagcggcacgcccagcgccacgactgccggcttaagccagaaatctatgtaatcgccgccggccttatagtccgcgtaatccacccccgtagccatgagaaaacagatcagcaccgtaatggagaccagtatggggttgagaagcttgatccccgtccgacgctgaagatagcatgacagcaaaaagactatgaaagtcagagctatcagaaaaaccttgcttgtaagaaattccatagcggtcgtgatcaggactgtttgtgaacattatgatgctgacgcatgcggcgccggacaatctgatggacatggcccgtgacaatcattatgacggccgtactcaccaccatcgctcccacaatcggaagccactccgaggcgagaagtcccaggcagctcataaggcctactcccgccggcacgaaaaagaatccgagattatgaacgaggaaatcggccatcttctcaacctggttaagcttgacaactccgaactgaagcgacattgcaagcaacagcattcctattatacttgacggaacggtaacccccgtcagccagaccgttagctcaccgagagctaaaaaggcgaagagaactccgcactgcaaaatcatattcatgacagactgttttatttcaatcgacaaaagtacataaaaaaagcgattgccgcttcataaaatccaccctcgtttttagaaacaggcgccttctccctccaaatcctctctaactttgcggcaactcataaaaccatataaaaaaatctccacggagtacgcggagatataggtgataacaccttcggcatttagccttattgtggtaagatgtaaattactgcaaattaaagtatttatttttgaatatccaaactttttcataaattagctgaaaataattttttccctcagataataaatcatatccatcatggctcaaaaaattttaggattggatttaggcactaactccataggctgggcgattatcagccgagacgatgacgctacttgccgcttacttcattatgggtcccatatttttcaggaaggagttgccagagaaaaaggcaatgaaaagccttgcgttgaaaaacgaacttcctcacgggccagccgcagacattatgaccgcaggcgtctccacaaaatccagctcctcaatattctgatcgaactggaaatgtgcccatatctgagtgaagaagcgctgaacgattggcgttataaacgcatttatcctctcaacgaagaattcattcagtggcagcgcaccgatgacaaaatcaataagaacccctactatgaccgttacctcgccctcacttctaaattggatctctccactaaaaaagaccgttatatactcgggcgcgctctttatcatctctgtcagcggcgaggctttttaagcaataggaaggatgcgactcaggcatcggacggtccggtaaagaacggcatcaatgatctcacagaagccatggaaaaggcaggatgccgctatctcggcgagtatttctacaagctctatggtgaacacaagaagatccgcacaacctatacagaccgtttggctcatacggaaaaagaattttatgccatctgcaagaaacaaggattgagtgatgaagagatattgaaattgcataaggcgatattttaccaacgtcctttgaaatcacagaaaggccttgtgggtaaatgtgtgttcgaaccctccaaaaaccgttgcccgctctcccatccccttttcgaggaattccgtatgtgggcgtttatcaataatatcaagataaaagagtccgctgactgtgagtttcggccattgtcggaaaaggagacagatgaaatccttccgctattctaccgaaaatcgaaaccgacatttccttttgaggatatagctaaaaagatagccggcaaaggcaaatatgcctataaggacgataaacgtgatgcagcttataaattcaacttcagaatggcgactgtagtttccggctgtcctgtcataaccggtctcaaggatatattcggcgaggattaccgccgcaacattgccgaatgttatgataaagctgacggaaaaaaccttgaagagatactcaacgacatctggcatgtgctttatttctttgaccgcgatgacaagatggagcaatgggctgtcagccatttgcagctgaatgaggaagatgccgagaaactaacgaaaatcaaagtgcctcaaggctatgcgtccttgagtctgtgtgccatcaagaaaattcttccgttcctgaaagccggaatgcgctatgacgaagctgtgtttgtggcgaatctcgataaagttctgccggataatatcagaaacaacccggaagcgagaaaggatgtcattctttccgtttgtgatactgtagccaactttgcagagaatcccctcaacaagaccatcacaaaagaacaggccgtcaaggggatcctggaggacatccccgatatagatttcggaaaacttgatttgctctatcacccttcacgcactgaggtttatcccgaagcaaccatgaattccaaaggagaacttcggttaggatcgccacgcacttcatccattcggaaccccatggccatgcgggcacttttccgtcttcgccatctgataaatcaactgttggaggaaagaaaaattgacaggactacgaccataaacatcgaacttgcccgcgaactcaacgacgcgaatatgcgtaaagccatcgaacgttatcagcgggagaaggagaaaatcaacaaagaatccatcgagaaaatcaaaaagctctaccaggaagctactggaaatgaaattgaaccgacggatgacgaaattctcaaattccggctctgggaagaacaggaacatatctgtctctataccggcgaacagatttcaatcactgaatttatcggggtcaatcccaagtacgatatcgaacataccgttccccggtcgcttggaggcgacagcgctcagaccaacctgacgctctgcaactcggtttataaccgtcagatcaaaaggagttttctcccctcgcagctctctgatcatgaaaccattcttcaacgaatcgagactcttggctgggacaaggaaattgagaggctcgcaaatgagattgcccgtttgaaaacctcaatggcctctaccaaagacgctaaagacagcatcatccagaaacgtcactatcttaagatgcacctgaatttttggcgagacaaagtccgtggcttcaaattaacggaagttcccgaaggtttctcgcgccgtcagggagttgacacaggcataatcggcaaatatgcacgtgaatatttaagaacccttttccgcagtgaagaccgccagatattccttgtcaaaggttcgaccactgctgaattccgcaaattgtggggacttcaggatgaatatgcaaagaaggagcgcatcaaccactgtcatcacaccatcgacgccattgtagtcgcttgtataggcagaagcgaatatcagcgttgggcaaaatatcacacagagcgcgagaattatgaattaggctccggttccaaacccgatttcaggaaaccgtggccaacattcactgaggatttaaaatcattggatgaaaagattcttgtctcccacaacgtttcctactccactttcaaccagacgaaaaaacgcctcaaacgccggggaaagattatacgtaattccaagggtgatcctgtttatgaaaaaggcgattccgtcagaggtgcgcttcatcaggaaacttattatggcgcaataaatcgggaaggtactataaaatatgttttgcggcgttctctctctgacttggctgaaaaagacatcaaaaatattgtcgatcctgctgtaagagagaaggtggaacttgcggttaaagaacgaggttttaaaaatctcctctccgagccggtctggatgaacagagagaaaggaatagagatcaaaaaagtaaggattttcactccatctgtaaccaatcccattcatctcaaaccgcttcgcgatgaatcgcgtcatccctataaacggttcgttaatgtggcgaatgactccaactattgcctatgcatttatgaagggaacataacgggcaagaaaaccaaacggtcattcgagctcatcaatcttcttgaagcagcgcgaagacataaatccggcgatgatctctatccgctatccgacaaagacggactgccgcttaaatggaaattgcgcgtgggtgacatggtgcttttctatgaaaaaaagcccaatgaactttatgaatgtaccaaagaagatctcgttaaaagactttataagatatcgggattaagtattaatcccacaggttcaggatatggagttataacattacgttatcataaagaagcaagaccctccacagacagcattgcaaaaaatataaatggtgcatggaaatcgggagaaaatatcagaccggggattattcagcttcacactcaattcaacgccatcgtcgaaggtgaggatttcattctgactccgacaggtgaaattcattttctccatccgttatgctgaaacgttccgtcgtcataacttcgcaggctcggctttcgctgcgtaattgtcagcttatcattgagaagaaagatgatggctcaaagacatctgtccctatagaagatctctcaaccgtcctaatagagaaccaacaggttgaaataaccattccattgcttaatgctctcactgctgaaaatgtcgcggttatattttgcgataactcccacgttcctgcatcatatcttgcgcccctggaatcaaacagtttgcagggtgagcggtttaggcaacagatagaggcgggagcgcctgtcaaaaaatcggcgtggcgccaactcatagaggcaaaaatcgaaaatcaaagccgtctgttgcttaagctgtcaaaagatggagatatgttgaagccctattatcgcaatgttaaaagcgatgatgccgacaataaagaggggcgtgctgcacgcatctattggcgtgaattgttcggtcccggcttctcgcgtttgcgaaatggcgtagaacctaattctttactgaattatggctactcaattttgcgtgcggctaccgtcagaagtatcatcggagcgggaatgcttcccctttttggaattcaccacaggaatcgatacaatgcttttccattggccgatgacatcatggaaccataccgcccttatgtagatgaaatcgtattcagtctctatcagaacgattaccgagagttagacactaaagcaaaagtagatttgattaatgtcatatataccgatgtgatcattgatgataacacccatcccttgaatatcgccataggaattacctgtacctcaatattgaaaatgctggccgggaaatgtaaaacacttcgcctccctaaatttcaatagatatgagttttgacagattaaacgcatatagagtgatgtggctttttgtgttcttcgatttaccggtaacaacaaagaaacagcgcaaagaagcaacccggttccgtaaatctcttgaaaaagatggattcacaatgatgcagttttcagtctatacacggttttgcgggtcaaaagaaagcatggaagcccacattaaaagagtcaaagtattgattcctgaacttggaaagacctcgattctaaaagttactgataaacaatatggagaaattatcaacttttggggtaaagagaagaaaaaactgccgaatgccccatatcagttggaattattttagtaaatttgcttcataaatagtgttttacatcacacttccgcattatatctcaaaaaaccaatagtcaaaataggttgtaaaagcctgtcatttaaggcataaaaacggtgcggttgtggtttgatgtaaattttaaatagattacaacaccatccttaccggaagtattataccccttgttgtggtttgatgtaaattttaaatagattacaactcagaggcggtgatagcatcaaagccgttgttgtggtttgatgtaaattttaaatagattacaacgtaagagagagccggaaggtgtattatttgttgtggtttgatgtaaattttaaatagattacaaccaatttttcttactttgttcagacatagggttgtggtttgatgtaaattttaaatagattacaactagaaaccggagcctaccttcagaatcatagttgtggtttgatgtaaattttaaatagattacaacctatcctccagagtatcgcgagaggttaaagttgtggtttgatgtaaattttaaatagattacaacggctatcatttaaaatgctgccggccaagtgttgtggtttgatgtaaattttaaatagattacaacatttcatcttgtcgccagccttaacttcctgttgtggtttgatgtaaattttaaatagattacaaccaatggttttcggtaggctttcgaaaaagggttgtggtttgatgtaaattttaaatagattacaacttttcttacttttttcagacatagggaaaagttgtggtttgatgtaaattttaaatagattacaacagttcaaaaatattaaaaccaaaacgattagttgtggtttgatgtaaattttaaatagattacaactgaagatacgatctgttatatcgggcctgagttgtggtttgatgtaaattttaaatagattacaactgtgtgaagataattgtgtaatgaagctagttgtggtttgatgtaaattttaaatagattacaacatctggccttctttgatagattacctgattgttgtggtttgatgtaaattttaaatagattacaactgtgcatgagttggtagcctggagatcctggttgtggtttgatgtaaattttaaatagattacaacatcaaaacaggaaaaacgaggatcacgttggttgtggtttgatgtaaattttaaatagattacaaccaaaacgattataacatatatcatccgcacgttgtggtttgatgtaaattttaaatagattacaacaattgggcttagcagacgtgaaaatgtcctgttgtggtttgatgtaaattttaaatagattacaacattgcggggtgatttactagctcgcacctcgttgtggtttgatgtaaattttaaatagattacaacatttcaatgttatttatgttacgcagaaaagttgtggtttgatgtaaattttaaatagattacaacagatgcgcgcgcacgcgcatagcgtttactgttgtggtttgatgtaaattttaaatagattacaaccctcttttcagcgtcagaaacagcttataggttgtggtttgatgtaaattttaaatagattacaacaaaagggtaaataaacgagagcaaatataggttgtggtttgatgtaaattttaaatagattacaaccaagttgtagatctgctgcggatagagaggttgtggtttgatgtaaattttaaatagattacaacgagccggaaggatgttgtcaaggttgtatgttgtggtttgatgtaaattttaaatagattacaacttttccatgaagtctcgctatgatcttgagttgtggtttgatgtaaattttaaatagattacaacggtgaaatagtctctgataagaggattattgttgtggtttgatgtaaattttaaatagattacaacgacataccagaaatctatcttctcatcaaagttgtggtttgatgtaaattttaaatagattacaacagctataccggcaacggcattatccgcaaggttgtggtttgatgtaaattttaaatagattacaacgtgggaacacatgcaccatcacacagcttgttgtggtttgatgtaaattactgcagtttaaagtatttatttttgaatatccaaactttttcataaattagctgaaaaataattttctttctcactcagagaataaatctatttatcatggctcaaaaaatttgatccctcgaaataatccaatcacatgtttatgaaaacaagagctatttttttagcaactgctgtaatggcgtttagttcctgtgctaacgccggaacacgccaatccgaaacgtccggttcagacttcgactccgtcgcagcctctgaattagcggatgaagaaacggggatcaccgtcccctccattgaagttgttaaggacacagcctgtatcgttcagttcctgttcgattatgggatcaatcggctgaaagcgtctcctgacggcaaacccgtaattttcaccgtcgattctcttggccttgagaatcccgaaggagtgaaacatgtcgtaaaatcagtctcatactatagccagttaaggaaaggcgacaaatattatgatcctgcgaccgacacccagaagattctgaaagaagataccgaagtaatgtccgaggaatcactcccctacactgaaacatacgattttgatgccaacggacggttgatcaaattcaaatacgaatgttttgaggatgacgaacaggttgttacgttcgattaccggcccgacggatctttctcctataaagttgaattgaaagagagcgatgcatttcccaacaccaaagtctatggccggtggaacggcaaggtctgggaagaagaaatcctcggatgggactacagtaaggagcaatataaacccggcgtgtcctatgctttggaaaaacagatggtccacccgggatttttcaccgtggaacctgtaaaaggaggcaagaccgaagctatattgtacagacaatctgacggcagcttcataagcaacctgacccccggagaaaaaataccttccgattggctgaacggaagcgataaaagcaatcggatcacccgtgaaaacaaagacagccacggaaacagcctgaaggtaaaagaatatgatttccataatagcgcgcccgaaaccaaatacaaaatcacgtattggtaacctaaacgccaccatgaccgcccctcctctgtgaatcctgaagccgtcggacccgtcattcccgcggacacgccttctaatctctccaattggcccaattcgtctaaacgccgcccggttactcgctgagggcgcagcgcatggtgccactggaagatgttatgatgccggaccattcgccgttactgcgcggatggatgctgattgtcagcggtgaggagccgatagagcggaaaacaaacgaatccccttcccccgagccggtcatgattacagtgctgccgtaggcgatatccgtatatatgcatttcccccaatgtccattgccgtcggtccgtgcctcaagtcttataggccaccgctgcccctcgctgtcctcataataacccgagaaacgataagtgtttgtcaaaaaagtctgcgcctgctcgggcgccacactatcaagttccggataaatatcatcgacattcaccgtgtctttccccgtcaggacaactgtcagaatcacggccgctgcaaccgcggcggcaagaatccaattcagcaaaagtccatggcgcttcggggtccttgactgccgcggttttgcagcctgcggttgagtcacttccgtcagatcctcgtagagttcccccgcatcgcgatgtcggtccgccgcacgaaacgaaagagcgcgcatgatcaccctgcggaaagaagcatcacactcagcgggcaacgattcctcaagcgttattgccggttgctccgacgccctcgccggcctacgccccgtaaggcagaaaaacattgtggcggcgaggctatagacatcggccgcgggagaaaaacctgtcaggccctcatattgctccaccggcgaataaccctcggaacaggcatgaatcctgacggttcgcgtctctgatccgtcatctccgtaatgccgcgactggccgaaatctatcagcaccggccggaggcttccatcctcgtcggtggtgactattatattcgacggctttatgtcgagatgcgtgatacggcgtgaatgaagaaacgccacggcgctgacaacgggcgccatcagcgcaagcgtctcggaaagcgacagctgcccgtgctctctgacataatcaagcagtgtcgggccttcgagatattccatgacataataggccgtcccgttggctcggaacacctcgttgacattcacaatgtttctgttcttcccggcaattgcgcgcaaccgttcggctccggcaacgaattcatccgctgaatcctctcttgtcagttccttgacggcgaccgcaccctgcacccggatattgtcaagcatcacggaagtcttggctttgtaggtcacaccgaaccctcccgcgccaagaaccgaagcaatcgtatatcgcaattggcccgattcaagaacggtgcccggtgtcagtatcttccgtcccgcgctatccattgtcagtcgcccgataacatccacaccccgttactcctcgaccacataccaggtataacctctggccgggattttcacggtcagctcgacggagtaatcccggtcaagcctgaactccgaaggctcgccctcctgttcgcggatacgcgccgtttctgtcagtcccgtgtaatagagcggcagtttgatcgtacgtgtcatctcgcagtccgtgggattgtagagcatggccagtgcgcgttctttctcgctgactgagacatgcatgattccgtcccagtcgcgcgcgtccgggcgccgcagatgtattatgtcgctgttgaggatattgcggtatctcttgtaccagccgatgatatcggtgaccgtctgccgcgtttcaggcgagtcatacagacggggaccgcgataacatgcctgaacgcctgccccatagttctggaacataagcgtgcggtattcgtagagatgatccttgagcggttcgagagtcgcggcagccccaccgccctgatattccacaagcggcacgaaactccacagggccgatgccggacgttcgaatgtacagtcataattgagctgacgcgtgtggatgagctgtcggtcacgcggcagcgaccagttggcctcgcgatagcctattccaacctttgtcgagccgttgagaaaataaaaatcgggcacattcaggtatatgccgttctcacacatccagtgatacaggtcggtgacagtgtgaaactggttccactgcgaatcgttgagacctttgtgatatgtgtgggaagttgacgcgcacacatcgcccggatatgatccgtcgtgctcgaagcatttcattccggtcttctcgaagaatgtgcgtattttccggaaatattcatgtccccagtcacttgacaggcatggcgaactgccgaaggtcattccgccgcgtttgccggtcttcggatttatcacatccacatcatcgctgatccagcggctggcaagcagggaataacatcccatatcgatgcccttgccgcgcgcgtaatcgaccagcgacttgaacttggcgatattctcctccgatatatcctcggcgttaagccctgaaccaaaactgagaataatcatctcatagcccgtgtcggcacactgatcgacagccgtgcgcacaacctcaggatcagtcgaggtcagatgcatgaaaataggattctctgtagtccagggagctatggtgcgatacatgtttctggtgaagagccccttccgctccctgtcatagctgtcaaaaggcatttcatagacactgaatgaagcgaacgactctccggcgccgattcgccggtcaggcccgatgcggggagcgaccttcagaatacagggagtctgaagctgccagttgcgttgcgacgtgtagcgcggatcggtaacccattcttccgtgatgtcagtctctttctccgtgaaagagccgccacaagcataatcgctttccacgtggatattaggcaacaggaatgtgcgcggatctcctccgccgggcgattccggctcggccatcgcgaggaattccaccctgaaactgtctatgtttatgtctgatgaattaccgttgtccaccatgaagcgtttgcggataacgggaatgccgtcatagacggcgacagacagacgcagacgcacatcgctgagttctttgtcgccgcgcatgatgaatgttatttcctgtcccgtcggagctttcttgttgagtgcccagcggcctcgggcccatctgatatcttcttttacaggactgatctcgaaatcctcgacaatgaacgactgtggaatcgtcaccatcgaatcgatccattcatcccttatgtaggccctttcaggctgaccttcgagccctcctatggtccattccttaccgtcaatcgtcacggccccctcactgctcaccgcccgcagcaggctctcgcccgtcatgcgattgacaaaatccgtggtcgcgagattggggaaaatgcgaaacgtgcgcgaaaccatgtcattggccactatgatgcttttcccgtcggccgaagcatagattccggccgataattttcccggtgaaagcaaccagtcgtatggcgtacgtttcgatgcaggctctctcatgaccgggagcttgcctattttttgcgacagattcttcctgacgctttccgtcatttccgggcctttttcaagcgatgccgtcgcgacagccacaggtttttcgccgctataatcaactgaaggggaaatccagagcacataatcgccgctcggcccgtcgtcagtcggttccgagattagttcgagcatcctgacccctttaagatccagatctatatccgccggcttgtcgccacccctgatcacacggctgcgatacagctctttaccgtcacctttgacaatgataaccgccgaacctttttcaatcgtgccgcctttaccggtcactccgacgaagcggcgaatgagcccgtccttacggaaaaccataccggatccattgaccatggtgactcgctcaagtccggagagattcttcgttgcaggacgattggctatggccactttcgcgctgaaacgcgtcgctttgccatgaaggtctattttcattgccgaaggggcatgggtacctatcacgtcggtaaacatctgttttcccactaatgcgttctctccgtaaacggatttacctgcaacagcctcgccataagcctgatttactttggaaaggtcgagacacgcaagacttatcgaatcgcctgcataggcaaaaagacccgatattgacagcgttaaagcgagtaatcggcgtgatttcatgtcgataatgatttaatgatatatctttcagtttaagatcagtgagtacgtcctattctggcgtaaagcgcatagtcatcctcaatggagttgcctatcgtcgtcagcatgtcgcctacaagcgaaccgttcattcctccacgaagaatcctttcggtcatcttttccgaaagccgggcccttccgcccgcgaaacgcagggtgactttcggcgcgatgaatctcatcagagccacgctgcgcgctatttcatcctctccgatcagcggagtgttctccagcgccgttcctttgattggcgagagaatgttgacaggaaccgagacggccccggcttcgcgggcttcgctgaccatcgtcagccgctgacgcatattctcgcccatgcctattattcctccgctgcatatctccagtccggcctcgcgggcccacgctatggttctgagcttatcctcgtgggtatgcgtcgagcataaagaaggaaaaaaatccgaggatgtctccagattgcagtgatagcggcgcacgccggcctccttcagtcgcttcagttcatcgagcgtgagaagccccatggaagcgcaaagatagatcggcgtattttctgccagatgacggtagatagagcagaaccgctcgatgtcgccgggcgctaccttgcggccgcttgtaaccaatgagaatcttctgactcccctctccgagtttgaacgcgccatatcgacggcttccccgtcaggaattatgtcatattccgctattccggtatgatgacgggccgactgcgcacaccatttgcagtcctcgctgcatcggcccgaccgagcgttggctatggaacaggtatccacagtgtcgccacaccagcggcgtctgacttcgtcagccgcgtcacacaattcatccgtcgaatatattctgtcgagttccagcgcttcctcaactgttgcgggaactccccgcaaagccttttcaagcgctgtctgtaaaggatctttgatttcgttctctttcatgtcgcaaaaatacaaaaaaggagataattattggaattttatgctaaaaaatgggggataagggattttttcaattattcacatatccgttttatgtttccagtggttatatttgtacgtacaattctaatttcgggatgtcacgattcccgctgacatgccgcttcaactcattaaccggaattcaaatcaatatgtcccgttcacgcagtctcatcttgatacttgtagccatgacggcaattttcgacgcaaccgccatgaca

SEQ ID NO: 2023 - DNA, 23657 bp, synthetic construct
  misc_feature 1..23657: note = Synthetic
  source 1..23657: mol_type = other DNA
ccttttacaggccattcgtgaaatttcattatctgtgccattgccgtggcgacacaacctgtggcacacctggtgtgctcgctctcattgtagaccgggcaaaggtcattgtaaggtgatccctggtcccagcgtgtctgaatcaacggtgtgatattgtcccgttttaccgcagactttaccggagtggcgtcaatgccgttggctatagcccattcaatctgattttggtagctttcaagccacgctttcatattgtcaggcatggagtcgtagtcaaacgtggattcttcggaaaatcccaataacggcgtcacgcaatcatcggcggcgacgatggtgaatccctgccggttcggattgttgaacacgtaaaactgattcacgttgcctgtcgatgcggtgtaggcgagttgcggcttccctgttgctgcaattttatgcacaattccgccggcactatcaagacgaccgagcgcttcctcgggggtgagctgtgacgcggctgcgacaaggctgcataacccgagggcaataagtgatgtaagatgtctattcatgaataggataagttataattcacaaagttagtcagcttgcagcgattatgcaaatgatggtggaaattttgatgatatcaccgacatattgtcgggaaattagagtgtagccacgtgatacgctatatgctgcaacaaagtttttaataattatttgcagttatgatgtcaaaggtgtaactttgtattgtgccaaagaatcatcctgaggcatcatgcaatgtgaaatagatatttaacatagaacaacaatgaagcagttttttacttatgttttagccactatagtcggtataattgtaacctccgtgattgcaacaatcggcatgttcctgatgtcggtcatgatgctgtttgctggcatggcgacacctacaccgaaaatatcatcccattcgatactgcacatagctcttgacggtccggtcgaagaacgtgtccagggcaggagcctgtttgatgagcttcagggcatgagcgacaacgcgattgctctcaatgacttgataaggtctatcgaccacgctgcaaccgacccgaagatcgagggcatatatcttgattgccaggggggtggtagcggagctgccactacggcgtatatacgcgaggcgcttcagcgtttcaaggaatcggggaagtgggtggtcgcatacgctgatgcatatactcagtccaattatattattgcttctgtagctgactcgatatggctcaatccgcagggtctggtggatatacacggactgggaggcacgttgcccttcttcaagggcttgctcgacaagctcggtgttgagatgcaggttataaaggtcggtacgtacaaaagtgctgtagaaccatatatattgacagagccgagcgaggctaaccgcgaacagattaaggcttatgtcactccgatatggaaatatttctgcgacggcatggcggagtcgcttggcgttgctccggaaactgtcaaccaatgggccgacagcataataatgacccgcagccaggagcgcttgctcgttgacggcgtggtgacatctcttctgtatcgtcacgaggcggaggaatggatgaaagaacagacgggaaagaccgataaggatgacgatctcgaactggtgtcggtggcaagatacgctcagacaataaaggaaaagaagtcgtcaaacaatatagctgtgctttacgctgtaggtgatatcgtcgataccggtgatgaaggtatcgtcggcgacaaaatggctcctcttattcttgacctcgccgaggatgatgatgtggatgcacttgtgttgcgtgtcaattcaggtggcggaagtgcttttgcctccgaacagatatgggaggcgcttgagcagttcaagtcaacaggtaagaagttttatgtatcgatgggcgatgtagctgcttccggaggctattatatctcatgcggtgccgaccgtatatattgccagcctgtcactataaccggctcgataggtatattcggtcttattccgagtataaaggggctgcttaacgagaagcttggggttaatgtcgctactatagcaactaatccggaggctaatattggtattgtcgaccccatgactccgttccagcgggcatccatgcaggctatgattgatcgcggttacgagacatttgtagggcgttgtgccgccggtcgtgacatgcctgtcgactcaataaaggcaatcgccgagggtcgtgtatgggatggtgctacggcactccgcataggtcttgtggatcagcttggcgaccttgaccgctgtatcgccgatcttgccgaggagtgtggatacgatgattataaggtgactgaatatcccgagcccagaggcgagtggtgggaagaaatgttgttgtcgtcaggcagcgtgaaggagcgcattctcaagtcggaacttggagaggcatatccttattatatgatgatgcgcaagatgcagcgtctggagcatgtgcagtgccgcatggaggaagttgtgattgaataaccgtctataatcagttaaagcgatgcgccacaataaatttgtagacacagcactgttgcgccctatgtcatggatatacggggcggtggtgaaggtgcgcaatcgcttctttgactggggggtgctgaaacagcgaaagtttgatgtgccggtggttgtcatcggtaatatcgctgtgggcggcacagggaagacacctcataccgaatatgtgatagagatgttgaaaaacgggtatcatatcggtgtattaagccgtggatataagcgccataccaaaggcttcgtgcttgccaacaggcggtcgtcgccctgggatatcggcgatgagccgtatcagatatttcagaaatatggcaatgaggtgagggtcgccgtgtgcgagagtcgatgcaagggtatcgaagaactgttgcgaattgaccctatgattgacctcattttgcttgacgatgcgtttcaacaccgctatgttgcgcctaaggctgccatagtgctgacagaatggagccgcccggtatataacgacgaccttatgcccttagggcgtctccgcgaacctcagagcgcattgctgcggagcgatattgttgtggtgacgaaatgtccaagggaaatacgttcactggatgtgcggctcatttatgagcatctcggtctttttgcctatcagaaggtgtatttctcaaattatgtgtatggcggactggtaagcgtgttccccgatgatgtgagatatatgcctgaccttgccatgctgggcgaagatgactcgattcttattgtgtcaggcatcgccaatcctaaaccgttggtaagatatttgcgtaatttcggcgcaaaggtcgccgtgaagcgttatcccgaccatcataatttctcgcgaagggattttgaggatatcagaaaagcttacggacagatgaacggcagaaacaaatatattgtcacgacagaaaaagatgccgtgcgcatagccaacagcccgtattatcctcatgagcttaaggcgtcgacattctatctgccgataaaagtggaattcctccctcataagatgccgcttggctgtgactcgtttgagaaggaactgcgtagcctcataaatcgtcagactgacaacggatagggcaacttaaccgcttttgaaagtgttatataggaatattctaactttttaaaaattcaagtaaatatgttggacaaaataaatcagacggctgaatatatacgttcacgtgtaagtgacatgcctaagacggctataatacttggtaccggactcggggcacttgtcgaccatatcgaggataaacagtacataccttataaagagattcctaatttccccgtgtcgacagtagagggacattcaggcaatctcatattcggaaagctcggtaacaagcgtgtgatggctatgcagggtcgtttccattattacgagggttacgacatgaagcaggtgacatttccgatacgcgtgatgaaggctctcggcataaagactctttttgtaagcaacgccgcaggtggcatgaacccggaatttgaaatcggtgatataatgataatcaccgaccacataaatctgttccccgaacatccgcttcatggcaagaattacgatgagctgggaccgcgtttccctgatatgagtgaggcatattctcgccgtcttgtcaagcaggctatggagattgctgccgagaaaggtatccgtgtgatgcacggtgtttatgtcggcactcagggcccgacattcgagactccggcggagtatcgttatttccatataataggcggtgatgccgtgggcatgtctaccgtcccggaggtgattgtggcgcgtcatgccggcatagaagtatttggtgtctcggtaatcaccgacctcggcgtagagggtgtcgtggaggaagtgtcgcatgaagaggtgcagaaagctgcacaggcggctcagccgaagatgatggagataatgacagaactcgtaaaccgctttgaggaataataatggaagagggcaaacagagggagatagccgaacttggtgaatttggtcttatagaccatctgactgaagggctgccgctcactaatgaagcatcgctgaaaggagtgggggatgatgccgccgtgatgagatacaaggatactgatgtgcttgtgaccaccgacctgcttcttgaaggagtacacttcgacctgacctacgtgccgcttaagcatctcggctataagtcggcgatagtcaatttcagcgacatatatgcgatgaacggtacaccgcgtcagatcacggtgtcgctcggcatttcgcgccggtttacggtagagcatatcgagcaactgtatgccggcatccgcaaggcatgtgaaatctacggggtcgaccttgtgggcggtgacaccacttcgtcgcgtcagggactggttatctcgataacatgcgtgggcgatgctccggctgacaggattgtgtatcgtgacggagctaaagacaccgaccttatatgtgtcagcggcgacctcggggctgcatacatggggctgcagttgcttgaacgcgaaaaagtggcttcagccggtcagaaggatttcgtgcctcgtttcgaggggaaggaatatcttgttgaacggcagctgaagcctgaagcacgtcgcgacatcgtgaacgaactggctgaagcgggcataaagcctactgctatgatggatatttccgacggactctcgagtgaactgatacacatatgcaagcagagccacacgggatgccggatatatgaagaccgtattccgattgattaccagacggcggtaatggctgaggaactcggtatgaacctggttactgcagcgcttaacggcggtgaggattatgaattgcttttcacggtgcctcttaccgatcatgagaaggtgtcgaagttgcccggtgtaaaagtgataggccacattacgaagcctgaacttggctgcgccatgattacacgcgatgacgtggagatccctctccgcgcacagggctggaatcatcttgcgtaatgacgatatgagtaaaatataagcgggacacctttgccgggtgccccgcttgttgttagatatgatttggatgttttacttggtgaaaacgatggtttcggaatatccgtcgccgttacttcctgtaatggagagtgtgttgccgtcaactgagtagggcacatctattgacccgaaaagagccactgcgttgccttcgccatcatgacaggtgaatttcccgtcatttaccgaatatgcgaaaaagagcgggacggtatcatatccctcgcctgtctgcaaatattgggcaagtccatttgaaaggaatgtaaaacgatgacacttttccgaatcataccagactcctaccaacgcgtcatcgacgggcgcgggctcatagcctgtttccgaagatacttttgttaaggtaagctccattgtgtaggaccctgattcttctatgtcggttgcggttgctttgaatattagcttgtctcccgatatggaatacggtccttcgtaaatcatgctccccagatcaacagtgagcctgttgccgcttaccttgcatgagccaaggattgcaacctcgtcatcgtaatcgaaagtgcagatgcccctgtgtttgaactggaatgatattgagcctgcgtcaccttcgtcatctacataagaatatgtccacttgccaagaagcgcgtcaggagtgttgccgacagtaggcaccccgagcagctcggtggcaggaggtgttactgtgctgccacccggctcgtcttcatcatcgtcatctccacatgccgtaaacccgcagcacacagccacagcaagcattgtcatgaatagatacttaaattttctcatagctttctcaatcgctttcttcgcccctcccgaagaaagctctttttctcattatacataattatataggagcggaaggggaaaacgctcccgaaaaacatttaaaatctatcggtttttcaaggtgcaaaattaataaaagtacacaagttttcaatacattaaatctaatgtggatggtgtctgcattatgtatgtggctgtaggttaggtgtgtaatttttatagggtggcacatcctgctcaaaatagtgcttaagaagtcgtaaataaaggttgaatctttttcttacaactgcctaagcagtcccggacgtgactgcagaaccagtctccctattaaatcaaataagtcgactgatacatcagccgacttacttgtgactcctacaggattcaaacctgtaaccttctgatccgtagtcagatgctctattcagttgagctaaggagccgataaaaactctctatttcataaaatctgtgactcctacaggattcaaacctgtaaccttctgatccgtagtcagatgctctattcagttgagctaaggagccgtcttttgctctttgcggttgcaaaggtaggcaatatattttatatatgcaagaaaaatgtcgaaaatttgagaaaataaatttttttgaaatttttcttccaaaagttttgccggctaaaaaataatgcctacctttgcatcgcaaacgagaaaacacggttgcccaacgcgaaaatagctcagttggtagagcacaaccttgccaaggttggggtcgcgggttcgagtcccgtttttcgctctaattcagttagtttgaactttcgtccgggtggtggaattggtagacacgctactttgagggggtagtggccgtaaggctgtgtgagttcgaatctcatctcggacacctcgaaaaatcgcagttaacttcatgttagttgcgatttttcttttttttctacgctttcggttgttaatcgatgtcgctgccatctttgagcgcctgacctaaccatgcaaatatgcagagtatcataatgaggaatgccataattaattaatttagatgtttagtggggatctgccgattctttggcgcgaaattaatcgcatgatgggcggtatctctgtatgcctaagttaaaaagtgttgtaatagatttattgccatgcgcccctttgttaccattcgcccaaaagtggcgcggctcttccgtgccggatataaaaagaaagagccgaatcttgatgattcagctctttccttgtgttgccttggaaggattcgaaccctcacaggcggaaccagaatccgacgtgctaccattacaccacaaggcaattattatcggtttgcgtgtgcaaagttataaggtttgtcgcgattctccaaatgttttggcgactttttttcaagtatttttgcgcttatttcttaatcctcattagaccagactgttttgctgacacaaatgtgaccgtattaccttgtggcaattatagacgtccttgaataattaatgttatttgtttgaaaataatattgtgaatccaaaaattattcgtatcttagagcgagagaaaattgtgcctatgaaaaaactcgaaagtattctttttaatatcaacctgcctgatcgcaaggcttaccagggttcgctgctcattgcagagccgtttctcagggaatgttatttcaatcatgccgttatatctctgattgagtataatccctccgggacttccatggggcttgtccttaataaacagaccaactacaatctatccgatcttataagcaatgtttcgcgtcccgatgccatccctgtgtattgtggcggtccaatgtcttgcgacaggatgtatgtggtccatcggcttggcgacattgtcccgggttcacgtctcatcgctaacgggctctatgtcggcggcgattttgagatgttgattgattatgtcaactccgacatgcctttggagggctatgtcagattttgtcttggatacagtggatggggtgcaggtcagcttgacgaagaattgcgcaaaaaagtgtgggctgttgcgtctgtttctaataccgagaatctgcttgccggttctgaagacgcttattggcatcgtcaggtgaaacaaatggggcgcgattaccggggatggctttatcatcctcagaatccaagaatgaactgattattcatattcatgcagatacgccttgcgcgttgaattgtgtcattgcgtttcacggtattgcacaatgccgtgcctgtttctattgagtgctatataataaaaaaattgattgtcatcccgacaaccaatcttagttaaccttaaatctaataccatgaaaaacacgttacaaaggtaagacatttttggaatataccaaaatattttgtgacaaaatgccgcattattaacattattttaatatttgtgctattttaatcgcggttatggtagaatttagccattttatctctccttcccggataaaaagaaagatggtaccggtcaaaagtccgataccatctctcacgtttcaactatttatttatgagaacctcagtgcccggtatcactacccgataaagaggacgagggatgtgaaaaagcgggtaatatcactgttttcattacttataacaatctaaaaccatttgtggaagccggtttgtgcgattttatagcctaaaaacgcttaaaaaaagcaaatcaaataacaaattaatgctaatattatcaaattaacttaatcctttaacattcagaggctttttagtcaattccggaagactttgaaaatgtcacttcatgctgtcgttaaactttgcataagcgtctttaagagtgcggagcggtccgcgcacccgctgtgtcaaggcaagcaggtcgtcaatgcgacgacggtattcctccaggatgtcattggcaaaaagatagttcaatgtgtcggcaaacatggttaaggcggtgccttcctgcgactcttttatccatcctcttgacgaaacggcatggcggcagatagcctctacgagccacaggcggaggtcggctatcagccttggactcgggtgcagggtcgtgaattccttgattgctttcttgcaaaccgacgtgcgtcccttcgcccttcctttctgcgggaaaaattccttggtgattacagccttgtatttctcatgcattttcttttcatcgggattcacgtaatattccagatattccctggcatccttgcgcgcgtcatacagttccagcatcacctctatcagctgctcgcgcgtaagctccttcaattgcttcttcaatgtagtctttgacatatcctccagattgttagtattgacatataaaaaagtctctacggagtacgcagagacgtaggatttcaccttcggcatatagccttattgtgataagatgtagaattgttgcaaatttaaagaataattttcaataatccaaaaaatagttatatatttatgcccataaaaataattttaactttatatcttttacgatggacgataaagtattgggcatagatttaggtactaactctataggctgggcgataatcacccgtgataatgactcttgcaggcttttgcataatggtgtgcatatattcaaggaaggtgtcgcaagagaaaaagggaatgaaaagccggcaacggaagatcgaactgctcaccgtggcttgcggcgacattatgatcgtcgtaggcttcacaagattcagctacttaccgtgcttgttgatgtagatatgtgtccttttctaagcaaagaggagcttgatgattggagatatgcgggtaaatacccgttgaaagaggatttcctggattggcagaagacaaacgatgtttccgggcagaatccttattctgccagatatgaggcacttacccgtactcttgatttgtcgcttcagcaagaccgttatctattagggagggcgttataccatcttgcgcagcgtagaggctttttaagtaatagaaaagatacgtcaaagagtgccgatggagtagtaaaaagcgggatagatgatttgacagtgagtatgaccgaggcgggatgcacgtatcttggtgaatatttctacaaactatatgaaaggggcgaaaagattcggtcaaggtttacagatagaattgcacatgtcgaaaaggaattttatgcaatatgtgaaaagcagagtctgccaaaatcgcttgtggataaattacacaaggctattttttatcaacgacctttaaaatcacaaaaatgggcggttggtaaatgcgtttttgagacctctaaaagccgttgtccggtatctcatcctttatttgaggagttccggatgttgtcgttcattaataatataaagataaaaacattcgttgatgctgactaccggtcattgactgatgaagagcgggaaagcataataccattgtttttacgtaagtcaaaatcttcatttgactttgtggatatagccaagaagatagctggtaaaggcaattacggattccgtgacgattatggcgatattgcttacagattcaattatcgtatgtcaacggctgtaagtggctgtcccgtgacggcatcattaataagcctgttcggtaaggattggaaacagggcatcggcgagtgttataccggcgcaaatggtaagacggttgagcaatgcgctgacgatgtttggcatgtgttatattcatttgaccgcgaggattatctgaaagattgggcgaagaagcggttgcagatgtctgcggaggattcggctgcgtttgcgtcgctccagttgcctcagggctatgctgctttaagtaaatgtgctattcgcaagattttaccctatcttcgcagtgggatgcgttatgatgaggctgtgttccttgcaaatttgaagaaggtattgcctgagcggatattgaatgacgagactgaaaaacatcgcattgagattgccgtagtaaatgctgtggttgattttgaatcgagtccgctcagaaagactatgaccaaagagaaagcggtaaaagaggtactggaggatatctcggatgtcaatcttggaaaactgtcaaggctatatcacccgtccaagatagatatttaccctgaagcagagttgtctcatgacggaaagttgaggctcgggtctccacgtatagcgtcagttcgcaatccgatggcgatgcgcgcacttttccgtttgcgtcatcttattaatcaactattggatgagggtaagattgacaggaccacacgtattaatatcgagttggcgagagaacttaatgatgccaatatgcgtaaggctattgatcgcgttcgacgtgagaatgaagctgaacgcttaaaaatcattgaaaagatttcccgattatataaggaagccacaggcagtgctatcgttcctacagaaactgagattcttaaattctctttatgggaagagcagaagcatcgctgcttgtacacaggtgagcagattgctttgaccgatttcatcggcgtatcgcctaaatatgacttggaacacactattccccgctcgcttggcggtgatagtgccaaggctaatctgacactatgtaattcggagtataatcgaaaggttaagcaagcggttctcccggcattgctgcccaaacatgacatgataatcgaacgaatcaagacattggggtggcaggaagaaattgacaatctatccaatcagatagcgagaattaagccgtcgatggcatcgaccaaggaaattaaagatgcgttgattcagaagcgccactatcttaaaatgcgtctcgattatttacgtgataaatataaccggtttacaatgactgaagtccctgagggatttgcacgtcgtcaaggagtcggcatcggagtaattggtaaatatgcaaaggaatatttgaaatctctattccgtagcgagcctcatcaggtttatctcgtaaaaggttcgacaaccgctgattttagaattgcatggggattgcaggaggaatatactaaaaaggcgcgaataaatcattgccatcatgccgttgacgctatcgttattgcatgtatagggagaggagaatatcagcgttgggctgaatataaccgtgacatggaggcgtatgagtttggaaaaggaggtcgtccgcaatttcaaaagccgtgggaaacctttacagaagatgtaaagaagattcaagattccacgcttattctgcatgatgcaccacagaaaacatttaagcagaccaaacgtaagaaaaggataagaggaaaaatcataaatggagctgatggcactcctctttacgaaaaaggcattaccgtaagaggacgtctccatgaagaaacatattatggggcaattgataaagatggctcgacacgctatgtattgcgtaagtctcttgacaaactttcggaaaaggagattgacaatattgtggattccgtagttcgcaataaagtggcggaagctgtggcgagtcgcggattcaagaatctttgttctgctccggtatggatgaatgaggcaaagggtatcgccataaaaaaggtgcgcgtctatgtccagcgcgtaaccaatccgataaaacttaaaaaacatcgtgatgtgtcacaccatgcttacaagcaatactatcatgttgcaaatgacactaattacggcatggctatatatgtcggggataatggaggtaaaaaggaaaagcgttcattccgtctgatgaatatgcttcaggcggttgattcatatcgcaatggtaatgatttcttcccattggaagatgataaaggtttgccgttaaagtgggtgctttacactggcaagatggtgctgttttatgaacggtcgcctaaggagcttcttgactgcgaaacaaaggaattgacaaaaaggctgtatgtgattagtggacttagcataaatcctacaggtaacggatatggtaagatttcacttcgccatcaccaggaagcgagaccctctactgatagtgctgtaaaagaaaagggaggtatctggaaggcaggcgaggattttcgtcccggtgtaaaggtgtaccacacacagttcaacgcactagtggaaggcgttgattttgaactgacgattacgggtgaaatcaaatttctacgcgcattatgctgaaacgaacgattgtaatttcatcgccatgtagagtatctgtcaaaaatcgacagatgacaatgaccgattcatcatcgggtatcgtaaagacggtgccgatagaagatctctcgatgctgattattgaaaatcagctggtcgatgtgtctgcttctcttttgaatacccttatggaagaaaatgtgagcctgttggtatgtgataattctcacatgccgtcaggcttactgtttccgatagaaggcaataccgttcaaggtgagcgttaccgcactcaactggatgcctcgcttccggtaaaaaaatcactttggcgtcaaataatcatggctaaaataaaaaatcaaagttcactgcttgaccgtctcggaaaagatggggatattttacgaccgttatatcagaatgtaaaaagcgacgattctgataatagggagggaatagctgcacgcttatattggcgtgaactgtttggcgatggttttgtccgtgtccgcacaggacagtttccaaataatctgcttaattatggatatataattttgcggtcggcaatgtctcgttcaattattgcatcgggaatgcttccttctattggtattcatcataaaagcagatataatgcgtttccttttgccgatgaccttatggagccttttcgaccctacgttgataaggtcgtgtatgaattgtattcatccggctgtaccattctggataaatcatcgaaagcggcacttataaatataatgtattgcgatgtgagaatgaagggaaatcttcatccgctttatgttgctgtagggaatttctgcacatcggtgcttaagatgatgtcgggtagttccagggtattgtcagtgcctgaattatgttagcttatggatttttcacggttgaatgcctaccgcatcatgtggcttttcgttttctttgatttaccggttgtgacaaaaaagcaaagaaaaattgctgcacagtttaggaagtctttggagcgtgacggtttctcgatgatgcagttttcggtatatacacgtttctgtggttcaaaggaaagtagtgatgttcatataaaacgggtgaaagcatttatcccggcagaaggaaagacttcgattttgcgtataactgacaaacaatatggtgaaataattaatttttggggtaaagaaaagaaatctttgcctgaaacgccattgcaactggaatttttttaataattttgcaaaagaagttctacagacataccaacttccgttgtgattagcttttttatagagtgaaagtatcaataaattattgatacataggctaaaatccaacatcagttgtggtttgatgtagaatctattaactttacaacctcgtatttttgcgaatactactccgactgttgtggtttgatgtagaatctattaactttacaaccttgagctacaaaagataatcgttccgtgtgttgtggtttgatgtagaatctattaactttacaacgaatagtaaaatcacgaagttgtgtacgaagttgtggtttgatgtagaatctattaactttacaaccttgccgagatattcatgtcgaagacgcgtgttgtggtttgatgtagaatctattaactttacaacatctagaagttttatatcatcagcaataggttgtggtttgatgtagaatctattaactttacaacagaatcattaaaataatcaagaggcaaagagttgtggtttgatgtagaatctattaactttacaacggacacttccaacaatcgacctcaatataggttgtggtttgatgtagaatctattaactttacaacgtgaagaaatagtgcttaactgacctgcatgttgtggtttgatgtagaatctattaactttacaacggtcagaaaatttctgtttcttcgatgaaggttgtggtttgatgtagaatctattaactttacaactaatagaacgataacaacggaaattaaagggttgtggtttgatgtagaatctattaactttacaacgtcttcctgtttcatctcgacaaccgcctgttgtggtttgatgtagaatctattaactttacaacctcgtattttcgctaataccactccgactgttgtggtttgatgtagaatctattaactttacaaccgtgaccgtcgaacaggacggcgaagtgtgttgtggtttgatgtagaatctattaactttacaactattaatacattcatccaaaagaacctggggttgtggtttgatgtagaatctattaactttacaaccaatagctgaaaattataaaataaaagtaggttgtggtttgatgtagaatctattaactttacaacgcttaaaaaaatcttgacaatccttaacaggttgtggtttgatgtagaatctattaactttacaactcattttcccaattacggcaacgcataccagttgtggtttgatgtagaatctattaactttacaacttctcctttttttggagaatatatgtctggttgtggtttgatgtagaatctattaactttacaacagttaagactacctgcgaaatcaccaccgagttgtggtttgatgtagaatctattaactttacaactttgtggagttccgcagccgtaagcggcgggttgtggtttgatgtagaatctattaactttacaactcccgcagccgtcagcgagtcgctgccaccgttgtggtttgatgtagaatctattaactttacaactggcactgcgaaccatgcccgcacggcacagttgtggtttgatgtagaatctattaactttacaacaccacgcttctcatgcgctgcgtaagcggttgtggtttgatgtagaatctattggttgtcagcagatgcaatttgttgaatcggctctgatggcaattgctcgatttttagtatttttgcattcacgctgacttagtcggctaaaaaacattggtgtagtgaaaaattttactgacatgttgcgaaaaaccaggcgcacaatatttttgattgtaatgacgatgtgtatcatgcatgccgcaggctgcaacagtaacgaaaaagtcatttctgtctcagcatctgaatttgagaaagaaatcaatgtcggctccgtacaattagttgacgtccgcacaccggaggagtttgccgacggacatatcgcaggagccttaaatatcaatgtcaagtctgatgatttccgacagaaggctgagaaagcgctgtcgaaagactctgtcgtgctcgtctactgccgcagtggcaggcgttcgctggatgcagcgaagattctgatcgaactcggatacaaggtgataaatctcaaaggtggaatcattgaatggagtgaagccggacttccggtagacgatggacaaaattgagctggagaaacaggtggtcgctcagatgattgctatatattgccatcgccatcatcatgccgacgggcagcagctgtgcgatgactgccgcgcattgctgagttatgcgcatcagcggctcgaccattgcccgaaaggtgagcataagacaagttgccggaagtgtgagatacattgttatgcaccggagaagcgcagtcgcatacgtgaagtgatgaagtatgtaggtccgcgcatgatattcattcatccccggtcagccatacggcatctgatttcggaactgacttgaattcattgttacgagaatttcccgggttcccgattttttgtatatttgcgtgtaagattgcataatgcaagtattagaatccaaattactgataattatgaaaacgataaccttctctcttatagccatgatgtgctgggttggagtgtcagcccggaccaatgtttcttcagggtttcaggaacttgacgaatggactgagcagtgtatgaccgatagaccatatgctctgggttaccccggcaattatgacggcaacctcgaagggttttataaatggtacacggcgaataatctggggaatgtgttgattaacaacgccggtgacccctttgaaaagagcggcgcactgtcgtcggcgaaatttgaacgcgatgtaatagagttttttgcccctctttatggcttcgacacaagcgatctttggggaatagtgacaatgagcggaaccgatggtaataaccacggcatatatttcggggtgaactatctgaaggggatgaccgggaaaatgcctgtcgtctatgtctccgacgaggctcattatagcaactaccgcctttgcgatgttcagaatcttgatgtaaggcttgtaaagagcaacgacatgggtcaaatggtgcctgaagaactcgaaaaatcgctcgaccccacgcgccctgcgctcatcatctatgccatgggatctaccttcaaaggagcgattgatgaccagaaggctcttcaggaggtattggaccgtcatcccgaaataccggtatatcggcatgtcgatgcggctcttttcggcggatacttgccatttaccgaatatcgcgatctggtaagccgcaaagtgatggagtttgaatcgatttccattagcggccataagtttttcggcattgacagcccctgcggactgtttattaccaccaggaatatctatgataatcagaatccctttgacgtaccctacttgaatgccaatatgcggatgattagctgctcgcgttccggcactgacccgcttaaattctggtggctgacaaagaccatcggcatcgacggttggaaggatcaggctcggaggatgatggacaatacaaaatatctcatgtcggaactccggcgtattgactgggattgctggaacaacacttacagcaatactgtgtttttccgacgcccgtcagacgagattgttgtcaagtataatctcgccaatagttttgacgatcgcttcggtgggaatctgtcgcatgtggtagtaatgcaacatgtcacacgggaaatgatagatctatttatctccgatctggaaaaaagcgaaagcgcttcgcgatgacaccccgggttctcatcccgtcattctttagtaatcgggaccggcgcgattagtattgcagatagatgaaggggacgatgtcgctttgccgtacctgaatgatgacgaggagcactatggcgaggattattgcctgcagaaggagtgggagagcgatgtagccgcgttggagggcgttactccagcggtcaggcatgaaatggagtatataggctgccgccatgatgatgactataagaagatagccctcgacaaattgcggggcgatttcaggatggaaattggtgaaaatctgggttagcatatccctgacattttccatcgagcgtgaacggaaaaacatcattccgaaagccatgagattgaatgtcagaaacacattggcggcaacccgccaccattttccccggttctcttccttgacacgcggcagtacgcgccgtgccgtcttgtgtgccacaagcaggaagccgttccatgcgccccagattatatacatccatgatgcgccgtgccacaagccgcctataagcatggtgttaaacagattggcgtggttgcgcgtctttgagcagcggttgccccccatcggtatgtataggtagtcgcgaagccatgtggagagcgatatatgccagcggcgccaccattccgagggattctgcgacttgaacggggcgttgaaattgtctttgaactgatagccgagcaacagtgctatgccgatagccatatcggaataaccggaaaagtcgcaatagagctgcagcgtgaagccataagtggcgataaggttctcaaaaccggaatacataagagggttgtcaaacacccggtcgacaaaattgccgctgatatagtcggctacgattactttttttatcagtccggctattatcagaaacagtcccgcgccggtcatcgaccgtgtggcaacgggatttgcctcaatctgtcccagcatatccttggctcgtacgacgggtcccgcgaggagaggcgggaagaaggtcagaaaaaatgtgtaatgaagaaagttggtcgccggtcgtatgtcaccacggtagatgtcgactatatagcttatcgagcggaatgtgaaaaacgaaattcccgccggcaggattatgtcaaacgcgtcaaaaggcttgtcggcaaactctgcaatcgtggaaaatataagattcgtgtatttgaagtagacaagcataccgatattgatgatgacgttcaatgccacgatacacttgcgcacgaccatgtttttagtccatccgagccatcgtccgagcagatagtcacacacacacactcccagcaatataaaacagcactccgcgcttgacttgtaatagaaatagagcgaaaacgctatgaccatcactaattttgcaccccgccatcttctcaataatcggtatagaaggagaaaggcaagaaacagcagcagaaacaaccctgtattgaacagcaacgggcttgccgggtcgtatagcagcaacgacttaagcttgtccgcgtcaatcacaggtaatagtgaacggaaattttctatgtcaaatgtcggcagcttcatctgagtgaattttttaaagcgtcgtaaaacagtgcgccgtgcagacggtatcccttataagaatggtgtatgtggtctttcgccataagcccctcattgacccattgacgtgacgcccccgtgcctccggctatctcataccagtcatataccgggattccgtgttcatcaccatatcgggcgatgatattgcgcacggtaagtattcgttcatttaccgtgtaggttcgccgggaacgccttttcccctttctgcgcacacgagtgcttttctgacactccataggtgtggtcagcaatatgtcgcttgccggatatgattggcgtatgtttgtgacaaaagtgtcgatactgcggtatatctcatcgtcggtctgcttgccgaatgcttcattggctccgagacttacgattataaggtcgggatttatgtcgcccattttccgggcggcgggaagcatattgtagcagtggtacgtagcgccgttgttgccgatggcatgataaagcacaccgctgcttttgccgttggaaaggacgattccgctgattgaagtgccgcagccggtggttaaagcaagagagacctcggtcaacagttgcggcaatgtcactgtggtcactgaatcggtgtaagtcgtcgagaacgctatcgggctatcctgtgaacttaccgagtcgatgagcagtgtcccgctatgatatatctttaatctgttaaacgggtcggcattgcctgtgcgcgacagtgtggctatggtgagacttgtgctgtcacacaccggtgatatcccgactcccgtaaatcccggtgcagcattttcattctgcttcaaaagtttggatccatgccatttcgatgtactttttattatgtaatcgcgtggctcgttggtgcctgcaagtttcaacggtacaatcaaccctcttcccgcgttaccatattccgcttgcataagggcgcgggttttgccggtagagaaatcagcctggatgtgggaatcgccgatatgcactatcgtcagggtcgcggagtcggtatgtgccgctttgtggcggagattgctccagtcggcaccgttaagttcaatcctgttctcattttgtttgataaacggagggattacatcaagttcctcgtcggaaaactccagctgaggcgtttctcttaccgcgcagtcagtagtgtcggctgcctcttgtgccgcggcagtgcggattgccgcgatacaaagtatggatgctattatatttttaattttcaatcgcatttacaaatgattttacaaattcttcggcaagccgtgcgccgcctgcgtgtgagagatgcacgtaatctttgttggcaagcggaggctgtgccgatgcccactttattatggcaccctcgccacccatagcctcccgggtatcccagaacacgcatcctgcagttcgcgctgccgtgcgctgtgcgttgaccatcgctgcggtcactggcattgacttgacttcggagcctgtcttttgtccgcggtcaccgactcccatcataactatgtcggcatttgggtagcattgccgtatatgattgatcactttgaccatcaggcgcgagtaagccgagtagtcgcgctgtgatgccgacatggcgtttattccgaattcaaggataataaggtcatagtcgatgtagcggcgcatttccccgctcaatttctcattgacgcgagtcaatgtcaccccggagaagccgcgcgacgacatgcagtcgaccgagacaccgcagtgctcgtcgagccacactcctatagccgctaccgaggagtcgctgagcgacaccgagaatgaaggggcggctcccgatacctcgatgcattgagcctccggtgagcctgttatttcgtgggtctcccatccgtcatccgtacattttgtgcgtatgaccgtgttttgggggctgacaaacacgaaacgcgacactccccatgaacttagattgtggtatttgttgactcctttgtaggttgccgtcgctgtagtggcatcggcactttttaccgaatattgttcggttattgacatgtaggcattccgttttcccgaagaaccggcgttgaagacggtccatccgctgcccgactgtcttacagaccgtctgaaacccggaaattctgaatacatgttgacatatcctacacctccgccgccatagcggtcctgaagtttttcccttacattctgcgtgaatatgtcgccttcgatataggagtcgcctatcacggcaatccgtgcgagacggttgccgctctcggcaagtgccgccttgatgcgtgccagtcctttgccgtcgggcgaataatcctccatctttataatgtcgcctgaccgcgggtttatcgcttccggaagcggcttttcttcctctatggaatcctgcggtactgctgccgtctcctgaggtcgggcgacaacggtttttgcgctgtctttctgctcttcaatcgcggcgatcagttccttgtcgatatgcaggttgtcattgtcggctacggctaccgtggtgtcgctgcccggcaatatatctccgataaggttgaagtcgttgagcttgcctccgcttattcttgacagcggaagctgcgatactgccgccacaatgattaccgcgatgaaaagtatcaggaacggttttcccttcggctcgtcactcatggctttccgattgaattattgacatgagccgggctacctttgcctccgtttccgcccactcgttttcaggtgatgatgcagccgtgatgccgcccccggcatacacgcagtaattatccctgtcaaatcttacactgcgcaggttgacaaaggtgtgtagaccgctctcatcgtttactcccacataacctccgtagcatccacggtcatgactctcgtatcgggcgatattgtccagcgcggcggtcaacggcacaccggcgagcgcaggtgtcggactgagccggtggagcaggggaagtatcgccccgtcatatcgggcggtgatgcggtgacacagatgttcgatttcgccatagcctacattttctgcttcgtggacttccgggataattccttccgcacggaatagatttacgatatagtcggtcacgaaattgtgttccgcgatgtttttgctgtcccacggcaggttgctgcgtactcttgtaccggcaagcgacattgtcgtgatgaccgatgtcgctgtgtcgcgtgacaggattgtttcaggtgtcgcgccgagccagccgccggtctgcccggtataatacatgaaacggaaagtggagggatatgccgcgaaataacggtcggcaatcttcacccagtcgatgtcagacgcactcccgcatattacgcgtgatattaccgtcttgccgccgtcacgctt

SEQ ID NO: 2024 - DNA, 23651 bp, synthetic construct
  misc_feature 1..23651: note = Synthetic
  source 1..23651: mol_type = other DNA
tatccgatgtgacggccacttcgcttaccgtcgaggtcatcgacaatgacaccgagggtacgcgcgaggcggagataaccgtgacgtccggtgcggcggaggcggccatccgtatcgtgcaggtggccaaggactacgtctttccgcgttaccgctgccatccggagttccagtacggcacggctatgtcgccgagcggtcggtatgccggcggtttctattgggagtatgacgacgagcacaatctgaactgctatccggtggtgatagatgtcgccacgggtgagtggaccgaactcggaccatatccccgaacgcttttcagccttttcagcacctcctgcatcagcgattacggcgatttggtcatagcgaccgagaacgatgggaacgtcatgttccgtctcgacggcagttacgaggagttcaagactccggcgggcttcacgagcaatccgcagataagccaggttgcggccgacggtacgtgggtaggctggtgtggcaaagacggtacctcgtatcctgtcaaatgggtggacggtatggcggtagagctcccgaagcccgcgctgaattaccgtgacgagccgataggcgacgtgcaggcccgcggcatctcggccgacggccgcatcgtttacggaaccacgtgggataacctcgatttcggcatggtctattgggacgaagccggcgaagtacattatgtgggcgaggacgtgcgttacgtccggacggtggacaggcccgacggatacggcggtacccggaaatacaacctcgctgacgggatgtggacgacggccaccaacaccaacgtcagcccgaacgggaaatatatcgccggtacgttccggagggagagcatggacgaaaccggtcaggtgaacgaaacgaactacccggcctttttcaacaccgaaaccggtaagacggtgatattcgaagagctcgtcggaggcggaggcgtttcggcgacgagcgacggtctgggctttacggctgacagtaccttcggccccagctccggcaaggtggtggatatcgagaacggcattgtgctcgggagcgccctcgaatggatagagtccacgtacggtattctggttccggccggctacatcacctacatgcccgacagcaaggacaggttcctcggcgccatgctgtataccggcggtccggtggtcgagggcatcaactggtacgtcggaccggcgagataggacacgattgttttcataaaatttttcaggcgggtgcgccgggcggttttcgttcggtgcaccttttttgtgcgtgcgtttcgctgcgcaggtttcccggaggggcagcgacaaacgtaggtatcgccggccgattcttttcacgtgttttaggtattgccggagccaggcggacaccctacttttgtctccagataaaaagatttttagccatttctttaaagtcggtaaggccggcccccgcggccggccttttgtctattttgacggaatgttatctttgcagaaaacaacatacgccatgcagagaacaggaaaatataccaaggacgacccgatgagcgacctggtcagcgacaactacaggatattactgcttatgagccgcttcggtatcgggctcggtttcggggagagttccataggcgaagtgtgccgtgccaacggcgtggatacctccaccttcctcatcgtgaccaacatgatgctttacgatgagattccggccgatgcctacgacaaggtctcgatggagggtctcctctcctacctgcacaactcgcacgactactttctcggattccgcctgccggccatccgggagaaactcgctgcggcggtggggacgggcagcgacctttcgcgggccatcatgaaatatttcgacgactatacggccggtgtccatacccacatggcctacgaagaggaggtggtgttcccctacgtacgcgccctgctggaggggcgccgccagcaggattacagcatcgacatcttcagccggcaccacgaccaggtggagacgctgctcacggagttcaagaacatactgattaaatactacccgtcggccagtacgaacgaaatcaacaacgtgctgttcgacatcttcaactgcgagaacgacctcgcttcccacaatgccgtggaggacctgctgttcgtcccggcagtcggaaggctggagaaaagagtggaggaggaaggatgagcgttacggtcaagataacggtggcggagccttcggtcatcatacgcagcggcatcatcgccgtgatagggagtgccgagaacctgaaggccgagatttacgaggtgagcgaaatcgaccagttgcggaacgtgctttcgtggcagcatccggatattctgctggtgaatcccgcatcgctcggcctctttccgctgcagcagctcaagaaggatacgggcaatcccgacatgaaatgcgtcgcactgcagttcgcatttaccgaccatgccgccctgaaaagttacgacgatgccatatcggtgtacgacagtgccgagacggtgaacgacaaactcgcccggctggtcagcgaaccggagcgcgacaagcggcacgaatcgctgagcggacgggaaaaggaggtcatcgcctgcgtggtgcagggtatgaccaacaagcagatagccgacaagctcttcatatcgacgcatacggtcatcacccaccggcgcaacatatccgccaaactcggcatccacagtccggccggtctgacgatttacgccatcgtaaacaagctggtggagctggacgacatcaaggactccgtagaggagcagctccccggagattaggattgcagccggaaccgcgggcctgccgctgagagtcagcgctggcggtaacgggctaccgtacccgcctccacgaactccgccttggctgctgtccatgcccggaaatggggcgaggcgttatgcgcggcgacggcctcttcgtctgcccaccgttcgatgaaacagaaggcgcggctgtcggccacatcctcgtaaaggtcgtaaaagacgttgccgcgttcggcacggctcgcttcgatgagaggctgtaccgctttcagaaaatcctcctgtttaccctcccttatcacatttctggctactatcgttatcatatcgttcgttgttggtgtcgtgtcggtaccatccctgtcgcgtgcggtcaggcgatgtcggcagtccagtaggagaaggtacggcgcgaaccgtcctccatgccgacctcctgcgaccagcggtagggttctcccagccgaaaggcgacggactgccggaagaggggcccgccgtaacagagcgtatggtattcgccgttctcgccgcagaggtcgattccggcggggaagtccgccaccgtcgcgcggttcagtctgcggccgatatactccctgcccaatcgctctgcccaggtcgtggtgatgaccgcctccagtcccgaagcgaggaatgcttccatggcctcctgcggcaagagttcccaaagcggttccaccacctcgataccgtagggccgtagacgctcttcgcggtaggtgcggacgtcgtgcagaaagatgtcgccgaagatgaaacgggtgactccctgtgcccggaaccgttcggcagccagccgcatggcatgcgtatcgtgttccggctcccctcccggcgttacgttcaccgtgcagagcggaatgccgatggatgcggcctgtgcccggagcacccgttcgggaatggcgtgcattgtggagcggccgtcggcgccgctgaccgtcgtcagaagcgatacgacgtcgtatttctccgagcgcagggccgtcagcagtgcgagcgccgaatccttgcctccgctccagttgaagacggctttcatgcgtgcgtccattccgattcctccgtcttttcttttgtgaacagtccgccgaccagcgtgaagtaggggggcaatacggggccttcgctccagcgcagcgggagaccgagcagttctttcgccgtgcgggccacgtcgaacccgcaggcttccagcgaagtgcgggcccggtcgggataacggcacggtttcccctcggtacgcagacagccgccccggccgcacagcaaacagctgcccgcaaaaagggcccggctgccgggatgacgcttttccgcttccagcaggcgggcatccatcggtcggcgggcatcctctacgatggcataggcggctgcggccgcttcggatacgtcggccggccggtgccgttccttggcgtccaatgttacgaccgccccgatgatgcggatgtggccgtagccggcaagccgttccagcgggtcggtatcgaaaggcggacaaccccatatccggccgtaattaccgcatgcccggcaatattcctcgatgcggcgtgcgtcgcagtagctgcggaggtaatctccggcgggcaggctggcggttatgtagcgggtacagggcatctcggtgcctgcaaagatagcgaacgcgcggcggattgccgcacttttttccgtcggcttcattccctgtggacatttctattttttgtaaagcggccgtaacgctttcgtaacgggctccgggtagttttgcggcgtcaaataattgttcgggataaagatatgagattgtacacaccgagaattctgtcgttttttcttgcgctgtgccccttccttgcggcggaggcggcgcagccgctttactccgtgtcgggaagggtgaccgatgccgccacgggcgaaccggtgacaggcgccgtagtcatggtcaaggatacctacaagggaaccgaaaccgatatggagggccgttggcgcctcgacaaccttgccgcgggggattatacgttcgccgtcagtttcatctcctacaagagcatcgaggtgtcgtgcagggtagccgccgatgtggagggggtggatgtccgcctcgaaagcgattcggaagaggtcgaagaggtggtcgtgaaggcccgtatgcggagcgacaccgagatagccatgctcggaacgataaaggccgttccgcaggtcacgagtggtgtttcggcggcccagatatcgaaaagccccgaccggaacgcttcggaagtcgtccgtcgcgtccccggcatcaccatcatagacgaccgtttcatcatcgtgcgcggcctgtcgcagcgctacaacaacgcatggataaacggactggccgtcccgagtaccgagacagacagccgtgccttctctttcgacatgattcccagcagtcagattgacaacctgctggtctataaatccccctcgccggagataccgggcgacttctccggcggtttcgtcaagatagtgaccaaaggtatccccgaagaaaacagcatcgaagtcggttattcgaccgggttcaatgtcaggacgcaattcaggcagttccgcatgaaccccggaagctgtacggatttcctcggtttcgacctcggcaagaggccgctcggccgctcgtttccggcgcacatggacctcgtcacttcgcccgacgagataacgaggctgacgagagaagggttcaacaacgactggcgcatccggagttttatccccatgcccgaccagcggctctccttctcgatggcccgccgctgggatacgaagcgcggccgtaccgtgggcaacatcaccgccgtcacatacagcaatacgtttaaaggagtcgaaggtatcaagaacgcccggtacggcatctactccgcggccgccgacacgcccatctatctcgacgattattatgacaaccaatattcgaacgatgtccggctcggagcgatgcacaactgggcgttcatcctcgacgcctctaaccgtatcgagttcaagaacctgctcaatatattggggcgtaaccgtctgaccgaacgccggggcatcaaggacatgagcagcatgtactatctcgaacagaccgagatgcagtactcttcgcgcctgacctatacggggcagttctccggcacgcaccacctggccggtaccgatgcgacggtgacgtgggatgccggttactcctatgccgaccggaacgaacccgaccgccgcatcgtctccaatatggccggtatcggaagtacggatgacctggcggatgtggtgacgggcaacgacaacatcaaacgctacttccagaccctcggcgaccacatcgcttcggcttccggcaactatgtgcagcagttggcctgggggggtatccgacccacgttgaaggccggcatctacggcgagtaccgttaccgcagctacgaccagcgcgagttcatctaccgttacgacaacctttccgccgaagagcggcaatattatctcaagctgcctttccaggagatgctgtcgcccgaatggctgggagcggacaaggtctatatcgacgagataacccgcaagaccaatgcctacaccgccgacatctattacggagcggcttatgcggcgctcgacattccgctcggaaaattcgatatctatgccggggcacgtctcgaaagctacaccacgaagctgacgcgagaccgttcggatgcacccgaacttatcctgatgaccaccaagacgcaccacgacctcaatctgctgccttcggtcaatgtcacttaccggatagacgaccggcatcagttgcgggcggcttacgggcgttcgctcaaccgtccggagctgcgtgagctttcccctacggtctattacgatttcgacctcttcagcgagatagccggtaacgagaacctcaggacggccgtcatcgacaacgtggacctgcgttatgaattctatcccgcaccgggcgagacggtgagcctcggtgccttctacaaacacttccgcaatccgatagagtggacctatatcgacatgggcggttcgctccgctatatgtatgagaatgccgaccgggcccaaagctggggtgtggagctcgatgtgaggaaaaacctcggctttatcggtatgccgaacctttcgctggtgctcaatgcggcgtggatatacagcaacgtgacctttgtgcccggcgaggtggtgtccgaacccgaccggcccatgcagggacagtcgccctacgtgataaacgcgggactctattacagttccgaacgactcggactcgacgtggcgctgctctacaaccggattggcaagcggatagtggggctgggcaagtccaacagcgtcaatcccgaccccaatacgctgattcccgattcgtacgaaatgccgcgcaacgtgctcgatttctccgtatcgaaaaggatagggcgacgggtgacgctgagctgttcggtgaaggaccttctctcggaggacgtggtgtacaagcagttcccgaagttcgagaaggacggacagatgtaccggcgggaacaggtcacccggcgctacaatcccggtcagagcgtatcgctgactgtctcggtaaagctgtgaacgatattcgacaggacagacaatagagaaaacaccaatttttaatcgaacagaaaaagatgaaaaagaacatcaagatggccgccgtggcatgtatgctcctctcggcctttgctaccgtaagttgcgacaagaatacggacaacggcggcgagaatcctccgcagggcgaaacgttcgaactgggcgacggttcgaaggataatttcgaaatcgcttccgacatgacgctgacctatccgaacgtctatacgctcaaagggttcgtttatgtgcccgacggtgtgacgctgaccatcgagcccggtgtggtgataaagggcgacaaggctacgcagggtacgctcattatcgaacggggcggcaaaatcatggcacagggtacgccggaacgcccgattgtcttcacttctgcccaggctcccggcagccgcaagcccggtgactggggcggtatcatcctgctcggcaaggcgcccaacaacctcggcgaacagaccatcgagggcggtgtgcgttccaaacacggcggtaacgacccggcggacaattccggcgtgctgagctatgtacgtgtggaattccccggcatcgaatactctacggacaatgaaatcaacggaattaccttcggttcggtcgggagcggtaccaaaatcgaccacctgcaggtatcctactcgggggacgactcctatgagtggttcggcggtacggcgaatgcgaaatatctcgtcgcctattcgggttgggacgatgatttcgataccgacaacggcttcagcggcaaggtacagttcgccatgggcgtgcgcaatccgaggataggggacaagtcggcctccaacggtttcgaatcggacaacaacggcgacggtgcggctaccgaaccctacacctcatgcgtgttcgccaacgtcagcctgttcgggccggtgtccaatcccgcatcctatactgaacaggccggcgccgagggtagcccggtcgatgcgagattccaggccgcgcttcatctgcgccgcaatacccagctcagtatctataactccctcatagcggctttcccggtagggctgattatcgagaacgacaaagggtctaccacacaggattgggctgagcagggcaaactcaacgtaaccaactgcgtgatggccggcatggtgaagaattaccaggatgcacagtattggaaggatggttcccagttcgacgatgaggatgcgggtagtttcgccgacggttatttcaaccgtgcggagggtggaaacagggtgttcgcagccctctccgacctcggcctcagcggcaatccgctcagcctttccgctccggtggtcttccccggcagcgacagtccgcttgcttcgggtgctgcatggacggaggagaaggtggcttcgggcttcgataaagtggactatatcggtgctttcggtccgaatgagaccgctgtcgccaactggacgagcggctggtgcaatttcgacccccagaatacggtttactaaacgtcggcaggttggtcaatttgtcggtgggcgggctgctgcggcggtccgcccttttcccgttccgcggcggagcttccggtgtgccggcaatgcatgcggggattgcgttccgtgcaggaatattacagcccgaggtcttcgtcaatcaagaccaccgtaatcctccctttcggatggcatttgtgcagaatgagccgttcgttgcatatccgtcggggcgatgcacaatccatgcaccggcccgttttcacgcacggcgtgtcgaaatcctcatgacgtgccgcattgcgtggggcggccgtttcgcggatacgcctgaaggcggcatcgccgtcctccacgattttgttccgaccgacggtcaggatgacgtgccgcggtccgaaggctatcggagcgatgcggttgcctatcatgtccagccaatgcagctccccgtcgagggtgacggcattcgcgccggtcaggaacaggtcgcataacagcgcctgccggcgtctttctatcagttccctgaaaggaacgccctgttcgaaagtgtcgatgaacggataggtgcgctgcgtccgcagccactccaccgtccccgtcgcgtagagcgtcatcgagtcgccgaaggagatactcgccggcgcgagttcggcgatgcggctgcggatgtattcgccggcctcgtgtgcgtcggctgctgtcgccacctcaaaaccgttgcgcctcagctgcgaggcgcaggattccattgtcgtgtggttcgcatccatgtgataatgtgtcttgtgacaggccgggccgctggaaagagccggtcgggatgtcgcgttcccgccctgtctatgaacggaatgtataaaaaaatctccacggagtacgcggagaccaggcctgagaccttcggcatatagccttattgtggtaagatgtagaaattcttacattgcaaatataagtaaataaggcggaaataccaaaattttttttacttttaccggaaacggaatctttatggaaaaaagactgggaatagatatgggcaccaactcgctcggttgggcgctcgtggagatgaccgaggaggggtgcgtgttgctcgaccggggagtggatatttttcaggagggtgtcgcgcacggaaagagcggcgagcggcctgccgtacaggaccggaccgatgcccgtgctctacgccggcattacttccggcgccggctgcgcaaaatcgcgttgctgcgggttctggtgcagcatgacttttgtccgcctctttcgcaggagcagttggatgcgtggcggaaacagggcgtttatccggtgaccgacgaattcatccgctggcagcgtaccgacgatgctgcggacaagaatccttatcgcgaccggttccgggcgctgaccgaagagctcgatttgacccgccgcgaagaccggcatgcgctgggcagggcgctgtatcatctgtgccagcggcgcggctttctgagcaaccggaaggatgccggaaacgagacggaggacggtacggtcaagacggacatcaaagcgctgtcggccgacatggaagctgccgggtgtacctggctgggcgaatacttttatcggctctatcagcggaaagagaaaattcgcagcaaacattatacggcccgcaacgagcactatttggccgagtttcgtgccatctgtcggaagcagcggctcggggaggagttgcagcaggcgctggagcgcgccattttctaccagcgtcccctcaagtcgcagaaaggacaggtcggcaggtgccggttcgagaagaaaaagagtcgctgtccggtgtcgcatccgcggttcgaggagttccggatgttgcagttcctcaataatgtacgggttacgggtcccggcgatgcggagtctcgtccgctttcgcagcaggagctggaggccgtccggccgctgttcctgcgcaagagcaaaccgcatttcgatttcgaagacattgccaaaaagatagcgggcaggaacaattatgcctgtaagggcgaccggacggaggcggcctggaggttcaatttcgcgcggggagcgaccgttacgggatgccctatgtcggcactgctggaggcggtcttcggcaacgaatggcggcgggagctgtgcaggctctatacgctcggtgcagggaagagcgaggagcggataatcgacgacgtatggcatgcgcttttcgccttcgagcacgaagagcggctgcggcagtggctgcaagagaaactgcaaatttcggccgacgatgcgaagaccctcgcggccttccgtctgccgcaggggtatgcgtcgctgagcctgaacgttatcaacaagatacttccctacctgcggcgcggataccgctacgacgaggcggtattctttgccaacctcggaaaggtgcttccggcggaggtgtatgccgacccggccaggcgccgcgaagtggagcaagggatttccgcccagatggatgatttgggcgacggagagaaaacacggaaggaggaacgcatccgcgactatctgcggctttactggggtgtggaagaggagcggttggaccgtctttatcatccgtcgatgattgaagcctatccgcaggcaaagcccgatgcgaacggcatcctgcggctggggtcgccgcgtactgcggccgtccggaatccgatggccatgcgtgcgcttttccgactgcgtgccttgataaacgaattgttgcgcgaagggaaaatcgaccgcggtacgagaatcaacatcgaattttcccgaaagttgaacgatgccaatatgaggaaggccatcgagcggtatcagcgggaacgcgaggccgagaaccggaaatttgccgcaaaaattcgcgaggagtatgcggctgcgacggggcacaccatcgaacctacggaagaagacctattgaaataccgcctgtgggaagagcagaaccatattgatttatattcggatacgggtaggatgatcggaatcgccgagtttctcggagctggccggacatacgacatcgagcataccgtaccccgttcgcgcgggggcgaggatgcgcagtacaacaagacgctgtgcgaagagaggttcaaccgggaggtcaagcggaacaagttgccgatggaacttgcctgcggtgaagagatatgggcccgtatcgaagcacttggctggccggagcttatcgactcattgcagggacagattgagggcgcaacgcgccgggttgacaatgcggtgaccaaaccggagaaggatgaggctatacagtaccgtcattatttgaagatgcgccgcgactactggcgcaggaagtgcgagtctttcaaaataaccgaagtgccggaagggttcagcaaccggcagggggtcgatatcggcatcatcggcaaatatgcacggcagtacctgcaaacggttttcgaccgggtttatccggtcaaggggagcgccacggccgatttccgcaccatgtggggattgcaggaggaacacacccggaaggaacgtgtgaaccacgtccatcactgtatagatgccattaccatcgcttgtatcggcaagcgggagtatgaccgttgggcgcggtacgtctgtcaggacgagcggtaccggaggggcgaggcggatagaccgcagcccgaaaaaccgtggccgacctttaccgaagatgtccgggcggtagccgaagaactgctcgtttcgcaccatacgcccgacaacatgcccaagcagagccgcaaacggctgcgcgtgcggggcagggtccagaagaacgacaagggcgaaaccaaatacatgcagggggataccgcccgcggcgccctgcatgagcaaactttctacggggctatcgagcgcgaaggcgaaatccgatatgtggtacgcaaatcgctcgaccagttactgccgaccgatgtggataaaatcgtggacgaaacggtgaagcggaaagtgcaggaggctatcgaagcattcggattcaaggaggcaatggacccgcagaagcatactgtctggatgaacaaggataaaaatgtaccgattcggaaggtgcggatattgaccggtgtgaaaaatccgattctcctgaagcctcatcgcgatgtatccgttaaggagtataagcgatattaccatgtcgtcaacgacgggaattactgcatggcgatttacgaaggcagagacaggcagggcaggttgaaacggacgtttgaaatcgtcaataaactggaggcggcccgttatttcaaacggagtgcggaccgggaatcccggcccgatttggtaccgctgtcggatgtcaacggttattcgctcaagtatctcttgaaaacggggacgatggtgttgttttatgaaaattccccggacgagttgtatgaatgttcggtcggagagttggctaaaaggttgtacaaggtcgtgggaatggcgcaggatggtcgtgtccagtttctgtttcatcaggaggcacgggaccggaaagccgttacggcggagtgtggaatgggaatttcggttttcgatgcacgccatcctgctccgaagttgaggataagagtttccaattttaaaatgttcgtcgaaggctatgacttcgaactgacggttacgggggaagtaaaattcaaacggtaattgcttcatggtgaaacgcgcgctgttcttttcgacgccttatagcctgagtcttcgggacaatcagatggttatccgtacgaaggaggcccccgacatgcagcggaccgttccggtcgaggatatcggggtggtggtgctggaggaccgacagacgtccgtgacgctgccgctgctgaatgcgctctcggataacaatgcggccgtcatcttctgcggcgacgaccggatgccgaacgccatgctgatgaatctcgattccaaccggacacagggcgagaactaccggacgcaaatcgaggcgagcgagccgttgaaaaaagggatatggcggcaaatcgtcgaggcgaaaatccgaaaccaggccgccttgctgcagaagttgggcaaagacggggagcggttgaagccctattaccggaatgtccgcagcggcgatgcggacaaccgggaggggactgccgccagaatttactgggcagagctgttcggccgggatttcgttcgtatgcgggagggagatgttcccaataacttgctgaattacggatatacggttctgcgggcggccgtcgcacggtcgctgatggggtcggggctgtttccggcgttcggcattttccaccgtaaccggtacaatgcctttccgttggccgacgatgtgatggaaccttatcgtccttttgtggacgaattggtgtacgggctccgtatgcagggcgagtcgcaactgacgcaggaggtcaaggggaccctgctgcggatactgttcgccgatacgcgtttcgagaaggtgatgcgtccgctggatgtcggcctgacgtttacggcggcatcgctggcgaaatgtttcgctggaacgcaaaagaagattgtttaccctttgttggagtgacaggatgtcggaagtccgtttgaatgcatatcgtatcatgtggctgttcgtgtttttcgatttgccgaccaataccaaaaccgagcgtcgtcatgcgactcagtttcgcaaggccctggagaaggatggcttttcgatgatgcagtattcggtgtacgtgcgtcactgcccctctaaagagaatatggaagtacatctccgtcgggtgcagaagtcgatgccgcctgccggatataccagtatcctgagcgttacggacaaacagtacagtgagattcggaactattgggggaaaagcgaacgggcccggcccgagatgcctcagcagctggaatttttttgatatattgctctttgaaatacgaaattacatccgaccaacttccccggtgtgcggcaggacgttttatgcatcggtgtcatatgtgtaacgtgcagaatatgaattactgccatgcgcgaggttgtggtttgatgtagaattggaatgagaaacaaccgggaagaagagatagaaaagaaacgaatcgttgtggtttgatgtagaattggaatgagaaacaacaaagccccgcatcatccgtcaggggggcatgttgtggtttgatgtagaattggaatgagaaacaactggcagtaattaaatcgggcataatggtgggttgtggtttgatgtagaattggaatgagaaacaacgaagacaacgcgatagtgcgcgcttccaacgttgtggtttgatgtagaattggaatgagaaacaacgctggcaaacggtatttccatatactcctcgttgtggtttgatgtagaattggaatgagaaacaacgtcaccgccaagccccagcagcatgcgcgtgttgtggtttgatgtagaattggaatgagaaacaacttcctcccagaattccatggtggtaggtacgttgtggtttgatgtagaattggaatgagaaacaactcgcggcgtggaacggttcgcgccctgggtgttgtggtttgatgtagaattggaatgagaaacaacggcgattctgtccatatttactagtaatcgttgtggtttgatgtagaattggaatgagaaacaacccgtgcggcatccgcacccaatccgctcgaagttgtggtttgatgtagaattggaatgagaaacaacatatcttcaatctcctgttcggccgatggagttgtggtttgatgtagaattggaatgagaaacaacaatggaaaaggcactatcgcgtatcagcaagttgtggtttgatgtagaattggaatgagaaacaacgtggagagtgtagaggtggtcatcagtgaagttgtggtttgatgtagaattggaatgagaaacaaccagcctgcagtcgtagcccagcttgcaatcgttgtggtttgatgtagaattggaatgaggaacaacaaccggcgttcggctgtttttaggaagaattgacagaccgggcgtgcccggatgtcatgggggggacggttgaggctgcggtctgccattgctgttcaggttggcgggagcatgttgcctgcggaaggaaaatgtgtgccggatatctgtgtacaagatgtatcggaatataccggtaccttcggattttgcggataatcaattaatctttatatttgcacaccctaacgacgcccggatggcggaatcggtagacgcgctggtctcaaacaccagtggagcaatccgtgccggttcgaccccggctccgggtacgcttgatgatacaacccagctgatattcagttgggtcgtatcgtttaagaggagatgtagaacggtttttctttgcggtaccattgcctcgaccgtttggcaatctctgtgggtgccggattgtacaatgttgctaaaacggaaactccggttccccgcggacaaatatggcgaggagccggagtttcccgacgatattactggattagaatccggccgtgaaatagattccggcggggaagtgcgtgtagttccggtagtctgcaaccattgcgggcgtatccgaattgaggtcgtataccgagatatcgttcgtgaggaaactccagccgtagcccagaattgtattgtagtagtactcgcccgtgacggggtgtacggccggcatgttgtaaattataccccagttcacgacgttcggcttcacatcgcccagcgtttcggtcgtattcgtggagaacgtgtggcggtagattgtcgaggtattgttgcagaaatagatttcgtcgcctttggcggaaatagccggtgtcgcaccccagcctgccgagacgccgccttcggtcagggtgtgtttctccatcgtgtagtcggtggctgacaatttgatgatttgggccggactggtcgaacaggaaacccatacgtagccctcttcgtcggacttgatgacgccggtcaccgtaccctccattgctatcgtttcggcgatgttgccgttttcgagtatcagtaccttgctgttcgccggaacgaacaccttgtctccgacgaccgccatccggtttttcagggcgccggccgtaccctctatctgtttgaggctcctcgaatcgaggtcgagggtccatacgccggcattgtcgcggatgtaggccgtgcgaccgaccacagccacatgggaaggccacgagagcgacgagcaatcgtccttgctgaaattgtccgtgcgtttgagcgttctggcatcggcttcgaccagcataccgtcgttacctccgttctgcgatacgatatacagtttgtcgtccgctatgaacaggtcctgagccgcgttgccgagctcagtaccgttcatgcgccagtaggcgtagttgatgaggcgtccgtcggatgtgatgtaaatgaccgacccgttgtccgacgacggattgccttcgttgagaacgaatgttccctccgggtcggagtaatccactgccgcgatacgtgccgatgccagcgtcgtccgctctgcacggtcgatggcgatgagtgaaaggatgccttccgtatagtaggagctgccggacgccggggccgttaccgttaccgttttggcatgcgggtcgagtttggccgaccatccctgcggaacgtgcatcaggtcgaccgtcgctacatcgcccgtaaacggaagttcgcgctcttcaccgaatgcgaataggtagtaattgtccacattggtgccgcccctgggcagggtctcgggaaagacgaatgcgaatccagccgtcgaagttttcggtatgacaatggtcgtcttcccgtcagagagcgtgaaaaccacttccgtatcgccgtcctccaccttcgagaacaacgagtcgccgtcctgcccttcggctgtgacgcccatcggcgtccaggtcgtgccgtcgagcgacatctcccactctttcgtatcggaattgatgcgtagctgcggggtgatgccgtcggaaccttcggcctttattttccgcccgtcgatttcgatgattcggccgtcgagcgcccagtagtacagcccgtcttcgtcttttatgaccgatatggacggagcattggttccgttggtaatcgttgccgtcgtgccgtcggaaaagttgatggtataaccgttttcggtctcgattaccgaagtgactgtcatattcttttgcagtgcctccaccagtttccgaagggtttcgatgcccgaattggcatgcctgaccgcctcttccatggcttccacgcggtcgttcaggtcatcgaccgcttcccgcagctcctcgtcgtcgtatggggaacagctccacattgcggcgccgaacaggacaaccgccagacaggtaaacagttttttcatgtcgtttatgtttaattgaaagattgaatgagtttcaaagacgaaaaaaggccgataggcggatgctggtttacggcaggtgtacaacgaaccgaagccggaaaaggagagggacgcaggaacggagaccctttcccggaacgaacgtcgatagggtatgtaagatttcctcgccattcggattacgcaggtgactgcatggcgggaggggatgaaaatcaaatcggaaaagtgtgccagagggccgaccaagccattcgattcctacccgaaacccgcgggtgcaaatccatgtcgttaaggcaggtcttctgactcgtcccgttcaccgcgccttcccggtatcgaaaccagtggcaaagagtgcggtaaacgacttctcccgaaggaggggacatacagcagcgagtactgttccggattctcaccggattcccttttcatccggtgcggaagcccgaaccggaaccataactgcgcaaaggtagcaatcttttttgcgagttgagatatgaaacgataaaaatcatataagccctcttcgaaagggaaaggaggattcatgaaacgatgtccgaccgcaatcgtaggggcggcaggggaggatggtgcggaaccgttgtcgtgtctgtattcgaacggacgggcgaagcttctcctgcttgtcgtcggactccggcgcagcatcgggaacggactttctctttgtccgtactgcggatggtcgggggccggactgccgggaaagtcgtcgggacggttcaggctttttccctgccggcggctttccggatagctgtcaggataccttccgtgtcgtagccgcaaatccgtttcagttcggctatcgtgccgtggtggatgaaagtatcggggatgccgagccgcacgacctctgcggtatagccgttggcggagatgaattcggcgacggcgcttcccacgcctccctccacggtaccgtcctcgacggtgattatccgccggaaccgccgcccgacgtcgtgcagaatagccgtgtcgagcggtttggcgaaccgcaggctcaccacttcggcggagattccctcctcctcggcctgtactgcggccttcagggcatcgttggttacggtacctatcgccagaacggcgacatccttcccgccgcgcagggttatcccgcggcctatctccatccgtcggaatccgccgctccagtcggctcctatcccccggccgcgcggataacggatggcgaacggtacgcccgataggagcgccgtgtacatcatctccttgagttccgcctcgttggccggtgcggctatcgtcatgttgggcacggagcgcatgaaggcgaggtcgaacacaccgtggtgcgtcactccgtcttcgccgacaaggcccgcacggtcgaggcagaatatgaccggaagccgctggatggccacgtcgtgaatcatgtggtcgtaggcccgctgcatgaacgacgagtagatattgcagaaaggtatcaggccgccggccgccagtcctgccgagaaagtgaccgcatggccttcggcgatgccgacgtcgaagcatcggtggggcatctcccgttgcaggatatccatggagctgcccgtgagcatggccggtgtgacgcctacgacgcgttcgtcgaggcgggcgagttcgaggagcgtataaccgaatacgtcctggtagcggtcgggctggttgtcgcccggattgacgagcagttcgccggtgacgggattgaacctgccgggggcgtgccatatcggcgggttgctttcggcaggtttgtaacccttgccctttttggtaacgacgtggagcagtttcgggcccggaatgctccgcatgtcgcccagtacccgtaccagcgacttcaggtcgtggccgtccacggggccgaaatagcggaagttgaggctctcgaacaggttgctctgcttgagaatgctctgtttgacgacgttgccgaaattctgtatcgcgcgccgcatccgggggactcccgacatggcgttccatacccggtttttcagccggttgtagtgttttgacgtggtgatgccgagcagatactccttcagcgctccgacgttgggactgatggacatgttgttgtcgttcagaatgaccagcatgtccgcattggatgctccggcgttgttcagcccctcgtaggcaaggccgcccgtcatggcgccgtcgcctattacggcgatgacgttgcggtggatgccctgcagtttgttggcctgggccatgcccagtgcggccgagatggagacggaagcgtggcccgccccgaaagcgtcgtaggggctctcctccatgcgcggaaatccgctgatgccgcctaacttccggttcgtgtggaactgttcccgacggccggtgagtatcttgtgggcataggcctgatggccgacgtcccagaccaccttgtcgtccggcgtgtcatagacgtaatggagcgctatggcgagttccacggctccgagactcgatgcgaggtgtcccggattcacgcagagttccgataccatgaagtctctgagttctgcagcgagcgtttccagttcggggacggagagtctgcgcaggtctttcggagagtttatgtcgtcgaggtatttatagcccgtctttaccatgagaggagtgtacgtatcggggtacaaagatacccaattataactatttctgaaaaaaatcgtatcttcgtgtcgtataacatccgaggtaggctgtaagatgaaatataagagaatattgctgaaactgagcggcgagtcgctggccggcgatggagagtacggactttcggccggggtactcggttcgtatgcgtcgcagatacgggaaatcgccggggccggcgtggaggtcggcatagttattggaggaggaaacatattccgcggcatgcagggtgcggagaggggattcgaccgtgtgaagggcgaccagatgggaatgctcgcgacggtcatcaactcgctggctctggaatccgcgctgcgggcggaggggatgcaggcgaaggtgctgacttccatatgcatggaaccggtcggggagtattactccaaggacaaggcggtggattacctgagcaggggatacgtcgtgataatcggtggcggaacgtccaatccctattttacgaccgacagtgccgcagcgctccgcggcatagagatagaggccgacgtgctgctgaaagggacgcgggtggacggcatttacgatgccgacccggagaagcatccggaggcacggaaattcggcgagataactttcggggaggtgtatgcccgcgggcttcggattatggacctgacggctttcacgctctgccgggagaacggcctgccgatagtcgtcttcgacatggatacgcccggaaacctgcgcagggtagtccggggcgaagcgatagggacgttggtgagggaatagccctgcccggccgagaggaaggatatcactttacaaaaatacgattgtttatgaagagaatattgtcaatgctttttgcggtgttgttctgttgcggtatcgcgtccgcgcagggcgacgtggagcggaccaccctgttgaagaaggggatggatgtgcccgaattttccgtacggatgctggacggtacgacgctgacttctgccgagctggagggaaaggtggtgctggtgaatttctgggctacgtggtgtcccccgtgccgcaaggagttcacacggctgcaaaaggatatcgtggaccgtttcgaggggaaggatttcgtacttctgccggtatcgatagatgacggcgaggaggccgtcagggagttcatgcggaagaacgggtacgaatttccggtagctttcgacggggacaagaaactttacgggatgtttgcggagaaatacgtgccgcgcaacttcatcatcggcaaggacgggaagatagctttccagacggtcggttatacgcccgacgaattcgacgaaatggtcaggggcatcgaggccctgttgaaatagaaaacgggacaatttttgattcaagctacataaaaccttaacgtttatgactgaagaagcaaccctgatattggacattgccgaggagaagatgaacaaggcgcttgagcatcttgtcgaggcgctgctcggaataagggcgggaaaggccagccccaatgtattgaaaggaatcatggtggattactacggttcgcagacgcccgtttcgcaggtggcgagtgttaccgtgcctgatgccaaaacgatactcatccagccgtgggagaaagggatgatacccgtaatagagaaggcgatactcgtgtcgaacatcggattgacgccttccaataatggtgagcatatccggctttcgattcctgcgctgaccgaagagcgccgcagggagctcgtgaaacaggtgaaaggcgaaggggagacggcgcgtgtgagtgtccgcaatgctcgccgcgaagcggtcgaggctttcaaggcagcccagaagaacggtatgcccgaagatatggcgaaggacggtgaggcggaagcccagaagctgaccgaccggttcagcaagcagatagaggaggcgttggccgagaaggagaaagagataatgaccgtatagctgcggtcggcagctccgtgaaaagcaatggtcgcgtgcgggaatctcctgctttccgatgtctgtcgctggaagaggccgggttatggattttctatctttatccggtatttggcaagcagacccggcagggaggactgagaaaaacgcgcaccgttgagccggttggtttccgggtcgatagtaaagccgaacgaagtcagaaaatccgcatttctcaggtcgttgtcggtaaaggaggagccctgcatgtcgcaagcgtcgaagagaacgcctttcaggttgcaggattcgaatgcggtatcgtgcatgcggcactgccggaaaacggcatcggcggtgatatgcagaaacaccgcattgtcgaaaatacactccgtgaaggatgccgacagtctgtgggtgctgtttttctctccgaatgatgtcccggacatcttgcatccggagaatgtcaccccgtccattgcggtgttcgcgaatgcggagaggctgaaatcgcagccggtgaaacgacagtcgagcaggataatgccatgcaggagcagcgccgtgaaggtgccgcctccgaatacgcatttgtcgaatacggtaccttcctgaaaaagggcgtccgcctcgttttttccgaatgttc

SEQ ID NO: 2025 - DNA, 23648 bp, synthetic construct
  source 1..23648: mol_type = other DNA
  misc_feature 1..23648: note = Synthetic
catacaggccctccggttcagccgtgaaaggctgcagggcatcgccgctttcgtgggcgaaccgggtggcgggttcgaagcggacgcccgttcctgggctggacacgtccacactctccgcatggtccttttgcagcggggcggccaattccacgtgccccagttcgggcggggtgggcggcgtcggttcgccgaaccgacggatgcgtttccgcgccgagaccagcacgttcttgacgacggcgatttccttgcggtcgccggtgtcaatggtaatctcctgaccggcaaccagatccgctgtcgtatcgatgaagagggtgttgtcgcctgccttcgcaggcctggccagattggtttgcgtggcgggcgtacccacctcggttaccgtgacgagttcataggagccgcccaggccgatgccgagtttctgcccggccgcgatgccgtcgacggacgtcgccgggaggacgttcgtgccggccgggaaggtgagaatgggcccggtggataccgggatgaagagcgtcgtcggggccggcacggcttccggggcctgcttcagcagcaggaagccgccggcggcgagccgggtgccttccggcagcgtcagcgcgcggacggaggcctggccgctccggcgcacgacgagttccaggccggaaagatcggcctcttcggacccggcgttgtacagctcgacgaacggctcgaggccttcgcccgccagggcgagttcattgaccttgaccgcctcggcgctgcggatgcggctgccgatggcgagctcgccgcctttccaggccgcggagaaacccgcccatccggcggagcgtccttccggcgcagcgagcgtgaacatggctgtgacctgctcgcccggagcgaccgttgaaggaagggtttctccttccgaaatggaccaaccttcagggagggaaggcaggatggacaggtccttgacgggctttcccagcgtattttcgaagaaaacgccgacctgggcgctcccgcctggggtgaaggtggtgatgcgggagaggctcagcggataggcgctgtatcccgccctggcgatattcttctgcacggcggcgatggcctcttcggtgggatatcccacggtcatgacgccctcgaagaaggtgccggcggatccgtttccattgtcgccgccgttgcccatcagcatgccgcctttcttgtgcatcgggtagtaggtatcttttccttccttgctgtgggggcgcggaccgctgtagaagacggtcagggtgtcggaggaagcatcggcgccgcggaggtcccactggtttccgccgccgccgttcacgaacaccgacacgaagcgccagtccgtgatggacgggacgtcgttctgtttggggtcatagcccgagaacaggccggcttccatgtcggacatgatccagggaccttcgccgttgccgcggccccaggcggtggaggtgccatagtaggtggtctccatcgtgccggtgcccacggcgcggccgttggtcgaggaattgccgtagtcgaagcagcagccgctgtcgtaatggtttccgtcgatgacatagtacatcccctccggctcgtcgtccacggcgagaccgcgggcgtcgttgcagcggtagcccatgccgggcatgacataggctccgtagaccttctgcccgccgaggagggcgggggccatgtcggcgatggagcgggtgttgaaaccgcccttgtccggtccctggaacgttcccggaggcgccggcagcaggtcattgcccatcccggattggtcgtaaatcaccgagatgtagcacacggagcctttgcaaaaggcgtcctgcgccgcggcatcggcgataccgttctttccggcatagatgtccagcgccgcaccgtcgctttcgcggaccacctgatacagcgggccgctgtacttggaatagagcaggcgcgtagtactatgggcggtgacgcaaggcgtgccgcctttccgataaatgtcgcagggaccttcccggaacccggcgagacggttgcaggcaaggatcgccccgagaagcactaggcatgaggcagaggagaagagaatctttttcatcgtttcagggggattgttctggaccagaagcaaatgtaatcatttttgtcaaactgtttttaactttttttaattatctttgcgaagcccatttagacgaataaacatcgacctacgttatgtcttaccagaagttcttcaatccggaggagtcattctcccgttcagagatagaggcttaccagctggagcggctgaaagccaccgtcaagcactgcatggattcgcctttctacaaggagcgtttccgccaggccggcctgacgccttcggacatccagacgcttgatgaccttaagaagattccgttcaccaccaagcaggacctgcgcgaaacctatcctttcggcatggccgcggttccgcttgaccagtgcgtccgcctgcactcttccagcggcaccaccggcaatcccacggtcatcctgcatacccagaaggacctggaagaatgggccaatgccgtcgcccgctgcctgtggatggtgggctgccgccccgaggacgtgttccagaacacctccggctacgggatgttcaccggcggcctcggtttccagtacggcgccgagaaggtcggcatgctgaccgtccctgccgccgccggcaacaccctccgccagctcaagttcttcacggacttcggcaccaccgtcgtacacgccatcccttcttatgcggcgcgcctgtatgaggtgatgtgcgagaagggaatcgacccccgcaaggacaccaagctccgcaccctcgtgatcggcgccgagccgcactccgaggatacccgcaagcgtatcgagaacatgctcggcgtcaaggcctacaactccttcggcatgtcggagatgtgcggccccggcgtcgccttcgagtgccccgaacaaaacggcatgcacatctgggaggactactacatcgtcgagatcgtcaatcccgataccctcgaacccgttccggacggcgaggtcggcgagctcgtgctcacgaccctcaagcgcgaggcgatgccgctgctccgctaccgcacgcgcgacctcacccgcatcctgccgggcgagtgcgcctgcgggcgccaccacctccgcctcgaccgcatgaagggccgcagcgacgacatgatcatcctcaagggcgtcaacatcttcccgatccagatcgagaccatcctgatgcagttccaggagctcgcctccgactacctcatcacgctcgagaccgtggacggcaacgacgccatgaccgtcgacgtggagatgaaggacctcttcatcgacgactacagcaagctccaggccctcacccgggagatcacccgtcagctccgcgacgagattctcatcacgccccgcgtccgcctcgtgcccaagaacaccctccccaagagcgagggcaaggccgtccgggtcgtcgacaccagaaagaaatactaaaacagccgcataaccatgaccgtccatcaattatccgtcttcatcgagaacaagtccggcgccctcgtccgggtgctccggctgctcaagcaggagaatatccagctgatcgcctccaccatcgccgacaccgccgacttcggcatcttccgcatcatctgctccgagcctgaaaaggcttgcagcgtcctcaaggaagccggtgtcgccgtctcgctgtgcgaggtgttcgccgtcgaactcgacgaccgtcccggcaaggccgccgacgccatcgagatcttcgccagcgaaggcatcagcatcgcctacctgtactccttcctgctgaacggaaagggcgtcctcatcttccgcacggacaatgccgaaaaggccgcggaggtcatcgcctccaacggcctcagcgtcatcgaggagaaggacctctcccggctgctgtagggtcttatttcattcgagaagaatttaccagacgaaagggattactttgtacttcaccttccgcttgtactccttgtaaccctccagcccttcttccaggactatctcttcattcttgatccgcttggcgatcagcggaatatacagcaacatgatcaggaaagagaggggagaggccagcaccaggggcatggccaggaacaggacggtcgtggccatgtacatcgggtgccggacgactccatataaccccgtgtcgatgaccttctgattttcctgcacctcgatggtccgggacaggaaggtgttctcccgcaaaacctccgcgtagagcagatagcagaccaggaagagtcctgccgatacccaaacggcccagtccggcagcacgcaccagccaaaacgccaattgaggcccgccacgacgaacgcggcgacaaacaggaggccgctgagtttcacgaccgtctgctgctccttctcttcttctttggcgttcagccgcttgcgaagcaggtccggattcttcgccatcatgacgaggccggcgcagaacatcggcacgaacagaatgcccatcagcagccagccttgccaataccgaagcgaacccgccggcaggaaaagcagcaggccgatgacgacaaccccgagcagaaacttgccgagggcttgcaggaagagtccattcttgtccatggttgtatttaattctgaattgtgcagaccatcaaatactcctcctcggtttctttcagcaccttgaatcctgccttcagatacattccgaatgcataattcgccttctgaaccgacagggagacctgcggataaccgttccgccgcaacagcagaagcatctcccggagcaattccgttccgatgccctggccgcgatagtctttatagagggagatggccaatgaagggatgccttcggcgatatggccatagtcgttcatgacccgtgtccagacggccccgacgactatcccgtcgacctccgccaccaggcatcggtcatcggccttcatcccgaaatcccggacatacacctgcaggccctcgttctcgatgatggatctgggcggtgccggaacgccttccggtatgaagatggcctcatacaggaagtcattcagcaggggaatctcctcggagcgtatctctcggattacggattgcttcatggaacgaagatagccacattcggccatatctccaaagcgtcctttctgtgaagacgaaaaagccagccctaaggctggcctgtttagtagaccaaacacataaattctcgaaccttctagaagacatccggaaggtggatagatttgcgcaatatattgaaagtcaggaaaatgggaatttgacggaaatggagggctcacaaatgaagtcctccaaaatgtgaaaatagctacacttttaaagaccgattacagcctcgcgaatccgcgtttttacgtcttcccaatccgtctcctcgaacatgaagggcatggggtcggattcggcgtcttcgaagtaggtgaggcttttcatagcgatgaagagagtgccgtccggatacttctgcatgtagagttccaaaagctcttgcaaagtgaacgagcggagtaatatgtcgatatcaatgaaatcctttttcgtacctctgccgatgaccgccgcaatcttcatcgcggcaatgtccttgatgctcgcaagggtaatgccggaatcaacgaccggctcttcgatccaggaataccggtaattgacgaaatcgaccttgaccccatcgaccagatagatgtggatgttcttggattccttgacgacgctgacccgatgggattcctccagggcttccctgatttccagcgggtccgtctcaatcgttccgaaaaggtccaggtcgacggatttccgatgccccaactgaagcgccagggccgtaccgccgacaagacggagaccttggaacatcggcatagactgcagcgacttcagaagttgcagtgtttcgggttcgattgtctggtattgtagcatcggaactgctcttgaggggtccgggagatggtactgatgaaggaaagcgcacggggctccagggaacggaggttcttggaaatgctcacgatttcatccagaccataataagccagaagaagcttccaatcactaatctgcccatattccaacacccgctgaacgacatagggagcatgctgggaaaggtcaatctgattccggtcaacatcccagaagatgctgtccgtaaagccctgtatgcattcctgcctcgacatacctcgcaaatgtacgaaaaagatgggaagttcacaattagtgaatagtcgattcatctcctcctcaaaaagtggcattctcgtggatgaaaccttcaaaatgaacaactcttcctcaaaacaatgcatttttgaggaagagcagggcccacgaaaacgaaaaagccagccgtaatggctggcctgtttagtagcggaggcaggactcgaacctacgacctccgggttatgagcccgacgagctaccgactgctctactccgcgatgtggagtgcaaaggtaggtagggactttttttgacgaaaaagtgcgaccaaatatgtgccaatgaactactggtcgcaaataagttcaaaaacccgcgaccaagggtctttattgatcaaacaaccggactaaaagagttgatgctattcgcaatttctgttcctgtgtttgtccgtccacaaaggtcgtcaatctctccgaagaatccaagatggcattgtcggttttttcaggaagtcggattgtaataggattgggattatgcaaagttttcgattcctcaaaaacccaaatcacaatacattcttcgttcctgtgaaaatgcttctctgtaatagatactatgaccgtgaaatagcctgaggatagcggttagatgtggctcttatacaaaggtaaggctatagaaggaagatacaggggcactttaaccaactcatttataaaagtcattatttataaagattgtttatctttgtatgctcttaaatttttcagtttggtgatttctatacaattagagataaacatatcctcttgactcttacagaatatgaaacggttcttcttagctttgactgccttgatcggtttttctgtcgcattctattcttgccaaaaggctccttttcttgtggttaacactccaggtagtattaacttcacagaacaaggcggaactcagaaggtttcatttaccacaaacagggactggaatgtttcatcatctgaatcttggtgtaagatttccccttcatcaggagtagtccaagaaggcgagttatccttcattgttacatgcgatcctaacacgacgtatgacccccgtaacgctaccgtgacaatcaaggcggatgagttggtagagaccatatcggtgacgcaggatactaatcttggtttgcttgtaagtcagacttcatttagtgtctcaagtccagagcaggctcttgaggttgaagttaaagctaacgttaactatgttgtagacatccctgcagattgcaaagactggatatctcacataagtacaaaatccttgacatccaggacactcgttctgaaaattagtgagaataaagcttatgatgatcgtacagggcaagtaacgattaggcagactgatggaccgctggctgagactattaccatcaatcagaaacaggcagaaggtttgttcattactacgccggaatacgaactttcaaatgaatcacaaactataaatgtagaagttagggctaacgttcaatatgaagttgaatctcaggttgattggattaaactcattgaaacaaaagccctatcgtcttcaacagtagttttgtcaattgaagcgaacaacacttatgataatcgaactgggatagtgcttattaagcaggtaaacggtcttcttgaagggcgtattacgataacgcaaaaacaaagggatggcttatttgtctctccgtcaagttttgaattaaatgatttagagcagtgttttgaggttgaggttcaaagcaatgtcgatttcctcgtcagtattcccgatgatgctaaaggatggcttaatctagtatcctcccctataaccaaggggttgtcttctaataagtttgttttttctgtttctaagaatacttcacttgaaaacagagaagctcacatagcattcaaacaggttaacggacccctttgtgaggaagtaattgtttatcaatataaaccacttgtagatctgagccataatggccatgcaaactgttatattgttcattcgccagggtggtatagtttagatgcggtacgaggaaatagtgacgaacccatcatcggtgtttattctgtaaaagtgatttgggagacatttaatacaatcactaaacccagtataggctctattataaaggaagttaaaatagttgacaagagtgtcgtttcatttttaattccacaaaactatcatgagggtaatgctttaattgctgttagtgatgcatcaggcaacattttgtggagctggcatatttgggttactgattataatcctgattctaattattgtagatatctcagtggtgctataatgatggatagagatctgggagcactttcagctaagccagaggactcttttcttactaatggacttttgtatcaatggggaaggaaagacccattcttgaattatgctggttgttctggaccaagagaatcacatgattggtttaaggcaaaatcaagcacggatgttgaaaatgtagttgaaacatcaaggactacaggcaccattgagtatgctattcagaacccttcagttattatagtagggaagggcgcttctgaaatggattggttgttttatgaaagagataactctttatggcaaaagaacaagacaaaatatgatccttgccctgttggatggagagtaccatccggcgcagaagaggattcttggatagattcaggcgcgaattcaaatagtgaatgggcaggtttcccggagaaggtgattgatcaatgggatgaaaaaaacatggggattcttttcgctcccccctattctactccggcgacgtggtatcacattaatcaaggagcaataaacacttacgacatgaacatgtggacatgctctactgaaaagcgttttgcaaactatgtcacatttgatgagtggacccaaagatttacatggtggtattttaatgggaatggtagatataatcgattctcaattagatgtacaaaagagtagattggctattactcgctattagtagctaattcttatctcgtttaagcatctggcaagacgcgttcttttatttcattatcaccatccatagttataaaaaggctccctgaaccatccgagagcctttcttatcacatcaaatcaagcaaataaagaggatagatacaggtagcgttccatccctatctgctattataattaacgcataatccgcgaaaaaaaagaaccgctacccaaatcttccttcatgatgggtctaagcggttctttttggtaaaaaaacggtcaccccttccgagatgaccgtgggcagacgggcccggcgtcataatgacgctgtatttctttcgcaaatatagcaaaataaatgcagccactccatttctgaagcagctgcagttgcccggatttacccttagtgatgaagcatagtagcctcatttcctgtgtggtccaatgcaaagataagaaatctacagattcattaagccgacaacaagcaattcataccagctattttcgtcgtttatcaagacctttttcttatatttgttgaaccgaccctacattcttcagcttttatatccaacggataaggaagcggaacaataaaggtcccacggagtacgcgggaccataggataaaatccttcggcatatagccttattgtggtaagatgtaggaatacttacaatgcaaatatagcgtgtttttatgaaaacgcaaaccaaagagaaagtattgggtcttgatttaggaaccaattccatcggctgggctgtgattgggcggaatgatgacaattcctgtgtcctgctggataaaggtgtccatatctttcaggatggcgtcgctcatgacaagagcggcgagagacctgctgttcaggaaagaacggctgccagggcatctcgtcggcattacttcaggcgcaggttgcgtaagatcgagttgcttaaggtccttgttgagaacgggctgtgtccccatcttaccgatgaacagctgaaggaatggaaggagaagaaagtctatcctctgacggatgatttcatgcggtggcagcactccgacaataccgaggacgggaatccttaccatgatcggtatgctgctttagcccgtaaactgaatcttgccgatattcgcgacaggtatattctcggaagggcgctatatcacataaaccagaggcgtggtttcctgagcaatcggaaggaatcaggacgcgactcggaaaacggaaaggttatgaccagcatcagccatctttcggagcagatgagggaagccggttgtcagtatcttggagagtttttttacaagttgttccgtgatggggaaaaggtccggtgccgttatacagcccgggaggagcactatcgtgccgagttcgatgcaatatgcaggaagcagggactggaagatatgctgaaaagatcgctggagcgagcgatcttctaccagcgtccgctcaagtctcagaaaggcactgtcgggagctgtagttttgaaaaagggaaaccccgctgcccggtatcccatcctagatacgaagagttccggatggcgcagtttatcaattctatcagagtaggcagaccctatgagaatgatttctcatgtctcagtgatgatgaaaaagaagcaattcggcctttattcttcaggaaaagcaagccggacttcgagtttgaagatattgctaaaaagattgcaggtaaagggaattatgcattcgcggatgatggtcgggaaaaccagtaccgcttcaactaccggatgtcggtcagcgtctcggcatgtcctgtcactgccgccattatcaatgcccttgaccttgattctcccgtagattgggaaatcgtcctgtgctccgtgtacaccaaaggcgagggtaagacatccgatcagattctgaatgatgtctggcatgcactattctcttttgatgacgaatcgatgctatccagttggttgcggtcttcactccagttgacggaagagaaggctgatgcgctggcaaagatccgtatgccgcagggatatgcttctttgagcttgaaggccatcaacaagattcttccctgtcttaagaagggctacatttatagtgatgcggtcttctatgctaatcttcccgctgctcttccgccccagatatccggcgcccctgtaaagatggacgatgtcattgaaaatgtccgggtaatcctcgatgatttctccaaggatccgacaagcagggagtcaagcaagatcaagaatatctcagattatcttcttgggctggcagagggtgtgcatccggaaaggctataccacccatccatgattgaagcttatcaggcagtattaccggatgagaaaggacgactgcatcttggctctccgcgcatcgactcggtcaggaatcccatggccatgcgtgcactattccgcctgcgtgccctgttaaactctcttctggacgagggtgtcatcgatgccgataccaaggtgaatattgagttcgcaagggagcttaatgacagcaatatgagaaaggccatcgcggattggcagaaggagaaggagaaccagaggaaaaaggactccgatgaaatccgtgctatcatgggtgaaaactatgagccgacggaggatgaccttttgaagtaccggctttatgaggaacagaaacacgtctgcccgtacactggaaggcagattactccaagattgttcctcgggaacgcactcgaattcgatattgaacacacagtcccgcgttctcgcggcggggacgattctcaggcgaacaagacactgtgcgacagccgattcaacagggaggtcaagaaggcgcaattgccttccgcgcttgaagggcatgaacagattttgcaacgaatcgcggagtggaaggatactgtcgaaagtctggaggttcagatgtccatcctgcgtcggaaatgcaaaagcgcgtcatcaaaggacgagaaggatttggctatccgccggcttcattacctgaggatgaagcgggactattggaaaggaaagtatgatcgttttactatgacttcggttcctgaaggattctccaaccgccagggtgtcgacatcggtattataggccgatatgcacgtatgtacttgaagacaatgttcaaacggatctatgttgtgaagggtgccactacggctgatttccgtaaggcctggggtctccagggtgaatatgccaagaaagagagagttagccactcgcatcattgtattgatgcaataacgatagcgtgtatcggtaagaacgagtacgatacatgggctcagtatatgcgaaaggaggaagactaccggttcggcaaggggactaagccacacttccagaaaccatgggcgacctttaccgaggatgtgctcactgtctcctcaagtcttctcacttcccattatacgccggacaaccttcccaaactgggtaagaagaagatccgtgtgcgcggtgctatccaaagaaatggagatggggagcccatgtatgcgcaggggcataccgcccgtgcactccttcataaggatacgttctatggagcgatcaagaaagatgaagaaatccggtatgtgattcgtaaggctgtcgactcacttgacgagaaaaaggatgtccccaggatagtcgacgatgcggtacgggagaaggtgcaggaggccattgccattcacggcagtctgaaaaaagcagtggcggaaaccatctggatgaaccgggaaaagaatgttccaatccgcaaggtaagggtatatgcaccgacaatcacttccccaatagcgcttaaggctcacagagatcaatccgacaaggagcacaagcaaaaatactatgtggccaatgacagtaactactgcatggctatttacggtgacgaaaaaccatccttcaagttgttcaacgctcttgccgcagtgaatcatttcaacggtaagcaaggagagtgggtcgagacgcatgacgcgaagggacgtccactcaggtgtgtcgttagacccggtacgatggtcctattctatgagaaatcgcctaaagaattgtacggttgctctcaagaggacttatcaaagcgactgtatgaagtcacaggactttcgtcaatgactattcaaggaaagtatcattatgggacgcttaccttgaaacaccatctggaagcgaggccatcgacggaattgaaagagaagaaaggactttgggagagcggtgaagcccttcgtcccgtcatcgggatcaaccacaaccagacgatgttcttggttgagggccaagactttgttgtttcaataagtggaagaatccgcttcttgatggataggagatgatgtggagtgtccggcatactctcggttactgacaagcaatatggtgacataattaatatgtggggaaagaaacaggaatcattacctggaactccattgcaattggaattgttttagttcattgatagaatggaaaagtagattcctaaaggctacttcttcaatccggttgtcagttttatggcgatgcatttctccgtaatgttctgatatccatgcagatatatggttggggttgtggcttgatgtaggactggaatatggaacaactttgcctctcgtgtttatatccccctccggttgtggcttgatgtaggactggaatatggaacaacacaatgcgttcatggcgcactggaacaagttgtggcttgatgtaggactggaatatggaacaaccacggagccgtccatcccccggataacctggttgtggcttgatgtaggactggaatatggaacaacagggtcgtaagccacacagcggaccttatagttgtggcttgatgtaggactggaatatggaacaactttaccgaaaggcaaaggccatgtccaaagttgtggcttgatgtaggactggaatatggaacaataagaccctggagggcgaagtcagtcaattagttgtggcttgatgtaggactggaatatgggacaacggtatatgtgggtacattttgttgtggcttgatgtaggatgaacatatggaaccattctttgtgtcaaagggggatatgttgtggcctgatgtaggaaagagcttcaagcaaagaacggcatgttttctttatgttgatggattggataggaagggcaccaagtggcgcccttcccggttttacatgatttccactttgctggcgatgatctcatagccggctctctccacaccggccgcagtgatatacttctgggtacgtatccgtccgaggacatggacgccgcatcctttttgcagcttgtcgagattcttgatgagattcccttcccatgcgacgacgcggtgccatgtcgtttcgatgactgcgcatccgtcctgtgccttgaagcagtagtcggttgcgacggagaagttggcagctttggcgtttccgatgttcttgacgtaaacgctcccgatgatgccccggatttcgatcttgttcaattgttccatgttgggttagtatttaagtgtccgttcatccgcgaaactgtagaagccgtccttcccgatgatgatgtgatcgatcaggtcgatttcgaatagggaacaggcgcttttcaggcgcctggtgaattccatgtccttgaaactgggcaggggattccccgaaggatggttatgcagcaggatgactgccgtggcgttgaggaacagggcgggcttgattaccgtcctgctgtcgatggatgtctgtgtgagcgtccctctcgaaagcatttgtttacctaggcaggaatggctggcgttgaggaacaggcaccagacttcttcgtggtcgagcccgtacatgatgtcatgaaggactccttccgcggaggcggaattgatgatgtttgtttgcatgtgcttggaattaatgtaaagacgggccagacataatcttgattgtccagcccgtcgggttatgtgtatcgatacgtgtacctgtatgtgccggagaattccttccggctgtgggtcaggagtatgctgatatgaatcgtgaagggaccttacggaaggtatagcctttccgcttgatgctggtggcataggacaggcagagcgattcctttgccctggtgcacgcaacgtacatcttcttcaattctccgttgatgaactccgcgacaccctcctccgtcttcgcagagcagaagtacggattcgggaagttcccttcgcatagccccatgatgtagacatgctcccattccagccctttcgctgagtgtacggtgctcagcgtcaggaatcccttgtccgtcgggacctggcattccgcgtagtcggtcagatagaacttcgcgaacctttcccggtcagtggcgaatgccgccagatagtccgaaaccgagccatagtcgtatgaccaggactggaagtccatgtagtcggactggatggagggggcatcatcgtcgctcatcataatctcggacaacacccttgtcgcagtctcgctgaatggacagtatggtgctttctcacgtatggaggagatgatctgcccgaggggagaagcgaagaatttggacttcctgcgtttcccatcctccaggatatcggtgccggtatagtcggcgatcttccggatgctgtacgcattttcgttgtctatgatgcggaggatgtggttcaggaaccggatgtgccgcttgagcttcttctgccctccgaggaccttatagggaatcctttccagctggagccgggagatgagggtctccaggtacttcaggttattgcacaggactgcgcaggagttcaggttccccgtatccttgatggactggagaaccgcgcgcgcctcttcttcctcgttgacggctctcttgacgtagatgcggcctgcttccgggcaccttgactgcaggttgaggttggcgcagtcggtgaagcggaaagtgttcacgtagtctgcgatagcctgcctgcacctgtaggttatcgtaagggatttcacgacatggttggagtgccggtgcaggaagtcgtccaggttcttgaaggatccgccgttgaactcgaagatgttctgcctggaatcgccgacgaggaacactttcaccgccgggttgatggacagcatcctgtctatgatggcgtagtgctgctcggtgagatcctgggcctcgtcaaaagccaggaaagacacctggtcgcgcatgtagtcgcggaaaccggcatcctcgtcaagtgccttgatgaagaggaccaggatgtcctggacagagattaccttgaatgcggatttgacctcggaaaccatccggatgacatccggtggcagattggttttcttggcacacatacaggcgaatatctgtttggctgtgaacttctcactatacttgcgagagatatcctcagccaactccatgagttcatcatcatcgaggatactccggtcgaaggtgtccgaatactgcttgagcatccggtagcagaatgaatgtatcgtaccgctgaagagcgagtattccttggagatcccgaacctcgtcagtttctccttgaaccgtaccccgatcagtctcgccgccgaattcgtgtacgaaagtgcgacgatcttctccggctgctcggaattctggatgatgtcgaccagcttgctcgtaaggagcatggtctttcccgtaccgggcccagcattgacatagacgatgtccgacttgcagagcacggcatcccgctgctgctcattcagcccagcgagataggatgcttggatttgttgttgattgtacatatctttgtcttggtttaagtttgaagatgcccccttccgtagctagcatgttggaagagggcttctttctttgtcttagcagaggaaccaacggtattccgtatctccatgcagtgcacgagccaacccggtaatcaccttcgtggcgttgtcggcacggtccaggaagttgtcgatgtacgacgatttgttcgcccccgtgaacaggttaaatacccgccagaggtcgatcgacccatcttctgacttgcagaagtctccatcacggtagtacgcgttggcgactagcccgatctgcgtatccgtgaggagcagttcgggtaaggccttcctctcagcagtgggcagatactgatacagccggcacttcccgaggaactgtgcgaactgtgattccgtcatccggcatccctggaaggcttccatgagcttgaggtgcttcgtcatgtcgtagctgcggaacagctcgactgcggaagatagcagcgcggcggcttccatgacccggatggatgccttgtatccgtcggtggatacgcagaggttgcagcataccatgttcttgaacccgatgaacaacttgaacttctctggagacttgcgggcaaacaaattctgctcgttataggcccggaccccaccgatggtcaggttcaacctgcaaccgttgatgtcctggaagattgtcgggacatcgaagcagaacatcatcctctcgtaatagatggtcctgtcgctctcaaggagctgtgagaccggcttgtgtatcgcttcagggattcgtcctttgatcatatgcgatacacggatcgccgggtcggagatttcctcatgggggaagacctccttcgcggcatccatcactgcttcgatgaagctttgatggctgattgtcagttcattgtccttggcgaataccgggacgatgcagtcatccttcagatggcacatctcgacctctgaagtattggcctcgatgaacgggagattggcaggagccttctgttgcttctgctcggtctggaagataggcaggaccgtcacctcgtgactggtctgaagggcagggacacacttgggcgctactgccggaacgaatacggattccattgtctgatagtatttagtggtttattgatgttgttgttgaccggcgaagtactggcttctggcttgtctccagccctgctgcaccggctgttgcgccgggacctgctgctggggttgggagtactgtgccggttgctgcacatgctgctgaggatactgggcgggctgttgctgaccatactgaggttgctgccggtcaggaagatcctcaccggcgtagagggagagaccgagtccgtggcgggcacaagctttcgtcaggctccgctggatggccttgttgacatccgtgctgcggacactctccagagggatggactggaaccgctggtccatcaccggcagatactcgatgtgctcaagcccttggaccgtgacgccggtcttcacccaggcggtccgcccatcggtgaagtagttccatccttccgcgttctcgtagatggtgtacgtggcgtcggggaagtgcgacttcacgatcctccatgcccatgcccaggagatgtaggacaggttgcccttccgctccgtgtactgactgcagttaactgcatccagcgtcttgaagacgctgctcacttggttgtttgtttccataaacgtttgaatttgaaagattacaggcggggactattccccacctaagcattgcaggtgggggtaagtcgggtgtacatcctgcgtgaacaggtattcgggatgttgtggaagatcttagatggagaatgctcgaggatttgttaaatgcgaggagaaaaagtaattttgtgtaaaactaacccgacatgaagaagctgatagcctcgattgcgataattgccgtcattatcgtttcctgcaaacaggaggtcaactataccatttccacaaaggttcagcccgaggaaggaggttctatcgtcatgacaccatcctcaggatccgtactggaagggacatccgtttcatttacggcaaatccaagtggagaatacgttttcgccggctggagtggtagcatctctgggacggagaatcccaagacggttacggtcacttcagatatgagtgtcgtggccaacttcacgctcaagacctatccattgaccttgtcagttgaaggggaggggactgtcgctgagcggatgatttcgacgaaaaccgaatatggctccggaacggttgtagagctcactgccaagccttctgaccattggttattcgaccattgggaaggagacttgaatggcaacacgaatcctgttcagattactgtctcttcacccaagtcggtaaaggccgttttcgtcaagaagatgtacgatctgacagtaaatgtcgagggagaaggagccgtgtctgagaccgtaaaagaaacaaggtctggctcttaccaagaaggaactgtcgtggaattgaccgcaacacctgccacgggttggtcatttgatcattgggaaggagatttgaccagtacagacaatcctgctcaaattaccatttcctcagcaaagtcggtcaaggcaatcttcaccaagaacaaatatgcatataacctcaagattgtaggtcctggtgtggtggatgaatacttgctccttaaaacaagggccgatttcgattatggaacaaaaatccttctaaaagccattccctctgaaggagcagtatttaaaggatggagtggggcttattctggaacagaagaggagattacagtgagtattgatgagacgaaggacttggtggcgacatttgagaaagaggtttttatttatccgctcccagatttgatgcaaccttctgtcaagttgaagtatctgtgcccgggacaggacttcaaaagtttttcatttcatgcgaatggctttcatttgtttgattataacagggatggcttcatggatgttcttgtttatgatgatgattggagcgaagatgcaattcataatccgatacgattctacttaggcacgtcagatggttatttcataaaggattcccaaaactatgggagcgtattaggaaacaatcctagaaagacaatcactggggattataatggagacggattacccgacttttttttggcttcgcatggatatgacgcgcctccattcccaggtgcttatccagttgtccttctcagccaaatggatggtagttttagagaggttgaatatatggattatgtatctttttaccacggtgcggcgagtgctgactatgataacgatggggatttggatgtggttcttgtcgatggcggctatggtaaggagatggttttggtaaatgctggggatgggggctttactgctcatcatgaattagtaaaccatgaccttcttaagggcttctatacagctgaattaatagatatagataaagatggttttattgatttgcttgcaggtcttaatgatgtagacgggacgtcgattgttccatttgagaatgattataacaatatgtcagttgtgttctggggtaatggcgcggattataatggatcctacacgcggttacccaagaccgggcataaaggaatgggattggtccttgattatgttttctatgatgttgatggagatgggagagatgagattattatagctcgtactggagaccctgtatttgggaagaactatgaagggtgggccattcaagtcgttaaaagcatagggcgttcttttatcgatataactgattctgtgattcgatttgaggattcttgtgattatgatgatcaaaccatcacatggattaatttcgaggaatataaaggtaaaacctatctcgttgggcgtaaacaagtgaatgccgaattacttttcgaattatcgggcgggaagctacttaaggtagagaaggcagaagtgacagtattgcatccaaagaacggattcgttctggaaagccaagagattacttactttggatggaagcagtgggatggaagcttctttttgtttaatgattctttggagaatggggcagacctgtcgtatctgaaagataatggctttgcactggaattctttattagaaacgaggatccgtctctgacaatagacatcaaatttgagtcattcatagaccatgatacatggaaactcgcgacgtttttttatggatacattgctgatgagcatccgacggatggaaaatgggaaaaagtagtcgttccattaaataatcttgatgattggaccgaccattcgacgaactattggtcgataatgaatcacgtccatttccagatttcatccaccggaggcctaccattcagtctcaaagatatccgaatccgtaaggttttaccggaataagatacagcattattctcccgattgatctatacctcattattgcgctcacttcggtgggcgtttttttgcccataacaaccattgggagcaacgatgtcaccaaatggatatccgcctgaatgtaagcaggggatgagattctgccgggagcacaaagaagagaaaaataactgttttattaacaaacacttatgtccggacacaacaatcgcattttcatcttgtaaggacttcaattatctccgtaattccggctggttttttagcgttctttgcattgtgaatcttgcctgaagcggatttgcaatgacataggataataacgaaaaccgtccttgtacgcgcttcaggatctacgagagtagatgcgtactcggaaggttttctttttgttatgccgaggtgttcggagcaagaatatgagtaagatgaaccgtctgagcagaagactctttcaatatgtaattggtgataggaagagacgccgggcagttgcttttgccatcctgatgaagaatcgtaagccagcatctgttgtgaaggattggtcgtataaaggactggcaagagtctctggattggctccgggaacatgtagaacatatgtccatattctgcttgaaatggacttggttcatatgtccacgtactgcggccatacatatttggtttttaataaacttaaggcgcaaaagaaaaagaatagaggaaaagctggttatcacacaccgaagcacaaggatattgaccttggcaattatgacgcgacttccgtcaaaacgattgaaatgacgctgaaagcattgtcgatagtagaaagccaacgtcaaaaagactacgcgcagcagtgcattagtgcaaaacagaatccgcggaaccttcaagaatacaagaaggccgagaagatctgccgtgcacgtggctgggatagttcttttgttgacaatggtatttcatacaatcgcattcgccgtcagttgaattgctctccgaatacggtaagcgctacgattcagtacggagagaaaaacggattgttcaccgttacccgctgcgaacccgaacttgtttaccattgccctggtcaagcaaaagaagctgtccaatacttggacatttcgtattcatggtgtacggacgacaacgtctactatcagccggcgaacaaattcagtctgaccatctcagagtaatcctccctccccctccctctcccttcccttgggagatgcacactattacactattatttttgatcccttatatctggaagaatgagttgagaaataattaaaaacatgaccgctcgcggtatttatgtcgaggcaattggatgttatatttgtttacataatagtaaatgatttggttgcgcttatttcagcttgtatcagtcagttacaggcttcggctttatctgttaataaaaagacaactggctaggacgaagtagcggttccattgcgaagtttcaagaattcgatgcctgtggaagtacggtcgcgcatgaacaaataagaacaaaaacgccaagtatgccatttcgaaccgtgatgaaagatgaagcagccgtcgattacagttgcataatacaaagtcctttcggcagcccaacatgaccatttatagccgtaaaaccgcgcaaaaaggttactatcttgcgtaataaaacaaagaaatatgatgtacgattttatggctggcggactgcttcaatctccagattcaaaagagaaaactttcctagtcgattccaagattaactttgattccgcatcttctttcgtaaagggttcgcccaaaaagagcttacctggtgaggcctgggctcgttggcgagatgacaacggtccaataggacgggcgattagagagaataagatggaacttgtacgggcagcgataacacaagttaagagaagtaaacgatgacgattgactggaataatgaacccaattccgctactcctccttcagctttaagaaagcttcatcaacttctgctaaaatacttttatccaataatttggcataatgttgtgtcagttttgtcgtgctgtgcccaaggagccgcgccacaacttccaggcggacccccttgttcaggcagcgggtcgcgtaggtgtgacgagccacat

SEQ ID NO: 2026 - DNA, 23648 bp, synthetic construct
  variation 3780..3781: note = n is a, c, g, or t
  variation 15183: note = n is a, c, g, or t
  variation 15122: note = n is a, c, g, or t
  variation 15405..15406: note = n is a, c, g, or t
  variation 7504: note = n is a, c, g, or t
  variation 15539: note = n is a, c, g, or t
  variation 15256: note = n is a, c, g, or t
  variation 11127: note = n is a, c, g, or t
  variation 18487: note = n is a, c, g, or t
  variation 8195: note = n is a, c, g, or t
  variation 11146: note = n is a, c, g, or t
  variation 3856: note = n is a, c, g, or t
  variation 4529: note = n is a, c, g, or t
  variation 15320: note = n is a, c, g, or t
  variation 15273..15277: note = n is a, c, g, or t
  variation 15598: note = n is a, c, g, or t
  variation 15204: note = n is a, c, g, or t
  variation 15398..15401: note = n is a, c, g, or t
  variation 4619: note = n is a, c, g, or t
  variation 4923: note = n is a, c, g, or t
  variation 7270: note = n is a, c, g, or t
  variation 8482: note = n is a, c, g, or t
  variation 15194: note = n is a, c, g, or t
  variation 11153: note = n is a, c, g, or t
  variation 9646: note = n is a, c, g, or t
  variation 15259: note = n is a, c, g, or t
  variation 5018: note = n is a, c, g, or t
  variation 6868: note = n is a, c, g, or t
  variation 5861: note = n is a, c, g, or t
  variation 7429: note = n is a, c, g, or t
  variation 15041..15042: note = n is a, c, g, or t
  variation 13528: note = n is a, c, g, or t
  variation 5663: note = n is a, c, g, or t
  variation 18694: note = n is a, c, g, or t
  source 1..23648: mol_type = other DNA
  variation 8008: note = n is a, c, g, or t
  variation 15604..15605: note = n is a, c, g, or t
  variation 5933: note = n is a, c, g, or t
  variation 3825..3826: note = n is a, c, g, or t
  variation 4913..4914: note = n is a, c, g, or t
  variation 10405: note = n is a, c, g, or t
  variation 15062: note = n is a, c, g, or t
  variation 10933: note = n is a, c, g, or t
  variation 3765: note = n is a, c, g, or t
  variation 15064: note = n is a, c, g, or t
  variation 15526: note = n is a, c, g, or t
  variation 4595: note = n is a, c, g, or t
  variation 8911: note = n is a, c, g, or t
  variation 15328..15330: note = n is a, c, g, or t
  variation 5012: note = n is a, c, g, or t
  variation 15408: note = n is a, c, g, or t
  variation 5963: note = n is a, c, g, or t
  variation 18532: note = n is a, c, g, or t
  variation 4893: note = n is a, c, g, or t
  variation 15410: note = n is a, c, g, or t
  variation 7744: note = n is a, c, g, or t
  variation 15382..15383: note = n is a, c, g, or t
  variation 15054: note = n is a, c, g, or t
  variation 15477: note = n is a, c, g, or t
  variation 15447..15448: note = n is a, c, g, or t
  variation 13627: note = n is a, c, g, or t
  variation 5027: note = n is a, c, g, or t
  variation 4562: note = n is a, c, g, or t
  variation 6937: note = n is a, c, g, or t
  variation 7447: note = n is a, c, g, or t
  variation 15332..15334: note = n is a, c, g, or t
  variation 15197: note = n is a, c, g, or t
  variation 15247..15248: note = n is a, c, g, or t
  variation 15071: note = n is a, c, g, or t
  variation 15537: note = n is a, c, g, or t
  variation 11104: note = n is a, c, g, or t
  variation 15192: note = n is a, c, g, or t
  variation 5699: note = n is a, c, g, or t
  variation 3762: note = n is a, c, g, or t
  variation 5042: note = n is a, c, g, or t
  variation 11138: note = n is a, c, g, or t
  variation 7474: note = n is a, c, g, or t
  variation 4526: note = n is a, c, g, or t
  variation 4565: note = n is a, c, g, or t
  variation 15263..15264: note = n is a, c, g, or t
  variation 15388..15389: note = n is a, c, g, or t
  variation 15458: note = n is a, c, g, or t
  variation 7762: note = n is a, c, g, or t
  variation 15130..15132: note = n is a, c, g, or t
  variation 18595: note = n is a, c, g, or t
  variation 15119..15120: note = n is a, c, g, or t
  variation 4867: note = n is a, c, g, or t
  variation 5894: note = n is a, c, g, or t
  variation 15337..15338: note = n is a, c, g, or t
  variation 4409: note = n is a, c, g, or t
  variation 10961: note = n is a, c, g, or t
  variation 3945: note = n is a, c, g, or t
  variation 10936: note = n is a, c, g, or t
  variation 7372: note = n is a, c, g, or t
  variation 10654: note = n is a, c, g, or t
  variation 4403: note = n is a, c, g, or t
  variation 15586..15588: note = n is a, c, g, or t
  variation 15590..15596: note = n is a, c, g, or t
  variation 5064: note = n is a, c, g, or t
  variation 3822: note = n is a, c, g, or t
  variation 7287: note = n is a, c, g, or t
  variation 9226: note = n is a, c, g, or t
  variation 8605: note = n is a, c, g, or t
  variation 3840: note = n is a, c, g, or t
  variation 18658: note = n is a, c, g, or t
  variation 15044..15045: note = n is a, c, g, or t
  variation 15135..15137: note = n is a, c, g, or t
  variation 4444: note = n is a, c, g, or t
  variation 4559: note = n is a, c, g, or t
  variation 5035: note = n is a, c, g, or t
  variation 11095: note = n is a, c, g, or t
  variation 11185: note = n is a, c, g, or t
  variation 15532: note = n is a, c, g, or t
  variation 15261: note = n is a, c, g, or t
  variation 13573..13574: note = n is a, c, g, or t
  variation 4412: note = n is a, c, g, or t
  variation 13710: note = n is a, c, g, or t
  variation 9265: note = n is a, c, g, or t
  variation 5948: note = n is a, c, g, or t
  variation 4876: note = n is a, c, g, or t
  variation 4370: note = n is a, c, g, or t
  variation 8047: note = n is a, c, g, or t
  variation 4652: note = n is a, c, g, or t
  variation 15322..15324: note = n is a, c, g, or t
  variation 15392: note = n is a, c, g, or t
  variation 15547..15548: note = n is a, c, g, or t
  variation 7687: note = n is a, c, g, or t
  variation 13457: note = n is a, c, g, or t
  variation 3775: note = n is a, c, g, or t
  variation 15534: note = n is a, c, g, or t
  variation 15314..15315: note = n is a, c, g, or t
  variation 15048..15051: note = n is a, c, g, or t
  variation 15340: note = n is a, c, g, or t
  variation 8500: note = n is a, c, g, or t
  variation 5672: note = n is a, c, g, or t
  variation 15542: note = n is a, c, g, or t
  variation 11123: note = n is a, c, g, or t
  variation 10811: note = n is a, c, g, or t
  variation 5023..5024: note = n is a, c, g, or t
  variation 7445: note = n is a, c, g, or t
  variation 4568: note = n is a, c, g, or t
  variation 13354: note = n is a, c, g, or t
  variation 15467..15468: note = n is a, c, g, or t
  variation 10048: note = n is a, c, g, or t
  variation 15139: note = n is a, c, g, or t
  variation 4885: note = n is a, c, g, or t
  variation 15464..15465: note = n is a, c, g, or t
  variation 15601: note = n is a, c, g, or t
  misc_feature 1..23648: note = Synthetic
  variation 5882: note = n is a, c, g, or t
  variation 15057: note = n is a, c, g, or t
  variation 3759: note = n is a, c, g, or t
  variation 15450: note = n is a, c, g, or t
  variation 9827..9828: note = n is a, c, g, or t
  variation 15127: note = n is a, c, g, or t
  variation 15385..15386: note = n is a, c, g, or t
tacactgccgcttcaaacaccaactattcaacaatgcgctccatctcaggtggtatccgcgtttctttctaagtccatcattaacacagacttaaacagaacaataatatgaaaaaattaaataaagttatcgcttcggctctgatgggtgtggctctcgtttcttgtaacgacctcgacaccgtttacgaaggtagttatgttacctccgagacaaagtccgatgtgtatgaaatcaaccctgaaatggcggtggcaggtgtaacaggtatcactgctaacttcagccgttatctcgctactatctcaacatctacatcacgtatcgactatgactacggttacgccggtgtgatgctcggtctggatcatcagactgccgatatgaactcacgttacatcggttacaactggttcaatgattgggcagcattctctgacatcaaccccaatggtgataagaacctttgcgtgtggaagaatgaatacaaccagatcttcgtagccaacgcggtgctctcttctattcccgaagacagtgaaagcgaagaactgcagttgttccgcgctcaggctcacggtttccgtgcattcaactattgggtgctggctcagttgttccaattcaactatcagggaaatgaagataagccctgtgtgcccatcatcactgctgaaaatgccgaattggctgcctctgaaggtgctatccgtgcaaccgttaaagaagtgtatgatcagattctttctgacctgaacaccgctatcgaaaaatcagaagcaaccactctgcgcatcggttcatacgtcccctctaaaccccgtcgtatgctctacattgatgcactctacggtctgcgtgcacgtgtcaacctcaccatgggtaaatatgccgaggctgctgccgatgctaaaaaggcaattgcactgtcatctgcaactcccctctcaatccaggaatgttctaagcccggcttcggaagcatgagcgaccacaactggatgtggggtatcgcaatcgcaatcaccgaccgtgtggtaacttcaggtatcatcaacaacccctcaatgctttgcacattctgcggtaacggttatgtacctgttggttgctggcgtgctatcgctaccgacctttgggatgctatcccctcaaccgacgtccgcaaaggctggtggctcgatgatgactatcagtcacccatccttaccgatgctcagcaggcttaccttgatgagttcggttatggaactatcactgactctgatgcttcattgcttccccacaccaacgttaaatttgactcttacaactctgtcatcggtcagaccgacaatgccaacgacattcctctgatgcgtatcgaagagatgtactacatcgctgccgaaggtctcgctatgagcaatcaactcgctgaggcttctgacctgatcaacaacttcgaacagacttaccgtaaccccaacttcattaacactgcttctactcccgaggctttccaggaaatgatctggaacaaacgtcgcgtagagttctggggtgaaggtctgtcatacttcgatcttctccgccttaacaagggtgttgaccgtcgttcttcaggttgcgtttctgtatggcgctacaatattcagcccaaaaaccccgttcttatcatgatgattcccgaggatgaaatgcaggctaaccccgcgctcaacctcaaggctcccgccggtgagcccaatggtaataacgaacagggtattcgtcctgttgccggtgtttaatcttcggacagaacttaactgattgtctccactcctctcttcaatcattttttaattgaaaacaaaatcaaaaatgaaattattcaaatcatcaatactggctatgcttgccctcgctgcagtggcaatcacatcttgcgatggtggaaatgatgtagactatactgacggtgtacagggatcaggttcattcttccctacaaccaaggcttcgtacacactcgacagaaacgaaacatcattcactattcccgttgctcgccaatcagcaaacgacccttcaactgttgagatcgttcccaatgacacaaccggtttcttcggcatccccacatcggtaaccttcaacggtgagtccctcactgctgaccttaccatcacctacgatcccgctcagttggaatatgataaggcttacggcgttgaccttattatcaagaatggtaacatctacggtaacacaaactacagtttcactgttgttctgcccggtccctggaaaactctcggtaaaggtctttacaccgacgaactgatgatcggtatatacaacgtggaacaacttacctacgacgttaccgttgaagaaagtgaacttaaccccggtctgtatcgtatcgtaaatccttacggtgtaggagtatatccttacactgaagcaggcgatatgattgacggttacggtcctgaaaaaccctactacatgtatatccacgctgaaaaagatgatcaggtttactttgaacgtttctctgttcacatgatcttttcagatgatgtgggtgaactgtcatttacttgtcgtgctgctgagttgcttaccaaccctgcaaataccattgaggctattgcaaaagcaggttactgcggtaataaccgtgacggtgtgatttatcttcccactgacacctacttccagggtactaacaaatacaatgacggatggtacggtcccttaggcactaccggcggtcgcctggttctccccggcatcgaacttactgactattctgctgaaatcagttacaccggtcgcttcaccgatgttaacgaacagactttcattatggctgacgttactctgggtgatgatgttgtttcagcacgcgttgctgcagcacagaccactgatgtcgctgctcttcaggaagcaatcgaaaacgacgaaatcgaatacattgaaatttctcagtcaggtgaggttaaaatccccgttgccgaaagtggtcgttacactgttatggttgtaacttacgctaatggtgaagttcaggaagtggcttctaccaccgttgaaatttctctgggcggcaacgaatgggaaaaaatcggtaacgcttatatcctcgacggttggatgatgtctgccggttcactgaaagataactacgatgaatatgtttggatgtgccccatcgaacgcagcactaagcgtgcgggtatttaccgccttgttcagccttacggtcccgacagtcccatgggtaacttcgccctccccggcatctacaacattgaaattaacgccgaagatcccggtaatgtatttatcgaacctcagagcaccggtaacggctggtactctaacggtgtgatgattatcctttctcgtggttacatcactcccaacctcaagcctgaataccgcggtgttttcgaggatggtacattctacttccccgctcagacctgtctgttctgcttcgataaatatgatgaagaagggttatatatgactcaaaacgaaggtatcttccagatcgattatgcttcaggtacttccgctaaattcaaagcaatcaagggctctaagaaagtaggttctgctaaacagcgcatgaacgctactccctacgatgcttcacgctctatgcgccgcatcgacttccagagcgcattttgattagtctccaataatacctataactgaaaagggtgcctcgtggtgaggcatcctttttttttgatgtcgtctaaacttttttnggnagngtgtcaaaanaggcnnagcctcgccgtatacaggattatgcggctgctccatggagnagnnctacagggttaatncattgattatcaagantgtagggatgctccctggagcatccgccgaatatacatcaccgtccatgaacgtaaaacccataaaaaaatacagactgcaattcactnctatatcacaaaaatatcttatctttgccggcatgaatccgctgaaaaaaatatccactcttttcaaactgctccgccaggagcgacagtatcgtctacgtctggaattcgttctgaccgactattgtaacctgaactgcaaaggttgcacccactatgctcccgtggcacccaaggagtttgaggagttggaactgttgcgtcaggagatgtcgcacttaggcaacgtgtgcggctccgaagtccgggagtgttatctcatcgggggtgaaacgctcctttatcctcacctgaccgaggctatgaccatgctccgccgttatttccccactcagaaactgtctatcttcaccaacggtctgctcattccgcgtatgtcggacgagttctggcaactggcccgcgaactggatttccatgtagtnataaccatctatccggtgaaagcggattatgangccatnatngccttatgcaaggagaagggtgtgaaaaccgnggtctacggcgaccgttcgcagcaggattcattcttccggtttcccctctcgccggtcaaactgcgtcataaccgcaaaatncanctctcatgcttcaaccgcgggtgtatgtcngtnatnggnggctacatctatccctgctccatcagnggctgtgtgagccaccttaaccgngccttcggcaccgatttccgccatgaagagggngaccggctgaaggtatcggagataggttcggccaaggagattctgcgcctctacacgcgccccgtccccttctgcggctactgccggaaatatcagcccgccgactacggtatatcacgtcgcgaagcctccgaatggatcgacgaagagtgagggtgtatcaaaaataggcgaagcctcaccgtatactggattatgcggctgctccatggagnagccctacngggttaatntgttgacnatcaagagtgtagggatgcnncctggagcntccgccgaatatacatcactgtccatgaacgtaccacacctaaaaaatacaggtcacttcaatttttgacacagccccttatgaaggtngatttnacgcnncanccccctcnctgtggngcttccaaaggaaaaaaatcgnctgattcttcgctattagagaaaaaatgattatctttgcatgcaataaataagaaaggttattatatgtcatcatttattgcagacagagtaaaaatggacggtctgactttcgacgacgtcctgctcattccggcttattcggaagttcttccatatcaggttaaactgaaaacaaaattttcccgtaacatcactcttaatgtccctatcgtctcagcggcgatggacactgtcaccgagcagcaactcgccatcgctatcgcacgcgagggtggtatcggtgtaatccacaaaaatatgcccatcgaggagcaggcacgccaggtgcatgctgtgaaacgtgctgagaacggcatgatctatgaccccgtgatcatcaagcgcggtagcaccgtcaaggatgcgctcaacatgatgaaggaataccacatcggtggtatacccgttgtggatgatgacatgaaactggttggtatcgtaaccaaccgtgacctccgttttgaacatgatctgaacaaacctatcgatgaggtgatgaccaaagagaatcttgtcaccaccacccagtcgaccgatcttgacgaagcggctgaaatnctccagcgncataaaatcgagaaactccccgttgtngacaacgaggggaaactgataggtctggtaacatacaaagatatcaccaaagccaaggataaacccaacgcctgcaaggaccgtctgggtcgtctgcgtgtggctgccggagtaggtgtcaccgccgactcaatgaagcgtgtcgacgctctggttgaagcnggtgttgacgctatcgtcatngacactgcccanggtcactcacgcggtgtaatcggcgtgttgcgtgccatnaaggaaaaatacccngaaattgatgttgtngtgggtaacatcgcaaccggcgacgctgcccgcttcctggttgagaatggtgccgacggcgttaaggtgggtatcggtcccggctcaatctgcaccacccgtgtcattgccggtgtgggtgtgccccaactcagtgccgtttacgatgtcgcaagtgcgctcgaaggcaccggtgtgcccttgattgccgacggtggcatccgttattcaggcgacattgttaaggctcttgccgcaggtgcctactccgtgatgctcggcggtatgcttgccggcgtggaggaatcgcccggcgagactatcattttcaacggacgtaaatataaatcttaccgtggcatgggttcgctcgaggcaatggaaaaaggctcgaaggaccgttacttccaggccaacgaaacagatgccaagaaactggtgcccgaaggtatcgcagcgcgcgtgccttacaaaggtaccctatacgaggttgtttaccagatgttaggcggtctgcgtgccggcatgggctattgtggcgcacctgacattgatgcgcttcacaaggcacagttcacccgtatcaccaacgccggtgtggctgaaagccatccccacgatgtagcaatcacctctgaggctcccaactactcacgtagttaaggagcggaagaaacgataaagaaagggtccggaagccaaacttccggaccctttcttataaatcttataaatcttataaatcttataaatcttataaatcttataaatcttataaatcttataaatcttataaatcttataattcccccgccagcgacccaataagagtagcagacgaagcctcctcaatcagcacacgcactgtctgccctacggccgctccgccacgcggaaacaccacactcttgttctgaggcgtgcgncccaccatctgctcattgctgcgtttggccacaccctccaccagcacatcgaacgtcttgccgatgtcncggcggttcgattccagtgacagttggttctgcagggcgatcatccggttcaggcggtcaatcttcacctcttccggcacattatcacccatggtacgtgcggccaaagttcccgggcgttcggaatacttgaacatgaatgcgttgtcaaagccaacctcacgcatcagcgccagagtctgctcgaaatcctcctccgattcgttgtagaatccggtgaacatatccgttgttatggcacagtcggggatggcgcgtcggatggcggctatgcggtccagataccactcgcgggtgtacttgcggttcatgtcgtgcagcacgctgttgctncctgactgcaccggcangtggatatggttgcagatgttgtcatagcgggcgatgacagcgatcgtctcgtcgctcatatccttggggtgggatgtggtgaancgcacacgcatgtcaggggcagcctcggccaccatagccagcaggtcggcaaacccnacctcgcgcccggtcncngggtcggtgtagcggtaggagttcacnttctgtcccagcagcgtaacctccttgaanccgcgtcggcgcagatcggccagttcggccaggatgctccctgcctcacggcttcgttcgcgtccgcgggtgtaggggacaatgcagtaggaacagaaattgttacatccgcgcatgatgctgatgaacccgctgacacggttgttgcccagacggcgggggagcacatcgcggtaagtctcngtagtgctcagttcaacattgatggcacggtttcccgcctcagcctcggcaaaaagnttgggaagatcgagatangagtccggtccggccacaacatccacaccctgatccatcaatgactcacgcacacgctcggccatacacccgatgacaccgacgatgatacggcggtcgcggttcttgcggcgaagcgaagccagataagccagacggctgatgattttctgctccgcattgtcgcgaatggagcatgtgttgagcaaaatagcatccgcctcagtaatatcctcggtaggctcataaccggccacacccatcacngaagccacaacctcggagtcagccacattcatctgacanccgtaagtctcaatatataaacggcgaatatcgccctctttttccttcataagttgaaattattgaaaaactctttgaaaagcaaagtttattttatatttttgtacaaaattactaaaaccatctttttatcacaagaaaaactaanagtaaaattatatggcgcttaattttatgacagccgaagaggctgcgcaaatgattaaccacaatgatactttcggtctgtcaggcttcactgcccccggaacacccaaggctatcatcgaagaagttgccaaacgtgccgaaaaagagcatgaagcaggcaacgagttcaaaatcaatgtgtttaccggtgcgtctaccaatgaccacgtcgacggcatccttgcccgtacaaacaccatgggccgccgtgcgccataccagaacacccctgacctgcgcaagcgnatcaacagccacgatgcncactacaacgaccgtcacctctcggaaatggctcaggaagtgcgctacggcttctatggcgacatcgactacgccatcatcgaagccgctgacgtgactcccganggcgaagtcctcctcggaacaggtctgggtaacatacccacctacgctgcaaaagcaaagaaaatattcatcgaacttaacgaggctctccccaaaacactctacggcatgcacgacgtggttctgcttcaggaccccccttaccgccgcgagatacccatcttcacacccagcgaccgcatcggcagtcccaccctcaaaatcgatatgaacaaagtggtaggtgtggttaaaaccaactcactcgacggtgtgaaaccgtttaccgaacccgacgaagtgtcaaaacagatcggttcaaacgtngtcaacttcctcctcagcgaataccgtcgcggccgtctccccaaagaattcctccccctgcagtcaggtgtgggcaacgtagccaacgccgtgctttatgaccttggcgaaagcaacgaactccccaagttccgcatgtacaccgaagtagtgcaggatgcagtgctcgaactgatgaagaaagaaaaatgtgtcttcgccagcacctgctcaatgaccttctccgatgacaccgagcgcgaactgttcagcaacctcgacttcttccacgacaagattctgatgcgtcccgccgaaatctcaaacaaccccgangttatccgtcgattgggcgtcatagccatgaacaccgcncttgaagccgacatcttcggaggcgtgaactcaacccacgttctcggcacccgcatgatgaacggtatcggtggctcaggcgacttcacccgcaatgcctacatctcaatcttctcatgccccagcgtaaccaagggcggtctgatcagcaacatcgtccccatggtggcacacgccgaccactccgaacactccgttgacatcctcgtgacagaccagggtgtagcagacctccgtggcaaagaccccgttcagcgtgccgaagaaatcatcaccaactgtgcccatcccctctacaaagaactcctctgggattacctcaaactgggcaaaggtggtcagacaccccactcactggcagcagcattcgccttccacacngccttcgcagaacatggcgacatgcagaaaaccgacttctcaaaatactgctgataaaacagttaaccgtaataaaatcaacggagacacccctcaattcggtgcctccgtttttttattttaagaattctgctattaaatattgatgaaaatatcaaaagtaatgagtgtaatcgcttannggacaggaatataaaaaaatctccacggagtacgcggagattataggttctaaaccttcggcatatagccttattgtgataagatatagaattgatgcaaatatcgtaattttatttagattatccaaataaaacgctatatttgtatcagaaatcaaacaaactttgtatcatgtcacagaaaactttgggattagaccttggaacaaactcaataggntggtcaattataaatcatgaagaagtgccggaagaaaaaatcacgctattggactatggcgtatacatttttccgcagggtgtactggaaacgaagtcgggtgaggaaccggcggtaaagaaaagaaccgaggcccgggcatcccgacgtcactatgctcgccgtcggctgcataagattcagatacttaaggttcttatggataatgatatgtgtcctcgtttaactaatgaggaactggcaacgtggcgcactaaaaaacagtttccgacaaatcctgagtttcgtgaatggctgaagactgatgataatattgacaagaatccttatcatgatcgccacgaagcactgtcgcgnacacttgatctatcaataagggaggagcggtatgttctgggacgtgcgttgtatcatctgaatcagcgtcgtggatttctcagtaaccgcaaagatatgtcgaaggactccgagggtgttgttaaatccggtattgatcagttgtcaagggaaattgatgaggcagggatgctatatccgggggaatatttctacagattgtatcagaatagagataagatacgaaaccgctaccagcatcgaacccgncacgttgaggaagaatttcatgctatatgtgagaaacaggggctgccggagcatacagtagtggcgcttcacaaggctattttctttcaacgaccgcttaagtcacagaagggacagattggaaggtgtacgttcgagagaaataaacagcgttgcnccgtttctcatccggagtttgaagagttcaggatgttatgcttcattaacaatattaaaattaaaaatccatctgatcctgccttccgaaagattaccgctgaagaaagagagcagataatnccncttttttacaggaaaagcaagccancgttcaactttgaagatatagcgaaaaagatagcgggtaaaaataactatacttatggcgattctacatcctctcttgttcagttcaactatgcaatggaccaccaggtgtgctcatcatcagttaccagtgcnttgaaatcnatcttcggcgatgactatnttgnaggaatcaggnatacgtanattcttnccggggcaaaatcagatgctgaaataataaangatatatggcatgttcttacttcatttgattcggatgacctactcataggctgggcagaaaagaatttaggactgacacatgataaatcagcaaagtttgcggaaatacgtatgcctcagggatatgcgtcattgagcctgaaagcaatacataaaatagtgccgttcctcaggcaaggtctaaggtatgaccaggctgtattcttagccaacataccggctgtactggaaaggtggcatgaacgaaccgaacaggaaaaaaccgaagtgattaacggggtatgcaatgtggtggacagtttcgtatccacagaccttacgccaaatatccagacagcaatcagacaatatctggaagatatgagtgatctgaatttcggacgtttgaataaactatatcatccgtctaagatagataaataccctgaggcggaattaaatgagaagggagaacttctattaggaagtcccagaacggaggctattcgaaatccgatggcaatgcgtgccctttttagtcttcgacacctcatcaacacccttttgcgtgagaagaaaatagatcgttcaacaagaataaacattgagttctcacgtatgctcaacgatgccaatatgcgtcatgccatacagcgatatcaacgagaactgaacaaagaaaatgagtcaaatctgaaagaactcaggaatctatatttcgaggcaaccaaaaaagttatcgaacctactgaaactgatctgttgaaatttaaattgtggaaagaacagggtaagtgttgcctgtatacaggaaggcagataggaatcagtcagtttattgggtcaatgccggaatttgatattgaacataccattccgcgatcgttgggcggtgataattctcaggaaaacaaaacgttatgcgaagtccgttacaaccgcagtgtaaagcgaaacattcttccggctaacctcgttgatgctgaagtgattctggaaagaataaagaaagccggctgggataaggaaattcgtgaccttcgtgctcggatatcacgaaaaacaacttccggattcatgaccaaggaggaaaaagacaaggtcatttctgaacgccactatctgaagttgaagttgaactacctgctgaacaaatatcgcagattcatgatgactgaagtgccggaaggatttaccagaaggcagggtgtagacatcggaatcataggtaagtatgcctaccattatctggcatcgcttttcaagagtgagaacaggcagatcttcacagtcaaaggtgctacaactgctgagtttcgcgttatgtggggattgcaggaagagtacaaaagtaaagaacgtaataaccattgccaccatgcgatagatgcgattgtcatagggtgtataggtcgcgaccagtatcataaatgggcgcaatacaatagagatatggagggctatgaactggaaggtaagccacgccctgtatttccaaaaccctggcccacattcactcaggatgttaaaggaatagtcgatgaccttctggttgttcaccgcaatgatgatcgtagacttcgaaagtcaaagagacaactgcgtaaaaatggtaagattgtaagaaacagtaataatcaacccgtctatgctcaaggcgatacggcacggatgcgtcttcatcaggacacattttacggcgccattcaaaatgagggcactataaaatatgttatccgcaaacccctgtcagcgcttgatgccaaagatatacccaatatcgtagaccccgttgttcgaaaagttgtgcaggaagcagttgatgaaaaaggtttatcggcactcgcttcacccatatatctcaacaaacagaaaggggtggaaataaaaaaggtcagacttatttcaagcctaaaaaatcctctgcaactaaaaagtcattcacatatttcaaagaaagaacataaaaagaattattatgtggcaaacgatacaaacttctgtatgggagtgtatgaagggatgtcagacagaggcaaaatggtgagaacattcaaagtagtgaatgcactggaagcagtggaaaaaatcaaacttagggagtcaatattgcccctgtccgatgataatgactattcattgaagtacaccttatatccgggactaatggtgattttttacgaaaaatcnccaaaagagatttacgaggccaatgacacagaactgtcaaagcgactatataagataactggtgttaatattcagcgcgtcggtaagtatcagtatggtattntcgcattgaaacatcaccagaatgcgcagtcctcttctgaattgatcacaaaaaatggcaagtggacccgnggagagtctttcagaccgggtattgcaatgaatcattcacagttnnacgcccttgttgaaggtgtggactttgtcatatcagatacaggtaagataacntttcttcatccatctatttagcgtatatgttgaagcggtctattgcaattacgtccgtgtgtactctgacacttagaaatgcncagttgattgtgacatcttcaaccggaactgtcacttctgttccgattgaagatttgtcaactgtgattattgagaatcagcgtgcctcgatatccattcctgccatcaacgccttgacccggaataatgtagccgttgttttgtgcgataacaaaatgatgccctcttcgttgatttatccgttggagggacatacccttcagggcgaacgttatcgactgcaactggaggcatctctgccccagaaaaagaatatatggaagcagatcattgtatccaaaatacacaatcaggcaacccatcttgacagaaggggaaagaatggtaacctgctgaatccttatcgcttagacgttaaaagcggggactcaacgaacagagaagggatagccgctgccgtatattggaaagaactctttggacaggagtttatccgtgaccccaaaggcgaaccacctaacaatctgctcaactacggctattctattctacgagcggcaaccgcacgcgctattgtcagtgccggaatgttgccatcattaggtattcatcacaaaaataagtacaacccttttccgttgtgtgatgaccttatggagccgttccgaccatgggttgacgaggtagtttatgatttgtggtcaacaaatcagatagaactgactccggaagttaagcagacgttgattcaggtgatttattcagatgcaagagttgctgataggcgccatccgttgtcaatagcgataactatgctatgtacctcagttgctcagataatgaagggtgaagagactgtgctaagtataccttcaatgattacagattaatccaaatgacacaaattgttctaaatgcctatcacataatgtggctgattgtattttttgacctcccggtgcagaccaaaaaacaacgcaaagaagcggcaaaatttaggaaaatgttggagaaatttggatttgtaatgtctcaatattctgtttacatgcgccattgcccttcaaaagaaagttgtacagtacataccaacagagtaaaagggattattcctgttgagggatcagtctcaattttaaaaatcaccgacaaacaatatggtgaaataatcaattatacaggaaaggaacgtgaacttcttccggcaacaccgcgtcagttagaattattttagttatctttgcagcgaaaaaatcaagatataaatatcttccacttcctcagatatgacatttttttatatgctaatccacttgtatagtattgaatgtcaaataattggattgctgagggttgtggtttgatatagattttattacctttacaactnncnnggnnnncgngtnataantnccatcangttgtggtttgatatagattttattacctttacaacaactcacaaatnnanattanaannntgnnngngttgtggtttgatatagattttattacctttacaactatttctnagctatccnanacncctaatntgctgagttgtggtttgatatagattttattacctttacaacnngatgagcnaantntnngcctaaacnnnnngttgtggtttgatatagattttattacctttacaacnnctttnannncacnnntnnnaanntnttgttgtggtttgatatagattttattacctttacaactgcnnanncnntantacttnnnncatnncntngttgtggtttgatatagattttattacctttacaacnnangcaaaganttttcnnanngaccatagntagttgtggtttgatatagattttattacctttacaactaatgctatcnttgttnangcngncgntattnngttgtggtttgatatagattttattacctttacaactnnngnnnnnnntnaanaannaatctgaatagttgtggtttgatatagattttattacctttacaactgccaagaatttccttaaaacgttggtcgggttgtggtttgatatagattttattacctttacaactgtggagcatttcgccacaactggcggtaggttgtggtttgatatagattttattacctttacaacaatacggaaccgctaccgatactaccggaagttgtggtttgatatagattttattacctttacaactaataagttaaattaaggtttttcagttagttgtggtttgatatagattttattacctttacaactgagccacgattgcgaataactgtaaaaagttgtggtttgatatagattttattacctttacaacattttattattttttaagttagcactgcaagttgtggtttgatatagattttattacccttacaacgaagatggtgtgtaaaataggcgaagcgtcgccgtatacgggattctgcggctgctccgtggagcagccctacagggttaatgtgttgattgtcaagagtgtagggatgctccatggagcatccgcccaatataaatcactgtccatgaacgtacaacatataaaaaatacaggctgcatcaatttgaactgcgccattcatccacaagcaaatccactgctaaaaaaaactcatgttctcatgttctcctgtcaaaaatattgggagcagccgccattcatccataggtaatttaccgttcataaaaattgtgcaaaaaaaaggcgcaccgttgggtgcgccttctgttaaggttttatctgttaccttgcggtagtggattatttaccttttgagagttgttctttgagagcagcaagtgcttcgatgtcaccgagagtggttttttcgatgggggtagagagcatgggtgcttcttccttgcgagcgcgtttagccttgcggggctgttctgctgcgggagccttttctgcttttgcttcatcttcgaaaatgcggctgtggctgaggatgatgcgtttgttgtctttgttgaactcgataaccttgaagttgagtttttcgtcaactttggcggttgtgccgtcctctttggtgaggtgtttgggtgttgcgaagccttcaacgccgtaggggagggcgataactgcacctttatcgagcatttcgatgatggtaccttcgtgaactgaacctacagtgaagatggtctggaatacatcccaggggttttcttcgagttgtttgtgaccgaggctgaggcgacggttttctttgtcgatttcgagaacctgaacgtcgatgttagcaccgatctgggtgaattcgctggggtgtttgattttcttggtccaagagaggtcgctgatgtggatcagaccgtcaacgccttcttcgatttcaacgaatacgccgaagttggtgaagttgcgaacttttgcagagtgtttgctgccaaccgggtagcgtacttcgatatcttcccagggatcctgtttgagttgtttgatgccgaggctcatcttgcggtcttcacggtcgagggtgaggactacggcttcgatttcgtcgcctactttcatgaagtcctgtgcagagcgcaggtgctggctccatgacatttcgcttacgtggatgagaccttctacgccgggagcgatttcgatgaatgcgccgtagtcagccatgacaacaactttacctttaactttgtcaccaactttgaggtcggggttaagggcatcccagggatggggatggagttgtttgagaccgagggcgatacgtttcttttcgtcatcgaagtcgaggataacgacgttgagtttctggtcgagttgaaccacttcttcgggatggcttacgcggccccaagagaggtcggtgatgtggataagaccgtcaacgccaccgaggtcgatgaatacgccgtaggtagtgatgtttttaactgtaccttcgagtacctgacctttttcgagtttggcgatgatttcacgtttctgctgttcgagttcagcctcgatgagcgctttgtgtgaaacaacaacgtttttgaattcttcgttgattttgacaactttgaattccattgtcttgcctacgaagatgtcgtagtcgcggatgggcttaacgtcgatctgtgatccggggaggaatgcctcgatgccgaatacgtcgacgatcatgccgcctttggtacggcatttgatgtaacctttgatgatttcatcgttggcaagagcctggttgacgcgttcccaagaacgagaagcgcgggctttgcggtgtgagaggatgagttgtccttttttgtcttcctggttttcgatgaagacttctacagtgtcaccaactttgatgtcggggttgtagcggaattcgctcatggggatgatgccatcgctcttgtagccgatgttaaccactgcttcgcgcttgttcagggcgatgatggtaccttcgattacatccttgtctttaacggtgttaagcgattcatcataagttttggtgagttcttcgcgagatttctcaccgggagtttcgccgttttcgtaggcttcccaatcgaagtcttcgagagggctgttttttaattcttcagtcatgtaaaaagaatggttaataaatagggttaattaaatcacaaaatcacggttgcggcaggccgcaccgtttgcgtgtgcaaagttactacttttcaactgattaacaaatgttttatgaacttttttacgcaataaaatgaaaatgtggggaattttatgtaatttagcaccgtgattcgctccgaggttctgcttttttgtggtgcttcggtgcagttcgcatgttttatttaattgattgacaggcttatggctaaacatataagggtnggtattacccagggcgacattaacggcatcggttatgaggttatnctcaagactctggaggataaccgtattctggaattatgtactccggtggtttacggttcggcnaaaattgcggctttctatcgcaagttgcttgagatgccgcaggtgccgttcactcagattgantcgcctgaccagattcaggctcctgccaactatatnattaatgtggtgggcgaggaggtacgccctgagccgggtgtcgactccaaggctgccggtgaggctgctctggctgcgctggagcgtgcggtaagcgaccttaaggagggtaagattgacatcctggtgactgctcctatcaacaaacataacatccatggcgatcagttccagtttccgggccatacggagtatctgcagactgctgcagccgagggcgaggctatgatgatcatggcttccgacattatgcgagtggctctggccacaatccatgtgccggtgcaggaggtggcgtcaatgcttaataccgagatgattacggagaagattctgcgtctggccgataccatccgacgcgacttcggtgtggtcaaacctcgcatagccgttctggcgctcaacccccatgcgggcgacggcggtgtgatcggcaacgaggagcaggaggtgatgatccccgctatcaacgccgctaaaaacaagaaggtgcaggtctatggaccctatcccgccgacggctttttcggcagtgagaattatactcattttgacggcatcctggccatgtatcacgaccagggtctggtggcattcaaggctcttgtggggcaggacggggtgaacttcaccgccggacttccctttgtgcgcacttcgcctgaccatggaacggcctacgacatcgccggaaagggtgtggccgatccggaatcgttccgacgtgccatatacatgggcatcgacatctggcgcaaccgccgcaatttcgaggagatgaccgccaacccgctgcgcaagcagtatttcgaccgctcgaaggataacgtagttcttgacttaacaaaagattcataagattatgcatttcgcgataatagcagccggtgaaggatcacgtctggcgcaggaaggggtagcgctccccaagccgttggttaatctttgcggcacccccatgattcagcgcctgatcgacatttttctggagtgtggtgcggaatcggtctcaataataattaataatgagatgacgcaggtgcgcgagtatgtcgagagcctcacgctccccgtaccgctgaaggttgtggtaaagtccacccccagttcaatgcatagtttctacgaagtgagccgtcatttcacctcaggaaaattcatcctcaccaccgtcgacaccattttccgccccgacgaattcaaaaagtatgtcgaggcgttcgagaaggatgacactgttgacggctacatggccgtgacatcgttcattgacgatgaaaagccgctctacatcgacgtggattccgagatgatgataaccgccttccgcgacaagccgtgggagggtgtgcgctacatctccggaggaatctacgggctgacatccccagcactccgcacactggagcgttgcatagaaacgggagtgtcacgcatgcgcaactatcagcgtgccctggttgacgacggactccgcctgaaggcttatccattcaagaaaatcattgatgtcgaccatcaggccgacattgtcacagccgagacttttctcaaagaataacccaatcacagcaagtttcaacttatgtcagagataaaaatagcgggagtaatgcgcgccggtgcatattctcccaatcatataggtaacgacaccgccattttcaatgccaccgtcgagcaactccgcaagcgtggctgtgaagtgaccatctacagcgaggagcaactgatggccggcgaagtcaaggaacgcataatcgtcaatatgtgtcgcgaacaacgctccatagccattctccagcagatggaggacgacggatgtctggtgataaactcaggctacggtattgaaaactgtacacgcgagcgcatgacacgcatactgatagccagcaacatcccttatcctgaaagcctgattgtcaacaccaacgaagtgatacgcgaccgactcatcgaggggggatacacccaggcatggatcaaacgcggcgacttccacgccatgcacaaggaggatgtgagttacgtgcgccatcccgaagaagcccaggaagtgcttcaggaatatttcctgcgcggaataaaccgtgccgtaatcaaccgccaccttgtcggtgacctcatcaagttttatggcgttcagggcacagatttcttcttctggttctaccccttcgacgagggacacagcaagtatggtcatgaagccatcaacggcaagagccagggtatagagtttgacaaggagaaaatgaaacagatatgccaggaggcctccgaagtgctggatgtgaaaatctacggcggcgactgcatagtgtcgcccgaaggtgacatacgcatcatcgacttcaacgactggcccagtttcgcaccctgccgtaacgaggccgcgcctttcatcgctaaatgtatattccaggcaattaaagaccgcaaaaatcagaaatgagtacagaacagacgcaacagaaatcatcctatcgcgactccctgaagtcgatggatacggaggaacatattgacctggcattctaccgcccgataggctacgcatgggcctgcctggctgcgaaactcggcataactcccaacgccatcaccatagcctcgatattcctcggtgtgggcgcaggtgtctgcttcggctacaactcgctccttattaatattgtgggtatgctgctgctgatatgggcaaactcattcgacagcgccgacggacagttggcccgcatgaccaagcaatactcccgcataggccgaatcctcgacggtgtgtcgggcgacttctggttcgctgccatctacatcgccatctgcatacgcgaaaacaacacctcctacctgttcatttcccacccctggctgatatggctcattgctgtcgtaaccggcatctgccacgccaaacaggctgccatggccgactactaccgtcagttccatctctacttcctcaaaggggaggcaggcagcgaactcgacaattctctcgacctgaaaaggaaactcagcgaactctcctggaaaaacaatttcttccagaaactgacactcacaacctacaccaactacaccgtacagcaggaagcaacagcacccgccatgcaggcgctccgtcaggaactggctaaacggttcccatcgggagtgataccacaaagtttccgcgatgcattccgcaaagcctcgctcccgctgatgaaatacactaacatcctctcgttcaactggcgaaccatagcactgttcaccgctctgttcctgaagatgccctggctctacttcgctttcgaactggtggtgctcaacgcgctgctcatctatatgattctgcgccacgaacgtatatgccgtaaatttacaatcgaacttaaggatggaaaatattaaaggtataatctttgactacggaggcacaatcgacagtttcggtcaccattggagccatatcatagacgagggctacaaggctgccggaatagtacttgacactcaggtgttccgcgacgcttacgtccacgctgaacgtgcccttgcaaagcaacgcataatcctccccaccgacaatttccttgtgttgatgcgcaagaaaatcagaatcgaactgcagtggctggccgacaacggtcatctacccgcttccgctcccgacagtgagtgctgcgaaaccatagcacgctactgctacgactatgccgcctcatcggtcaatgccgcccgtcccgtgctggaaaaactctccgcacgctatccgatggtgctggtaagcaatttctacggcaacgtcgaggaggtgcttcgcgatttcaacatccgccaatatttcaatggtataattgagagtgccgtggtcggcgtacgtaagccggacgcacgcatattcatgctcggcgtagtggccctcggactggcgcccgaacaggtacttgtggtgggcgattccctccgtaaagatattctccccgcacgctcaataggctgtcagacagcatggataaagggtcgtggatggacccccgaggaagatgccgcagaggattccgccctcatcccggcgctcgcttcgctccccgaattgctgcaagcataatttacaatcgttcacacttcaagcctctaaattcctgaatttagattatctttacataatttagaatgtttttaccaaatgtttatataaataaatattttttaacattttaaggggcttaggaataaaaaacaatgtgtacttttacacgctcaaatcaaaatgagcgtataaaatagaaatcaaaaccaattaaatattacaaaaatcatgagtaatgtaaagaaagccgaaggtaaactcggcgttatggtcgtgggtctcggtgccgtgacatcaactttcatgaccggtgtacttatggctcgtaaaggccttgctaaacctgttggttcaatgacccaatacgataaaatccgtgttggcgaaggtgaaaacaaaaaatacctcaaatataacgaaatcgttcccatcgctgacctcaatgatattgtattcggtgcttgggacgtttaccccgcaaacgcttacgaatctgctatcaacgcagaagttctcaaagaaaaggatatcaaccccgttaaggaagaactcgaagcaatcaaacccctcaaggctgctttcgacaaaaactacgctgcccgtctggacggtgacaacgtgaaacagtgcaaggaccgttgggacatggctcagcagatccgcgaagatatccgcaaattcaaagaagaaaacggcgttgaccgtgttgtcgttctctgggctgcttctaccgaagtttacgttccagttgacgaaaaaatccacggcactgtagaagcactcgaagcagcaatgaaggctgacgacaaggaacacatcgctccctcaatgtgctacgcctacgctgctctcaaggaaggtgctcccttc

SEQ ID NO: 2027 - DNA, 21656 bp, synthetic construct
  misc_feature 1..21656: note = Synthetic
  source 1..21656: mol_type = other DNA
gctggccggcattccgtcggtcgtctacggattcttcgggctcgtcgcggtcgtgccgctggtacgcgacgtcttcgacctgccggtcggcgagacggcactcgccggcagcctgattctggcaatcatggcgctgccgacgatcatcaccgtcgccgaggatacgatccgcacgactccccgagccatgcgcgaatcgagtctggcgctcggcgcgacgcattggcagacgatccaccgggtcgtgttgccgtactcggcctcgggcatcgccgcggcggccgtgctgggcatcggccgcgcggtcggcgaaacgatggccgtgctgatggtaaccggcaatgccgccgtcgtgccgcactcgctgctcgagcccgtgcggacgattcccgcgacgatcgccgccgagctgggggaggctccggccggaggcgcccactacgaggcgctgttcatgctgggctgcatcctgttcctgctcacgctgctgctgagcatcgcggtcgagatgatttcggcccgacggcccaagacgatgtaaacaaggaaaccgcgccgacgcccggagaaagattccccgccggcgcgcgagaaacgaaaaaaacaataacgaacggacaacatgataacgtcctcgaaaatatcgaaacgcaagaagcgctcgcaacaactcgctttcgggctgttccgactgacgagcctgctggtcgtggccatactggtatggattctgggtttcatcatcgtcaaaggagccggcgtcgtcagttgggaatttctcacctcgatgcccgaaaacgggatgaccgagggaggcatcctgccggctatcgtcggcacgctctgcctggtggcgggcagcatcgccgtcgcgtttccgctcggcgtgatgtcgggcatctatgtcagcgaatacgcccgcgacaactggctcgtcagagtgatccgcgtcatgacgagcaacttgagcggcgtaccgtcgatcgtgttcggcctgttcggcatggcgctgttcgtccgtacgctcggattcggcgactcgatcatcgccggctcgctgaccctcgccctgctcgtgctgccgatcgtgatccggacgaccgaagaggcgatgcgctcgatcgacaactcgctgcgcaacggcagctacgcgctcggcgcgaccaaactgcagaccgtctggcgcgtactgctgccgatggctttcccgaacatcgtcaccgggctgatcctctcgatcggccgcgtgtcgggcgagacggcacccattctgttcacggccgccgcctatttcctgccgaaactgcccgacagtattttcgatcaggtcatggccctgccttatcacctgtacgtgatcgcaacgagcggaacggatctggaagcctcccgtccgatggcttacggaacggctctcgtgctgatcgcgatcgtattgctgatcaatctgctggcaaacggactgagacgctatttcggccgcaaagtgaaaacgaactaacgaaaccctatcgtcatgatcaacataagtgcgaaagacgtcaacttctattacggcagcttccacgcgctgaagaacatcacgctcggcatcgagcgtaacacggtcacggcctttatcggcccctcgggctgcggcaagtcgactttcctgcgattgctgaaccggatgaacgacctgatcgagggaacgcgcctcagcggcgagatccggatcgacggcgaggacatctacggccgggacgtcgaggtcgtcgagctgcgcaaaaaggtaggcatggttttccagaaaccgaatccgtttccgaagacgatctatgagaacgtcgcatacggactgcgcgtgaacggcgtccgcgaccgccggctgatcgacgagcgcgtcgagagctcgctcaagggagccgcgctgtgggacgaggtgaaagacaagctgaagaaatcggccttcgagctgtcgggcgggcaacagcagcgcctctgcatcgcgcgggcgctggccgtgcggccgtcgatcctgctgatggacgagccggcctcggcgctcgacccgatctcgacatcgaaaatcgaggacctgatctacgaactgaaaaaggaatacacgatcgtcatcgtcacgcacaacatgcagcaggcggcgcgcgtcagcgaccgtaccgcattcttctacatgggcgagctcgtcgagtacgaccagacccagcagatgtttctgaacccctcgaaagaggccacgcagaactacgtgaccggccggttcggctgattcggtacctttgcgccgcaagcgcctgaaagagaccgctcccgaacgactgcggagagagaaaaaacgacaaccgcaggaccgggcgcaaagccgtcctccgccggatcggacacccgcgacgagaggctttcccgtccgaacgggacgctccgtaaaccgccgattgaagcaaaaacatcaaataccgaaaatccatgcgacataccgaagaatcgatcaagcgcgtcaaaaaaagcctggccgagatgtggcttctcgtgcaggggcaggtcgaaaaagtctcagccgccctgctcgagcggaaccgcgaactggcgctcgaagtgcgcagccgcgaaaaaatggtcgatgcctacgagctgacggtcgaccgcgagtgcgagaattttttcgcgctgctgacgccggtagccgtcgacctgcgcatgatgctgtcgatcgtcaagatcaacaacaacctggagcgcataggcgacttcgccgacggcatcgccgtcttcgtcgtcgaaaacctcaacgacaagatcacgccggagctgatcgaacggctcgaactcaaacggatgttccaagagacgctgtgcatgctgagcctgtgtaaggcggccctggccaacgaggacagcgcgatggcgggcaaggtcttcgccaaagacaatctggtcgaccggatcaacgccgacgcgatcgccgtgctggccgagcacatgagcgcgcatcccgacgcgatcacggactgtctgcacctgcattctgcgatccgccgcatcgaacgtatcggcgaccggtgcagcaacatcgccgaggacatcgtgttctatctggaagcgcgggtactcaaacaccacgataccggaccggccgaagagaagtaacggaccgcccgaagagctccggattttcccgttacccgagaaacctcccttgcgccggaagcgggctgcggcgcccttccggcgccgtttctccgcacctggacacgggaacttccggttactccaacgagggcaagcgtttcaacatatccctgatccgaacggccgtccggggcatcggctcggctaccgtcagaccgaccacctcccgcgcccgggcaatgtcgccaatcagccggacgacctgatcgacggtcatcccgtccggaacgacgcccacggccgcaacgagatcggccggatcgagcacgtccagatcgaaatggatcagcaccttcgaggccccgcaactttccagccactctacgaccgcgcggctgtcgccggccacgtcctgcggagcgaggtgcgcgatgccgagctccctctgccgcgccctgatttcgtcgcgctcccaatcgcgcagaccgaccagcagcacgcgcgacgggtcgatgcgcgcaggcagttcggcaagtatcttcgcatcgccgagacccatgcaggccgcgagcgccatcgcatgatagccggaataagcgtcgccgggcaaggtgatgtcgggatgagcgtctatccagatcacggccgcgtcatccccgtacttcccggccagaaaggcgaacggagccgcgctgacggagcagtcgcccccgaacgtcacgatccggtcgggatcgccggcacgcagcatgctcacggcggccctcgtctgggcaacgatcgcatcgcggtcgagcactccgtccgtcacccggcgctccgcaatgccgtcggcgacgggaaccgtcagcgtttgcacgctgctgtgcggagccagaaaggcgagcagctgcgctcccagaaaatatcctctcgccgcatcgtcgggattccttatctcgggaacccatcggacgatgtcgccgccctgccactggggataaatcaggcgaaccgttctcttttcgttttccatatcgcgaaatctacaacaagataattaccatatcgatacgccaagagctcccgcatggaatctcacagtcgcggactgcggctacggaccgcgcgtccgatccgctttcccggcaccccttcgccgaaaggaacttcgtttcgggacgaaagcgttgaaaattcgacagccggatacggcaagacatctatgcgggagttctataccgtatccgcagcacgtttccggaacgcagacagaccggcttgcgcacccgatccgccttgcgtgcgggacatatccggtccttcctgtggcgacagggcatccgcgacgccttcgtcatcgccggccccgttcccttcagtcccgccaaacgatccggggaaacgcgcttcgcaatggcttccggaccgcagggaacgaaatgccggcacgcgtcgtccccattcaaccatatctcgatacgttgcgtccggaaaattgccgacccgcaagccccccgcactcaggagacaaaagacctccggacccggaattttcgccgagagccggaaagcgttccggatccgcgcccgaccgaaaggccggccgaacgaccgggagccgtcgggctcgaaagcaagagcggcaagcgttctttccgcacggcccgtcaccagcgcggtgtcatcgcattcggaaaataatgcaggtcgcattccccgtccggccgatactcgaccgtcaccaaatcgaactgcgtatccgtatcgaagccgtagagcgcgacataatgctcggcggcccgcatcagcgccgcgaacttgcggggcgtcatcgcctcctcgggcggcgagagcgcgccgctccggcggcacttgacctcgacgacatggagcacgccctcgcgcagagctacgatgtcgagttcgtaacgcccgctgcgccaattgcgatgcaacagctcgaacccgttggcaataagccattcggccgccgcctgctcgcccctcaggcccgcctcgcgcgactgcacggctaatccagtaagaaattcagatcgtcgccgggccgtacctcgtagggtgcctgccccttgcggaagatccgcatcggacgttcgcctatcagctcgatccgcccgttctcgacacgcaggatacatccttcgcgaagccctgcgaccgtcatgcacggattggcttcgacatactcgagcagccgctgttcgcgcgtctcgccggcatgaccgtcgggatgggcgtcggtatagtgcggattgatctggaacggaacgagccctgccgccgtgaacgtagccggctcgacgatcggcatgtcgttggtcgtgcagatcgtcggacaggcgacattgctgccggcgctccagccgacgtacggaacgccttcgggcaccctctcgcggatcaccctcagcaagccctgctcctgcatcgccttcacaagcgcgaaagtgtttcctcctccgacgacgatcgcctccgcctgcgacagcatgcggaccggatcgctctcgcgatgcaccgaacgcacatcgatgccgagttccgaaaaacgggcctgcactttggtcaggtaatcgtcataggaaaacgtcacggccgcataaggcacgaaagcgacctgccggacaccgccgaggaaatcggcgatctgccgcttggggtactcgagataagcctcgccggcattggtcgaattgctgatcagcaacaggcgcatcgatggttttctcttcatatcgcatacgtttagtttgtctatttccgcttcgatcacgagaggataatagcggtactccagagcgtgcaccttctcggccacccgctcgggcgtatcgcccggctcgacctccgtgcggtagcgggccacgatgtcgccgctgtcgtaatgttcgttgacccggtggatcgtgatgcccgtctcccgatcgcccgattcgacgacggcccggtgcacccggtcgccgtacatgcccttgcccccgtgccggggcaatagggaaggatgcacgttcagaatccggcctccgtaagccccgagcagattgtccggcacgagccacaagaatccggccaacacgatgtagccgatcccctcgcgccgcaatctctcgacgacccgatcgctattataaaaggtatcgcggtcgaaaatttccgtcccgatgccgagcctgcgcgcccgttcgagcaccggcgcgtcgggacggttcgacaggatcagcgtcacgcgggccttctctcctgccgcgaaataagaggccacattctcggcattcgtccccgaaccggaggcgaacacagctatctttatcataaacaatgatttacagaatcaaaatccgattaaatgcgcaaaaaacgcttcggatgaccaaaaataatccaaaaagtattacttttgcaaaaatttggctttgaaatagaagttatttttcggaataaacgcaattgtcaaacttaaactattggtattatgtcagacgtttcatcaaaagtagtggacatcatcgtcgacaagctcggcgttgacgctgccgaagtggttcccgccgcaagcttcaccaacgacctcggggccgactcgctcgacaccgtggagctgatcatggagttcgagaaggaattcgagatctcgattcccgacgaagacgctgagaagatcaccaccgtaggcgacgcaatcaactacatcagcgagaaaaagaagtaatttttcaggcctttgaaacaggcgtttgtcgaacgaattgaccgaagttctatgaaacaaagaagagttgtggtaacggggataggcaccatcaaccccttaggcaacagcattgaggaatatttctccaaccttgagaaaggtgtgagcggagcaggacccattactcatttcgacccttccaacttcaaaacgaaattcgcctgcgagctcaaaggctacgacgccgccagtttcttcgaccgcaaggagttgcgcaagtacgacctgtactcccagtatgcgctcgtcgctgccgaacaggccgtcaaggactcgggcgtcgatttggagaagatcgaccgcgatatggtcggagtgatctggggctccggaataggtggactggaaacgttctaccaagaggtaaagagctatgttgagggcggctttatccctcgatatagccctttcttcattccgaagatgatcgccgacctggctgccgggcacatctcgatgaaatacggcttccggggtcccaacttctgcaccgtttcggcctgctcgtcgtcgaaccatgcgatgatcgactcgctgaactacatccgctggggcaaggcggacatgatcctgacgggaggctccgaagccgccatcaatcctccgggagtgggcggattcaactccatgcaggctctttcgacccgaaacgacgagccgcagaaggcctcgcgcccgttcgatgcggaccgtgacggcttcgtgatcggggaaggcgccggagcgttgctgctcgaggaatacgagcatgccgtagcccgcggagccaaaatttacgccgaagtggccggcggcggcatgagcgccgacgcctatcacctgaccgcgccccatcccgaaggagtcggagcgaagaaatcgatgaccgacgcgatcaaggacgccggcatcgctcccgacgacatcgactatgtcaacacccacggcacgtcaaccccggtcggcgatttggccgaagtggccggcatcgtcgcttcgttcggagaccacgtatacgatatgaacatcagctcgaccaagtcgatgaccggacacctgctgggcgccgcaggcgcgatcgagggtcttgcctgcatcatggcgatcacgaaagggatcgtgcctccgacgatcaacgtcgagaacctcgatccgaagatagacccgaagatcaacctgacgctgaacaaggcgcagaagcgcgacgtgaagtacgcgctgagcaacacgttcggcttcggcggacacaactcgacggtcatattcaaaaaaatctgacggacgtgctcgaccggatacgattgtactggaagctgcatcacagcagggacaaggcgtattacaaggcactggacgggattttcggcgtctgcccgaataatatagagctttataagctggccttgattcacaggtcagcttctctttttctggacgacggcacgccgatcaacaacgagcggctcgaatttttgggcgacgccgtgctcgagtcgatcgtctcggactatctgttcatcgagtttcccgagcagaacgagggctttctgacgaagctgcggtcgcgcatcgtcagccgagcgtcgctgaacaagctggccgtccgtatcgggctcgaccggcacattatcacgcagggcaactacagttcccagcagaaaaacctctacggcgacgcgctcgaagccatggtcggagcgctctatttggacaaggggtacgatttcaccaacagattgataataaaccatctgttgaatcgatatatcgatttggtcgatatgaccgagcaggagaccgacttcaagagccggctgatcgagtggagccagaagaacaagcgcgccctgtcgttcgacacggtgccgagcccgctctatacacagaaaatcccgcactttcacacgagcgtctcgatcgacggacagccgaccggcaccggcgagggacacagcaagaaaagctccgagcaaaaagccgctctgtcggctctgatccggctccgcgaaacgggcgagcacggcacggcggagcatatcgaagagtaaatgcccgccgcagggcatcacgatcaaagacctgatcatcatggaagatcacccgctttccgacaaacaggtccgggaaaagctcattgcccggggagcctccgcattgacggataccgaactactgagtattctgcttcacggcagcggtcccggcggcccgaccaccgagctggccgggcgcctgctcgaccgcttcgagggcagtttggcgcgaatgggccggtgcagtctggcagaactgcgctcggccgagagtctgggcatcgcccgggccgccgtactgtccgccgcgctggaactgggccgcaggctgagagccgagcaaagccggtcgctcgatcaggtacagaccgaccgcgacgtaatcgagatgttccgtccgctgatcgccgagctgccttacgaagaattctgggccctgtatctcaactcgtcgaaccgggtgctcgaccgtgtacgtattagccagggcggcgtatcggccacggtcgtcgaccaccggctgattgtcaagcgggccgtcgaaaagctggcccacgccgtgatcctcgtgcacaatcacccctcgggcagcgaactcccgagcgaggaggaccgcacggtgaccgagcgcgtcgcgcaagccgtctcgctgttcgacatcgcgctgctcgaccatatcatcgtcacgcccggcccctgttacagtttccgtaacgaaggctttttcgacggtagagattagcctcccctcggaacatttccaccgaaatcgctcaaaacgtcttccggcacggtgtcccgtgccgtttttttgctttctgtcgttccgtttgtactctccgattcggcttcctgacttccttcatctcgtccagctccggacaagaccggtcctgtccgacccaatccgcagcccggcagccacgcttaaatccgctcttaagaaaccaaaccccgatcacaaaaaagtctccacggagtacgcggagacataggtataaaaccttcggcctatagccttattgtgataagatgtagaactcttacgcttcaaatataataaaaaagccttgaaattgcaaaattttatttaattttgctataaatgaacgccgatatgacaaaaatattaggattggacttgggaaccgcctcgatcggatgggctctcgtagagcggaacgacacgggatatgccttgctcgaccaaggggtagacatctttcaggaaggcgtggcacgcgaaaagaacagcgagaagcccgccgtgcaagaccgaaccgcagcccgcgccctgcgccgtcattatgcccggcgacgattgcgcaagatcgacctgctccgtgtgctcgttcgccacgacctctgtcctgctctgaccgacgaacaactgaaagattggaaacagaagaaaatctatccgctgacggacgagtttatccgctggcaacgaacggacgaccgcacggacaagaatccctaccgcgaccgctacaaggcgctgaccgaaacgctcgatctcgacacgcaaagggaccgttacacgctcggccgggccttatatcatctggcgcagcggcgcggattcctgagcaatcgcaaggatgccggcgacgaaagcgagagcggtaaagtccgacagaacatcgaggacctgacggtcgacatggagaaggccggatgcgcctacctgggcgaatacttttatcggctttacgcccgaaaagagaaaatccgtacgaaatacacctctcgcaacgagcactatctggccgaatttcgggccatctgcgaaaaacagcggctcgccgacgatctgaggaaggcattgcaccgcgccattttctaccaacggccgctgaaatcgcagaagggatcggtcggccgatgcacgttcgagaagggcaaaagccgctgcccggtatcgcatccgcgattcgaggagttccggatgctctccttcgtcaacaacatccggatcacgacgcccgacgacccggaacctcgtccgctctcgcgacaggaaaccgaaacgatcctgccgcttttcaggcgcagaaccaaatcgcacttcgatttcgaggagatcgccaagaagctcgccggcaaaggccgatacgcctgccaaggagaccgtagcgaggcgccctatcgcttcaacttcgcgcggacagccaccgtcacgggatgcccggtcacagcttccctcattgcgctgttcggcgacgactatctgacgaaaatatgcgacctgtatacgctcggggccggaaagacccgagaacagatactcggcgacgtatggcacgcgctcttctcgttcgacgacgaagaacggcttagcgcgtgggcaaagcagaaactgcgcctctccgacgacgaggccgggcgtttcgccgccatccgcctactgcaggactacgctgcgctgagcctccatgccattaacaagattctgccctacctgcgtgaaggttatcgctatgacgaggcggttttcgtcgccaacctcaaggcggtgctgcctccggacatctactccgacgaatcggaacgaagcgctatcgaagccgacatcgccgcgctgataaccgatttccgacggaatccgctgaacaggggaacgaccaaggagcaatgcgtccgcgactatctgcgcaactgccggggcatcgacgaaaaacgcctcggacgcctctatcatccgtcgatgatcgaaatctatcagacggcgcagcccgatgcgcagggcatcctgtaactgggctcgccccgaacgccggcagtacgcaatccgatggcgatgcgggcattgttccgcttgagggtcttggtcaaccggttgctgcgcgacgggaaaatcgatcgcgaaacgaagattcacatcgagttcgcccgaggactcaacgatgccaaccgccgcaaggctatcgagctgtaccagcgcgaccgcgaggccgagcgcaaagcgtacgccgacgaaatccgccggcaatacgcctcggaatcgggccgggagatcgaacccaccgacgacgacatcctgaagtaccgtctgtggaaggagcagaaccacatttgcccctacacgggcaaacagatcggcctgtccgacttcatgggcgattccgcgcgtttcgatatcgagcataccgtcccccgagcgaggggaggcgacaactcgcaaatgaacaagaccctctgcgagaaccgcttcaaccgcgaactcaagcgcgacaagcttccgtccgaactcccgaatcacgccgacgtcatggcaaggatcgacgaactcgggtggccgaaggaaatcgccagcttgcaaaaacagatcgaaatacagaggcgcaagagcaaaagcgctacgaccaaatcggaaaaggacggagccatacagcgccgccatatcctgcagatgcgactcgactactggcgcggcaagtacgagcgcttcacgatgacggaagttcccgacgggttcagcaaccggcagggggtcgatatcggcatcatcggcaagtacgcgcgactctatctgaagacggtcttcgagcgaatccatacggtcaaaggcgccaccacggccgaattccgccggatgtggggattgcaggaggaatatgcccggaaagagcgcgtgaaccacacgcatcactgcctcgacgcgatcgtcatcgcctgcatcggccgcaacgaatacgaccgttgggcgcagtacgcgggcgacgaagagcgttacagacggggcgaaggagcgaaaccccgcttcgaaaagccgtggccgacttttaccgaagacctcgaggccgtcgccggcaggcttctcgtcgcgcatcatacgcccgacaatatgcccaagcagagtcgcaagcggctgcgcatccggggcaggatacggaccggcaagaacggcgagacgctctatgcgcagggcgatacggcccggggagccttgcatcagcagaccttttacggagccatcgagcgtcaaggagaggtgagatacgtcgtgcgcaaaccgttggggcagcttcagccgtccgacgtggataatatcgtcgacgacgcagtgcggcaaaaggtcaaggaagcgatcgacgcggtcggcttcaagacggccatggacacggagagccatccgatctggatgaacgagcggaagcggatacctatccgcaaggtgcggatattcgcaggcaagaacctatctcccaaacccttgggagagaagcgacatcgggatctgtccgctctcccgcacaaaagaccggtttacgtatcgtacggcagcaactattgtatggccgtatacgaaggaaaagacaaccaaggaaagttcaagcggactttcgaaatcgtcagcacgctggaagcggcgcagtatttcaaggcgagcgcggacaaggcggcgcggcccgacctcgttccgcaatcggacgcgaacggctttccgctgaagtgcatcctgaaaaccggaaccatggtgcttttctatgaagaaacgcccgaggagctgtacgaatgcacgcaacaagagttggctaaaagactgtacaagctgacgaaattcagttctatgaccaccggcaacaactcttacggcttatgcaccttcagacaccatcgggaagcccgtcctgcgggagagctgaaatccaagaacgggacatggaaggtcggagaggcataccgccccatcatcaatctgctccatacccaactcaacgcttacgtcgaaggcttcgacttcgagctgagcgttacgggaaccgttcgattcaaacacgaatagccatgctcaagcgcgcgctcttcttctccacgcccttctgcctgagtctgcgagacaatcagttggttatcgcgacgaaagaggctcccaacctccggaaaagcgttccgatcgaggacatcggcgtcgtcgtgctcgagcaccagcaaacgaccgtcacgctcccgctgctgaacgccctgtcggatcgcaacgtagccgtcgtcttttgcgacggcaaccggatgcccaacgccatgctgatgaatctcgactccaaccgaacgcagggcgagagctaccgggcgcagatcgaagcgagcgagccgctgaaaaagaatctgtggaagcagatcgtcgaagcgaaaatccgcaaccaggccgccctgctgcgcaagctgggcaaagacggagacaaactgaaacccagctacaagaacgtcaagagcggcgatgcggataatcgcgaaggagccgccgccagaatatactggtcggagcttttcggcaaggagttcgtccgtattcgcgagggcgcggagccgaacaacctgctgaattacggctatacgatcctgcgcgcggccgtagcccgctcactgatgggctcgggtctgttccctgcgttcggcattttccaccggaaccgctacaacgcctttccgctggccgacgacgttatggaaccctatcgcccttacgtcgacgagctggtctgccggctgtatctcgagaataaaacgcagttgacgcaagcggtcaagggcgagctgctgagcctgctgtatgccgatacgcgattcgaaaaggtattgcggcccctcgacgtggggttgaccttcacctcggcatcgctggcgcaatgtttcacgggaatgcggaaaaagatcgcgtttcctctactggagtaaaaaagatgtctgaattacgcctgaacgcctatcgtatcatgtggctattcgtatttttcgacctgccgacccataccaaaaccgaacggcgccacgcggcccagtttcgcaaggcattggaaaaggacggtttcgcgatgatgcaatactcggtctacgtccggcactgcgtctccaaggaaaatatggaggtccatatccggcgggtccgcaaatcgatgccgccttccggaatgacgagcatcctgagcgtaacggacaaacaatacggcgagattttgaatttctggggcaaggtcgaacgcgccggtcccgagatacctcaacaactggaatttttttgatatatttgttttgcagaacggaaaaactgcatcgaatcgacttcctcagttcgccgaacatcgctttttcgcggcacatacggatgtaatacccttataatcaataagtgtagtacctgaggttgtgatttgatgtagaaattggatactatacaacaacagagatctcggactgccaattgactggttgtgatttgatgtagaaattggatactatacaacaataagcaattaacgtaagtactcctattgttgtgatttgatgtagaaattggatactatacaaccctgataaccaatatcattgtacagcggatgttgtgatttgatgtagaaattggatactatacaacggcaacttaagtattttaacccgattgccgagcactagtacgatatggaataaccgcagcatcggaccggagaccgggaaccacagcgggagtgcggaaattatccgtcagtttataggtcgtggtacggggcggacgctcgttgccgatgagcaggcggtttcttgccgaccgaaaagtaatgggaacatgtttgccgcgcaggaaggatcaccgcttattgtttgggagacgatgcgacaaattcggcgaatatgacaggccttatgaaaatgccggaagaagcgcacatgcgataggacagaaaaagcgaatacatgagacttacgacacacacgggaatttacaggaatattgccaaggcgactattctcatgtaagtcctggcggcattcaaagtttccgtaatgctcgggacggttcgtactacgtccctgccggacattaccggttaccataaaagactgggctttaacaggtaacattaatacagcatacggcctccggagggctgtccctgtcgaaaagggcggtaagaatagaaacaggcataatcccggataaaaacggcgacgaacgaagatacgacaaagcggagagcgcgacaaattccgtcgtgtcattggaatccgatcggacaccgggaacatttcgggaataatcaaaaaaagaacggcttctcgggtatctgagaggccgttcttgtacccggagccggttttgaaaagtcaaaaactatgcaaatccactaaatcgaaaataaatcataatatattatatatcaatacataacgattgcattcgtttgaattggcaagaatggaattttcgtagtttcctgaaaatgcggacaaattgcggacacaaaaagttgtgtgtattcgtgaatttacatacctttgaaacagagaaattcgaggtatggcacagacgaactactacatcggtaagacggccaacagcgccggagaatcggaaatcaacctgcgactctacgtttcgcgcgacattcgtattcgtatcggttccggaatatggatcgaccgcaaacgctggggtaagaaaaacgacatcaatatcccgctaattcagggagaagaacgggaacaacttttgggaaagcgttcccggcttaaagccttgacctacctgttggagcaggagatcaacaccgcacccgacaaggccgccatcacccgcgaatacatgcaaggtatcgtcaagcggttccacaaaccgaccaaagcgaaaaaggaacacgaaaagtcctttttcgacgtgatagatatttaccttgccacacacaagttgtccgaaaaccgattgaaaaattttcgggtattggtacgctgcttacaccgttttgagctatacaagcgggcggaggagagccggggattctcgctttcgttcacaacccttacatcggatgtattagggcagatcgaggattttcttttcaacgaacaatccgtattcctgcgttatccggagatatacgagcaatatccctattcggcgaaagtcgcgcttaaaaccccgaagcggaaacgtccgccggtgctcgacgagaacggcgaagaaataccgaaaggaatgcccaaaccgcgcggattgaatacggtcgccgacatgcttacccgtttccgggcgttcgtcctgtgggctatcgacaacggacatacgacgaacaatcctttcaaacatttcaccatcggcgaaatcgtttacggaaccccgatctacataaccaatgaagagagaaccaaactgttcgagactgacttatccgccaataaagaggtcgagatacagcgggatattttcatctttcactgcttcatcggatgccgcgtcagcgatttgttcaaaatgacctaccagaatattatcggtgattcgatagagtatatccaaagaaagacgaaagaggatcgcccgataaccgttcgcgttccgttgagcaaaacggctattgcgctgattgacaaataccgcgaggaggggcgcgaaagtctgtttcctttttccacggaacagcattataaccgcaagatcaaggaagcgttccggcttgccggactagaccgcattgtaaccgtacccgaccagcggacacgcgcggaggtgcataaaccgatatacgaattagcatcgtcgcacatggcccgccgtacatttataggtaatatctataaaaaagtgaaagaccccaacctcgtgggatcattgagtgggcataaggaaggcagcaaagcgttcgctcgctaccgcgacatcgacgacgatatgaaaaaggagatgatcgggtatttggaacaggcataagtagatcggtaatctctatctgtcaaaatgttaatatatatttgcgattaagaaaacgacataattatggaaaagattacagtaaaggatgttgccgtatcggtcataaaggtaaacgatgaggactatataagccttaccgatatgctgaaagccaaagacggtgagttcttcttttctaactggctgagaaacagaaataccgttgaatttctcggtatatgggaaaaattggtcaatcccgattttaattatgccgaattcgacataattaaaagtcaggcgggtctgaatagctatcgtttaagcgcaaaagagtggatgcagaaaacgaacgctatcggaatcatatccaagacaggacgctatggcggtacttacgcccataaagatattgcatttgagtttgccatgtggatcagtcccgaattcaaggtttatctgattcgggaattccagcgcctgaaagagcaggaacaggcacaactcggctggagcgcaaaacgcgaactgtccaagatcaattatcgcatccataccgacgcgatcaaacaaaatctgattccggccgaagtgaccgcgaagcaggcgagcatcatctatgccaatgaagccgatgtgctgaacgttgccatgttcggcatgaccgcaaagatgtggcgcgagcagaatcccaatctgaagggcaatatccgcgattatgctaccatcaacgagttgatctgtctgtccaatatggaaaacctcaatgccgtattcatcgaccagaaaatgccgcagggcgaacggctcgtaaaactcaatcggatcgccattcagcagatgcaggtattggagaataatgatgagagaaaactactgaaataacgcgatggatttccgcaagttcgacagtcatgtgattctgctggcgatagtcgttgtcgccgggcttctcgtgtctatggtcgcgcggttcgtgatattggccaaaggtgcggatacaggcacggcgaatctcgtctttctgatcgtgctgggtatttgcgcgatattctatctgaccattataacggcatcttccagcgtcgcggatttcattgtccgggtattcatgccgcgtatagcccggaagaaacgccgcgaagcggaagcagaacccgccgaacctgttgccgaacagtccgccccggacatcgaacggatcaagcaggaagccgacaagcggctggctgaacaacagcgggaaaaaatcgcattgttccaacgctacggccagctaaccgtaggtccgtacataacgccggacgaactggcccggctcgattgctacatcgaaacctatgccctgaatcagccttgcccggcagaactcgcacccatccatccgcaaaaacttaaaaatgccgatttgttccatttcgggtggaacatggcccattatttcggacagctgaaacaggaggtcgtgccgtggctgaaatccgtattcgctccgcttgcagacttggaggattcctacatcaagggcaaactctactcgccgcaaacccggcaattcatcattcccaacatagcggatattacgcaatatatggccgagcacgacggctgacaatcaccctcgaaagatatttacgggagattttaaggagataacgagtgtttttgttctccgaaaaatctcccttttcatttgccccggttccgattgaatgggaccagcgaatccatgtttaacctaaaaatttcgattatgagtttaagggatttattggagtcgggggcaaacgtcagcgttactgttactctcgacgatttgaaggctattctcaaggaagcggccaaaggaataaaacagaccgcagaagaaccgaccgcagaagaatttttatcgcgtaaagaggtactagcacttctgaaaatcgactcttccacgctttggtgctgggaaaagactgggtacatcaagtcctacccattcggcgggcggaaacgctacatgcataaggacgtggaagcgatacgcaccggcaggaaaggaggtcgccatgtgcgctaaaatgtccgagaacggaagtccttacctgcgtgtggggactaccatctacaagcgcgtgcgtcagcctttgagcagtgggcggagtatcgaaacgctgatcccgtggaatatcaagacattgcggcaggactatggcaaggactatatcgctcaaatacctaaatacgacggtttctgcaccattcccagccatacggcctaccgccgggagatcgacggattcctgaaccgctacgaaccgatttcgaccgtacctgccgagggcgaatttccccatatccgggattttctcgtccatatcttcggcgaacagcaagaactggggtacgactacctgcaactgctctacctgcgccccttgcaacgactgccgatcctgctgctcgtatcgggcgagcgcaatacgggaaagaccactttcctcaatttcctgaagctgatcttcgaggccaacatgacgttcaacaccaacgaggattttcgttcgcagtttaacgacgactggacgggaaaactgctggtctgtgtggacgaagtgctgctgaaccgtcgcgaggattccgaacggatcaaaaacctatcgacagcccgcagctataaagccgaagcgaagggccgcgaccgccgggaagtagagtttttcggcaagttcgtcctttgctccaacaacgagcgcaatcccgtcctgatcgaagccggagagacgcgctactgggtgcggcgcgtaccgccgctaactcaggacaatcaaaatctgctcgtcgatatgcggcgcgaactgccgggattcctgttcttcttgctgcaccgtgagctatcgaccaaagaagagagccgcatgtggtttgcgccccgcctgctggcaaccgaagccctgcggcggatcatcctctacaaccgaggcaagaccgaggccgaaatgctctccatagcgcgtgagatcatggaggccgaaaatcttgcggagtaccgtttcgacgtgaacgacatggtgaacatgctggaggttcgcggcatccgctccgaccatcccaccgtgcggcggattcttgcggagagctggggactgtcgcccgcaccgcctacatactaccagcgttatacgataacctacaacggcgaaatacaacggttggacagcaagacggcacgggtttacaccctcacgagggagcggctcgacgaactgctcggcgacacggcggcgtaagattgtaagaaaacgggggtagtccgtttatatgcaatactttacatttcttacaaagtatcttacaaaatcttacaaaccctacaaacttacaaagctccggccgcgtaagaaatctgtaagacggataactttttcttttactgtctgttacgtcggttctcttacaaaattacaaaaaaacgactcccgacacctggccatgcactttccccgaaagggtgattcagtctggtaacgttgtatagaacaatcatatacgggacagacacaaccataaaacaaccgtaaaaacacgccaccatgaattacgaagaaataaaacggcgcattgccatccgctcctaccttgcatcgcggggcatcgttccatgcagggaacacggcaaccggggcatgtacctctcgccgctgcgtgaggaacgcaccgccagtttcagcgtcagttacgacaagaacctttggcacgacttcggaacgggcgagggcggctcgatcatcgaccttgtagcccgcatggagggctgctccgagatcgaggccgcacgaaggcttgcgataggagaacacggaatgctcgtccccatccacgtcgaagcgttaagaacaaacgaaccgacaccatcccgcctcgccatcctctccgaccgcgaactgacccacccggcattgctcggctacctgacagggcgaggcatagaccctgccatcgcccggacttattgccgcgaggtgcgctacacgaccggcggcaaagagtatttcgccatcgggttccgtaacgatgccggaggctgggaact

SEQ ID NO: 2028 - DNA, 15798 bp, synthetic construct
  source 1..15798: mol_type = other DNA
  misc_feature 1..15798: note = Synthetic
atttcggcatggtctattgggacgaagccggcgaagtacattatgtgggcgaggacgtgcgttacgtccggacggtggacaggcccgacggatacggcggtacccggaaatacaacctcgctgacgggatgtggacgacggccaccaacaccaacgtcagcccgaacgggaaatacatcgccggtacgttccggagggagagcatggacgaaaccggtcaggtgaacgaaacgaactacccggcctttttcaacaccgaaaccggtaagacggtgatattcgaggagctcgtcggaggcggaggcgtttcggcgacgagcgacggcctgggctttacggttgacagcacgttcgggccgaattccggcaaggtggtggatatcgagaacggcatcgtgctcgggagcgccctcgaatggatagagtccacgtacggtattctggttccggccggctacatcacctacatgcccgacagcaaggacaggttcctcggcgccatgctgtataccggcggtccggtggtcgagggcatcaactggtacgtcggaccggcgagataggacacgattgttttcataaaatttttcaggcgggtgcgccgggcggttttcgttcggtgcacctttttttgtgcgtgcgtttcgctgcgcaggtttcccggaggggcagcgacaaagtaggtatcgccggccgattcttttcacgtgttttaggtattgccggagccaggcggacaccctacttttgtcttcagataaaaagatttttagccatttctttaaagtcggtaaggccggcccccgcggccggccttttgtctattttgacggaatgttatctttgcagaaaacaacatacgccatgcagagaacaggaaaatataccaaggacgacccgatgagcgacctggtcagcgacaactacaggatattactgcttatgagccgcttcggtatcgggctcggtttcggggagagttccataggcgaagtgtgccgtgccaacggcgtggatacctccaccttcctcatcgtgaccaacatgatgctttacgatgagattccggccgatgcctacgacaaggtctcgatggagggtctcctctcctacctgcacaactcgcacgactactttctcggattccgcctgccggccatccgggagaaactcgctgcggcggtggggacgggcagcgacctttcgcgggccatcatgaaatatttcgacgactatacggccggtgtccatacccacatggcctacgaagaggaggtggtgttcccctacgtacgcgccctgctggaggggcgccgccagcaggattacagcatcgacatcttcagccggcaccacgaccaggtggagacgctgctcacggagttcaagaacatactgattaaatactacccgtcggccagtacgaacgaaatcaacaacgtgctgttcgacatcttcaactgcgagaacgacctcgcttcccacaatgccgtggaggacctgctgttcgtcccggcagtcggaagactggagaaaagagtggaggaggaaggatgagcgttacggtcaagataacggtggcggagccttcggtcatcatacgcagcggcatcatcgccgtgatagggagtgccgagaacctgaaggccgagatttacgaggtgagcgaaatcgaccagttgcggaacgtgctttcgtggcagcatccggatattctgctggtgaatcccgcatcgctcggcctctttccgctgcagcagctcaagaaggatacgggcaatcccgacatgaaatgcgtcgcactgcagtttgcatttaccgaccatgccgccctgaaaagttacgacgatgccatatcggtgtacgacagtgccgagacggtgaacgacaaactcgcccggctggtcagcgaaccggagcgcgacaagcggcacgaatcgctgagcggacgggaaaaggaggtcatcgcctgcgtggtgcagggtatgaccaacaagcagatagccgacaagctcttcatatcgacgcatacggtcatcacccaccggcgcaacatatccgccaaactcggcatccacagtccggccggtctgacgatttacgccatcgtaaacaagctggtggagctggacgacatcaaggactccgtagaggagcagctccccggagattaggattgcagccggaaccgcgggcctgccgctgagagtcagcgctggcggtaacgggctaccgtacccgcctccaccaactccgctttggctgctgtccatgcccggaaatggggcgaggcgttatgcgcggcgacggcctcttcgtctgcccaccgttcgatgaaacagaaggcgcggctgtcggccacatcctcgtaaaggtcgtaaaagacgttgccgcgttcggcacggctcgcttcgatgagaggctgtaccgctttcagaaaatcctcctgtttgccctcccttatcacatttctggctactatcgttatcatatcgttcgttgttggtgtcgtgtcggtaccatctctgtcgcgtgcggtcaggcgatgtcggcagtccagtaggagaaggtacggcgcgaaccatcctccatgccgacctcctgcgaccagcggtagggttctcccagccgaaaggcgacggactgccggaagaggggcccgccgtaacagagcgtatggtattcgccgttctcgccgcagaggtcgattccggcggggaagtccgccaccgtcgcgcagttcagtctgcggccgatatactccctgcccaatcgctctgcccaggtcgtggtgatgaccgcctccagtcccgaagcgaggaacgcttccatggcctcctgcggcgagagttcccaaagcggttccaccacctcgataccgtagggccgtagacgctcttcgcggtaggtgcggacgtcgtgcagaaagatgtcgccgaagatgaaacgggtgactccctgcgcccggaaccgttcggcagccagccgcatggcatgcgtatcgtgttccggctcccctcccggcgttacgttcaccgtgcagagcggaatgccgatggatgcggcctgtgcccggagcacccgttcgggaatggcgtgcattgtggagcggccgtcggcgccgctgaccgtcgtcagaagcgatacgacgtcgtatttctccgagcgcagggctgtcagcagtgcgagcgccgaatccttgcctccgctccagttgaagacggctttcatgcgtgcgtccattccgattcctccgtcttttcttttgtgaacagtccgccgaccagcgtgaagtaggggggcaatacggggccttcgctccagcgcagcgggagaccgagcagttctttcgccgtgcgggctacgtcgaacccgcaggcttccagcgaagtgcgggcccggtcgggataacggcacggtttcccctcggtacgcagacagccgccccggccgcacagcaaacagctgcccgcaaaaagggcccggctgccgtgatgacgcttttccgcttccagcaggcgggcatccatcggtcggcgggcatcctctacgatggcataggcggctgcggccgcttcggatacgtcggccggccggtgccgttccttggcgtccaatgttacgaccgccccgatgatgcggatgtggccgtagccggcaagccgttccagcgggtcagtatcgaaaggcggacaaccccatatccggccgtaattaccgcatgcccggcaatattcctcgatgcggcgtgcgtcgcagtagctgcggaggtaatctccggcgggcaggctggcggttatgtagcgggtacagggcatctcggtgcctgcaaagatagcgaacgcgcggcggattgccgcacttttttccgtcggcttcattccctgtggacatttctattttttgtaaagcggccgtaacgctttcgtaacgggctccgggtagttttgcggcgtcaaataattgttcgggataaagatatgagattgtacacaccgagaattctgtcgttttttcttgcgctgtgccccttccttgcggcggaggcggcgcagccgctttactccgtgtcgggaagggtgaccgatgccgccacgggcgaaccggtgacaggcgccgtagtcatggtcaaggatacctacaagggaaccgaaaccgatatggagggccgttggcgcctcgacaaccttgccgcgggggattatacgttcgccgtcagtttcatctcctacaagagcatcgaggtgtcgtgcagggtggccgccgatgtggagggggtggatgtccgcctcgaaagcgattcggaagaggtcgaagaggtggtcgtgaaggcccgtatgcggagcgacaccgagatagccatgctcggaacgataaaggccgttccgcaggtcacgagcggtgtttcggcggcccagatatcgaaaagccccgaccggaacgcttcggaagtcgtccgtcgcgtccccggcatcaccatcatagacgaccgtttcatcatcgtgcgcggcctgtcgcagcgctacaacaacgcatggataaacggactggccgtcccgagtaccgagacagacagccgtgccttctccttcgacatgattcccagcagtcagattgacaacctgctggtctataaatccccctcgccggagataccgggcgacttctccggcggttttgtcaagatagtgaccaaaggtatccccgaagaaaacagcatcgaagtcggttattcgaccgggttcaatgtcaggacgcaattcaggcagttccgcatgaaccccggaagctgtacggatttcctcggtttcgacctcggcaagaggccgctcggccgctcgtttccggcgcacatggacctcgtcacttcgcccgacgagataacgaggctgacgagagaagggttcaacaacgactggcgcatccggagttttatccccatgcccgaccagcggctctccttctcgatggcccgccgctgggatacgaagcacggccgtaccgtgggcaacatcaccgccgtcacatacagcaatacgtttaaaggagtcgaaggtatcaagaacgcccggtacggcatctactccgcggccgccgacacgcccatctatctcgacgattattatgacaaccaatattcgaacgatgtccggctcggagcgatgcacaactgggcgttcatcctcgacgcctctaaccgtatcgagttcaagaacctgctcaatatattggggcgtaaccgtctgaccgaacgccggggcatcaaggacatgagcagcatgtactatctcgaacagaccgagatgcagtactcttcgcgcctgacctatacggggcagttctccggcacgcaccacctggccggtaccgatgcgacggtgacgtgggatgccggttactcctatgccgaccggaacgaacccgaccgccgcatcgtctccaatatggccggtatcggaagtacggatgacctggcggatgtggtgacgggcaacgacaacatcaaacgctacttccagaccctcggcgaccacatcgcttcggcttccggcaactatgtgcagcagttggcctgggggggtatccgacccacgttgaaggccggcatctacggcgagtaccgttaccgcagctacgaccagcgcgagttcatctaccgttacgacaacctttccgccgaagagcggcaatattatctcaagctgcctttccaggaaatgctgtcgcccgaatggctgggagcggacaaggtctatatcgacgagataacccgcaagaccaatgcctccaccgccgacatctattacggagcggcttatgcggcgctcgacattccgctcggaaaattcgatatctatgccggggcacgtctcgaaagctacaccacgaagctgacgcgagaccgttcggatgcacccgaacttatcctgatgaccaccaagacgcaccacgacctcaatctgctgccttcggtcaatgtcacttaccggatagacgaccggcatcagttgcgggcggcttacgggcgttcgctcaaccgtccggagctgcgtgagctttcccctacggtctattacgatttcgacctcttcagcgagatagccggtaacgagaacctcaggacggccgtcatcgacaacgtggacctgcgttatgaattctatcccgcaccgggcgagacggtgagcctcggtgccttctacaaacacttccgcaatccgatagagtggacctatatcgacatgggcggttcgctccgctatatgtatgagaatgccgaccgggcccaaagctggggtgtggagctcgatgtgaggaaaaacctcggctttatcggtatgccgaacctttcgctggtgctcaatgcggcgtggatatacagcaacgtgacctttgtgcccggcgaggtggtgtccgaacccgaccggcccatgcagggacagtcgccctacgtgataaacgcgggactctattacagttccgaacgactcggactcgacgtggcgctgctctacaaccggattggcaagcggatagtggggctgggcaagtccaacagcgtcaatcccgaccccaatacgctgattcccgattcgtacgaaatgccgcgcaacgtgctcgatttctccgtatcgaaaaggatagggcgacgggtgacgctgagctgttcggtgaaggaccttctctcggaggacgtggtgtacaagcagttcccgaagttcgagaaggacggacagatgtaccggcgggaacaggtcacccggcgctacaatcccggtcagagcgtatcgctgactgtctcggtaaagctgtgaacgatattcgacaggacagacaatagagaaaacaccaatttttaatcgaacagaaaaagatgaaaaagaacatcaagatggccgccgtggcatgtatgctcctctcggcctttgctaccgtaagttgcgacaagaatacggacaacggcggcgagaatcctccgcagggcgaaacgttcgaactgggcgacggttcgaaggataatttcgaaatcgcttccgacatgacgctgacctatccgaacgtctatacgctcaaagggttcgtttatgtgcccgacggtgtgacgctgaccatcgagcccggtgtggtgataaagggcgacaaggctacgcagggtacgctcattatcgaacggggcggcaaaatcatggcacagggtacgccggagcgcccgattgtcttcacttctgcccaggctcccggcagccgcaagcctggtgactggggcggtatcatcctgctcggcaaggcgcccaacaacctcggcgaacagaccatcgagggcggcgtgcgttccaaacacggcggtaacgacccggcggacaattccggcgtgctgagctatgtacgtgtggaattccccggtatcgaatactctacggacaatgaaatcaacggaattaccttcggttcggtcgggagcggtaccaaaatcgaccacctgcaggtatcctactcgggggacgactcctatgagtggttcggcggtacggcgaatgcgaaatatctcgtcgcctattcgggttgggacgatgatttcgataccgacaacggcttcagcggcaaggtacagttcgccatgggcgtgcgcaatccgaggataggggacaagtcggcctccaacggtttcgaatcggacaacaacggcgacggtgcggctaccgaaccctacacctcatgcgtgttcgccaacgttagcctgttcgggccggtgtccaatcccgcatcctataccgaacaggccggcgccgagggtagcccggtcgatgcgagattccaggccgcgcttcatctgcgccgcaatacccagctcagtatctataactccctcatagcggctttcccggtagggctgattatcgagaacgacaaagggtctaccacacaggattgggctgagcagggcaaactcaacgtaaccaactgcgtgatggccggcatggtgaagaattaccaggatgcacagtattggaaggatggttcccagttcgacgatgaggatgcgggtagtttcgccgacggttatttcaaccgtgcggagggtggaaacagggtgttcgcagccctctccgacctcggcctcagcggcaatccgctcagcctttccgctccggtggtcttccccggcagtgacagtccgcttgcttcgggtgctgcatggacggaggagaaggtggcttcgggcttcgataaagtggactatatcggtgctttcggtccgaatgagaccgctgccgccaactggacgagcggctggtgcaatttcgacccccagaatacggtttactaaacgtcggcaggttggtcaatttgtcggtgggcgggctgctgcggcggtccgcccttttcccgttccgcggcggagcttccggtgtgccggcaatgcatgcggggattgcgttccgtgcaggaatattacagcccgaggtcttcgtcaatcaagaccaccgtaatcctccctttcggatggcatttgtgcagaatgagccgttcgttgcatatccgtcggggcgatgcacaatccatgcaccggcccgttttcacgcacggcgtgtcgaaatcctcatgacgggccgcattgcgcggggcggccgtttcacggatacgcctgaaggcggcatcgccgtcctccacgattttgttccgaccgacggtcaggatgacgtgccgcggtccgaaggctatcggagcgatgcggttgcctatcatgtccagccaatgcagctccccgtcgagggtgacggcattcgcgccggtcaggaacaggtcgcataacagcgcctgccggcgtctttctatcagttccctgaaaggaacgccctgttcgaaagtgtcgatgaacggataggtgcgctgcgtccgcagccactccaccgtccccgtcgcgtagagcgtcatcgagtcgccgaaggagatactcgccggcgcgagttcggcgatgcggctgcggatgtattcgccggcctcgtgtgcgtcggctgctgtcgccacctcaaaaccgttgcgcctcagcctgtcggcacatctctccgttgtctttgcctgttccatcatgtgtctccattatgggcggttccggcagatgttttccggagaccgtaaaaaaagtctccacggagtacgcggagacataggtattaaaacctgcggcccatggccttattgtggtaagatgtagaagttcttacattgcaaatataggaaaaataagtgcacaaatccaaaaattttccttatttttacgaaaaaccgccaatttatggagaaaagattgggtatagatgtaggaaccaattccctcggatgggctatcgtggaggtggacgacgaaggatgtacgctgctcgaccgaggggtggatatctttcaggagggggtagcacgtgagaagaatcaggagaaaccggccgtgcaggacaggaccgatgcccgtgccctacggcggcactatttccgtcgccgtttgcgcaagatagccctgttgcgggtgttggtacggcacgacctctgtcccgcattgtcggaggagcagttgaacgcctggcagagtaaggggatttatccgttggacgatgcgttcatccgttggcagcgtaccgacgacaatgcggacaggaacccgtaccgcgaccgcttccggtgtctgaccgaagaactcgatttggcctgccgcgaagaacgttacgtgctgggcagggcgctgtatcatctgtgtcagcgccgcggatttctgagcaatcgcaaggatgcgggaaacgaggccgaggagggtaaggtgaagcaggagattaaaaccctctctgccgacatggccgctgcggggtgcgaatatctgggcgaatatttctaccggctttaccagcggaaagagaagattcgcaaacactatacagcccggaacgagcactatctggccgagtttcgtgccatttgccggaaacagcggcttgatgaggagttgcgacaggcattggaaaaagccattttctatcagaggcccctcaagtcgcaaaagggcttggtaggcaagtgtactttcgaaaaggacaagagccgctgtccggtgtcccatccgcgcttcgaggagttccggatgctccagttcatcaacaacgttcgggttacgggtcccggcgatgcggagccgcggcccctttcgccggaggaggtggagattgtccgtccgctgttcctgcgcaagagcaaaccgcatttcgatttcgaagacattgccaaaaagatagcgggcaaagggaactatgcctgccggggcgagttgctgcaggcgccgtaccgcttcaattgtgccggtaaatcgacggtgacggggtctcccgtatcggcccttttcgcttcggttttcggagatgattggcagcgtgagatttgcagcctgtatacgctcggtgccgggaaaaacgaggagcagatactcaacgacgtatggcatgtcctcttcgcctttgaggacgaggagcggttgcaggcctggttgcaggagaaactgcagctttcagccgacgatgcgaaaaccctggcggccttccgtctgccgcaggggtatgcgtcgctgagcctgaacgttatcaacaagatacttccctacctgcggcgcggataccgctacgacgaggcggtattctttgccaacctcggaaaggtgcttccggcggaggtgtatgccgacccggccaggcgccgcgaagtggagcaagggatttccgcccagatggatgatttgggcgacggagagaaaacacggaaggaggaacgtattcgcgattatctgcggcgttattggggcgtagaggagaagcggctggagcgcctttaccatccttcgatgattgaggcgtatccgtcggcgtctcccaacggacagggtctcctgcagctgggttcgccgcgcatcccggctgtccggaatccgatggccatgcgagccctgttccgactccgcgtactgctgaacgaactcctgcgcgaaggaaagattgaccgtggcacgaaaatcaatatcgagctcgcccgcgagctgaacgacgccaacaaacggaaggccatcgaacgttaccagcgggagcgggaggctgagaaccgcaaatatgccgaagagattcgccaacagtatgtcgaagcaacgggacattccatagagccctccgaagaggatattctcaaataccgtctgtgggtggagcaggggcattgttccctttatacggggaagacaatcgggatttccgagtttctcggcgacggccggcggtacgacatcgagcacaccgtcccccgttcgcgtgggggagaggatgcgcagtacaacaagacgctgtgcgaagaggaattcaaccgggatataaaacgcgacaaactgccgtcggagctggccaaccataccgcgatattggcctgtgtcgagtcgtgcggatggttcgagcgcatcgaggggttggagcatcgggtctggggggcggaccgtcgcgcaaagagtgcgacgaccaaatcggcgaaggatttcgccattcaggaccggcactactggaggatgcacctcgattactggcgcaggaagtgcgaggcctttaccatgacggaggtgcccgaaggattcagcaatcggcagggtgtggatgttggcatcatcggccggtatgcgcggctctatttgcagacagtcttcgaccgggtttatacggtcaagggtgctacgacggctgcgttccgcaggatgtgggggctgcaggaggagtatgcggcgaaagagcgcgtgaatcatgttcaccactgtatagatgccattaccatcgcctgcatcggaagccgggagtacgccctgtgggcgcagtacgttcggcaggatgaactctatcggcgggggaagcggataaaccccgttgcggcaagccgtggccgaccttcaccgaggatgtccgggcgacggccgatgagctgctcatttcgcatcacacgcccgataacatgcccaagcagagccggaaacggctgcgtgtgcggggaaaggtgcagcggaacgacaggggagaggtcaaatacatgcagggcgatactgcccggggtgctctccatcaacagacattttatggagccatcgaacgagacggcgagattcggtatgtcgtgcgcaagtcgctcgaccaactgctgcctgcggatgtggaaaaaatcgtggatgaggcggtcagacagaaagtaagggaggcggtcgaggcatacggttttaaagaggcgacagacccgacgaaacacaccgtctggatgaacgaggaaaaacagataccgattcggaaggtgcggatattgaccggtgtgaaaaatccgattctcctgaagcctcatcgcgatgtatccgttaaggagtataagcgatattaccatgtcgtcaacgacgggaattactgcatggcgatttacgaaggcagagacaggcagggcaggttgaaacggacgtttgaaatcgtaaataaactggaggcggcccgttatttcaaacggagtgcggaccgggaatcccggcccgatttggtaccgctgtcggatgtcaacggttattcgctcaagtatctcttgaaaacggggacgatggtgttgttttatgaaaattccccggacgagttgtatgaatgttcggtcggagagttggctaaaaggttgtacaaggtcgtgggaatggcgcaggatggtcgtgtccagtttctgtttcatcaggaggcacgggaccagaaagccgttacggcggagtgtggaatgggaatttcggttttcgatgcacgccatcctgctccgaagttgaggataagagtttccaattttaaaatgttcgtcgaaggctatgacttcgaactgacggttacgggggaagtaaaattcaaacggtaattgcttcatggtgaaacgcgcgctgttcttttcgacgccttatagcctgagtcttcgggacaatcagatgattatccgtacgaaggaggcccccgacatgcagcggaccgttccggtcgaggatatcggggtggtggtgctggaggaccgacagacgtccgtgacgctgccgctgctgaatgcgctctcggataacaatgcggccgtcatcttctgcggcgacgaccggatgccgaacgccatgctgatgaatctcgattccaaccggacacagggcgagaactaccggacgcaaatcgaggcgagcgagccgttgaaaaaagggatatggcggcaaatcgtcgaggcgaaaatccgaaaccaggccgccttgctgcagaagttgggcaaagacggggagcggttgaagccctattaccggaatgtccgcagcggcgatgcggacaaccgggaggggactgccgccagaatttactgggcagagctgttcggccgggatttcgttcgtatgcgggagggagatgttcccaataacttgctgaattacggatatacggttctgcgggcggccgtcgcacggtcgctgatggggtcggggctgtttccggcgttcggcattttccaccgtaaccggtacaatgcctttccgttggccgacgatgtgatggaaccttatcgtccttttgtggacgaattggtgtacgggctccgtatgcagggcgagtcgcaactgacgcaggaggtcaaggggaccctgctgcggatactgttcgccgatacgcgtttcgagaaggtgatgcgtccgctggatgtcggcctgacgtttacggcggcatcgctggcgaaatgtttcgctggaacgcaaaagaagattgtttaccctttgttggagtgacaggatgtcggaagtccgtttgaatgcatatcgtatcatgtggctgttcgtgtttttcgatttgccgaccaataccaaaaccgagcgtcgtcatgcgactcagtttcgcaaggccctggagaaggacggcttttcgatgatgcagtattcggtgtacgtgcgtcactgcccctcgaaagagaatatggaagtacatctccgtcgggtgcagaagtcgatgccgcctgccggatataccagtatcctgagcgttacggacaaacagtacagtgagattcggaactattgggggaaaagcgaacgggcccggcccgagatgcctcagcagctggaatttttttgatatactgctctttgaaatacgaaattacatccgaccaacttccccggcgtgcggcaggacgttttatgcatcggtgtcatatgtgtaacgtgcagaatatgaattactgccatgcgcgaggttgtggtttgatgtagaattggaatgagaaacaactcggaaacatttgaacaacctttgcataggttgtggtttgatgtagaattggaatgagaaacaaccgattggcgggccggagcgcagacgccgagttgtggtttgatgtagaattggaatgagaaacaacacaaggctcagaagatatatcgacgttactgttgtggtttgatgtagaattggaatgagaaacaacgccatctggagaacggccatcatcaccagtgttgtggtttgatgtagaattggaatgagaaacaacatattctctgcacaatccaaagctgccataggttgtggtttgatgtagaattggaatgagaaacaaccaagccccgaaaaacgacggatgactgctagttgtggtttgatgtagaattggaatgagaaacaactcggcctcctcgatgagcacgtgcgtcgcagttgtggtttgatgtagaattggaatgagaaacaactgtgcattgccgtacacccgcgcattgtcggttgtggtttgatgtagaattggaatgagaaacaactacgttatatcaaagtttcagcggaggaagttgtggtttgatgtagaattggaatgagaaacaacgaagaaagaaaatgaccatatcatggattgttgtggtttgatgtagaattggaatgagaaacaacgtctgttcgacggcatatttcggccacttggttgtggtttgatgtagaattggaatgagaaacaacctgcggacgaccgatacgggcgtctcttcggttgtggtttgatgtagaattggaatgagaaacaactactgttgtgcattaggaaaatgatatttcgttgtggtttgatgtagaattggaatgagaaacaaccgaccgggccggggtctgcatcgccttccggttgtggtttgatgtagaattggaatgagaaacaaccgcaattgattgagacttccttctgctgccgttgtggtttgatgtagaattggaatgagaaacaacttacatcagcgacgagggtggcatgcgcctgttgtggtttgatgtagaattggaatgagaaacaactctacaaagtgctatacgtcccgttgtctgttgtggtttgatgtagaattggaatgagaaacaacgtaatgctcgtaatcgccgccaggccagaagttgtggtttgatgtagaattggaatgagaaacaacgcgcattgccgtacacccacgcattgccggttgtggtttgatgtagaattggaatgagaaacaacgatgtcttcgatattttctcctccgtataagttgtggtttgatgtagaattggaatgagaaacaacgagaagggttcttgagagtttggttgagaagttgtggtttgatgtagaattggaatgagaaacaactatgatgctttttcttcgtggggcgttaagttgtggtttgatgtagaattggaatgagaaacaacctgcggacgaccgatacgg

SEQ ID NO: 2029 - DNA, 15232 bp, synthetic construct
  source 1..15232: mol_type = other DNA
  misc_feature 1..15232: note = Synthetic
ttatgtttagcggacaccaataattaaatataatgagacttttctattgtcttaaataagttttgaattgaagttaaacaatctctaaacaataccacgacaaaagtctggtgtccatcaactcgtggggcattggctacaaagacaaaaacgaacgcggaaattctgacaagtagagcaagtatcaccgcatgacacaaaaaacagacttatgaaaactttcacctaaattagaggcaaatgggcagaaaacaattataccagcagaagaagaaacatagacaaacggttccaaagcatccggatttcggaatccccaacgaagttacattaaaatgtgcacagagtttcaggggtctttttgtcctattttccatttttatactaacgacatccatcccgtttttagcaacaataggcaaaacagaagccgaagactcgcttttcttattcctttttttaggtggttttgacttgttttatttaaaccagataattgtactctgcctccgcaaacgagattgggcaaaagcctcatcggatggacttgaattgcacatacacgacactgtatttttctttataaagaccgataccattataccctggcaacgtatttcgcaattcgcctctcacgtagattctacccaaaatggcatcgtaagcctcctccttctcaaactagaaggaaacgacagcatcttacagtaccatatagaccatttacaggggcatgggcggccgctgctacctgccatctccggatacaaacaacaggctgaaagtaaagagttggaagaggacgcaaaagagggtgctacagactatattttgtcaggtacattctttttaagtctgttgttattatggattctctttcccatcgtatacgaacaaacgctgataccatactggttctacctgcctttcgttggtataagcgcctttggtgcgattcttacctatataacgcttaagaaaaaaatgatacgtttgtttctgggtgcgttttctcttgctactctctccaccatgggcttcctgtttataaaccatcgttttgccaaatggaatgtgcccgataaagtgaaaacctttaaagttgaaagggtttgctacgaagagaatgacgaccacgaaaaaaccggctacaccgtcagaattaagacgcaaaacggtacaaagaatttgcatttcgaactagagcaagatttcgatctgcttaaagccaccgaagtcgacctctaccttcaccaaggatttttcggtttccctgtctataaaaagaaagtggcgagaacgaacgtaaccaccgactaaattcgaggttaaggtgttttgcgccattttgtctgaccctaccaaagtggaaataatcataagcgtttcaacatgcaaaacttggctcatcaaatagttgtattgagcaaacttccgttattaaagtcgcaacatgcaaaaaaaaatctccacggagtacgcagagatataggtttaaaaccttcggcatatagccttattgtggtaagatgtagaattacctaacacaaaaatataaaatatattcgaataatcagtatattagcgtaaaaaatatttaaatcatatatgaaaagacttggattagaccttggcaccaattctatcggttgggctatcgtaaactataaaaacggcacgtatgaccttctagacagaggggttaatatatttaaagatggggttgaacatggtaagaacggcgagttgccgatggttcagaaaaggaccgaggccagagctatgcgtaggcattacttccgcaggaggcttagaaaaatcgagttgctcgaagtacttgttgcccacagtctctgccccaatataccgcaagaggccctagatttgtggaagagcaagaagaaatatcctatgttgccagccttcattgaatggcagaggaccaatgacgagaaggacgaaaacccgtatcacgacagacacagatgtctgaatgagaaactagacctcaagaaggaaggcgaccgtttctgcctcggtagggcgctctaccaccttaaccagcgccgcggttttatcagtaacagaaaggaaggcacaaaagaaagcgagggcaacgttaaagcccagattagtgaccttagcgaaaaaatgaagacggtcaactgcaactatattggcgaatacttctaccaactctataagacgaaagggaaaataaggacaacctacacctcaagaatccagcatgtgagggcagagtttgacgccatctgcaaaaagcaaggtctgaccgaagaccttagaaacgcgcttgaaagagccattttcttccaaagaccgctcaaatcgcaaaaaggacaggttggcaactgcacattcgagaagggcaaaaaaagatgtcccgcctcacaccccaacttcgagaagttccgtatgctctgcttactcaacaacataaaggtcaaaaccaaggccgaagacaagatgcgtcctctaacgcccgacgagttagcaaagattacaccaaagttcttccgcaagagtaagccgaacttcgactttgaagaccttgcaaaagcgttggtctctaagaaagagaaatacgcctattataaggatgacaaaaatgccgagactgccgacattcttttcaattaccgcatggacactaacgtgagcggatgccccgtgacagcatcgcttatggaaattttcggagaagactgggaaaacggcatctgcagcctttacgtaaagggagaaacaaagacaccacaagacatcatcaacgatgtatggcacgtgttgcagactttcgatgacgatgacaagttgaaagattgggccttacgtaatcttcagctcacagatgagcaggcacagctttttgtaaagatacgtatgccacaagactacgcatcgttgagtttgaacgccatcaacaagatgctcccatacctggaggcaggctacaggtacgaccaagccgtattccttgccaacctatgcgatgttcttcctaaggaagtatggcaagaccattcgatgaggacagagattatcggcaaaatcaatgccatcatcagtaactacgacaccgaccctatttcgagactaagagaagggaaaaccattagcaaacaacaatgcataaaggaatttctccaaagtaaatatggagtagatgaacggcacgccgaccgactctaccacccttctatgatagaaacatacccggctgcaaaaccaaactctcaggggcaggttactctggggtctcctagattatccgctctaaagaaccctatggccacgagagccctgttccgcttgcgccacctcatcaaccagctgattatagacggtaaaatagactcagatactgttgtcaacatcgagtttgccagggaactgaacgacgcgaatatgcgaaaggccatcgaaactttccaaaatgaaaaacagaaggaacacgaccgcattgttcaagaaatcaaaaaacttggtttagaaccaacagaaaatgatatacttaaataccagttatgggatgaacagaagcatatgtgtatttacaccggtaaggaaatcggtgtgaccgattttttgggtccaaacccaaaattcgacattgagcataccattccaagatcacttgatggcgacgactctcagaaaaacaagacgctgtgcgacagcaagtttaaccgtgaagtcaaaatcggcaagattccttatgagctgagcaaccacaccgaaatactggctagaatagaaagtatgggatgggcagaagaaatcgaccgattggaggcagccatcaacataaggaagaaaaaagccaagatggctacgaccaaagaggagaaggataaggctattagtgaaaggcactacttcaagatgaaacttgattactggaagggtaagctggagaccttcactatcgattgcgtaagcgaggatttcaccaaccgtcaaggagtcaatatcggcatcatcggcaagtatgcccgtctgtacctcaagaccgttttcaacaagattcacgttgtaaagggagccacaacagctgacttccgtaaggcatggggcctacagcaagactacgagaaaaaagagcgtgtcaaccacgcccaccactgcattgacgcaattaccatcgcatgtatcgggaaaagggaatacgacagttggaaacagttcaccgaagaccaagaaaaatacctccgtaaagagggcaaaaaaccacttttcgaaaagccttgggataccttcaccgaagatgtcaaagccgtcaccaacgaacttctcgtccaccactaccaacccgacaacatggggaagaacaccaagaagaagctccgtgttcacggcattatccaaaaaggtaaggacgggaagccaatctaccagcaaggagctggtgcaagaagatccttgcatcttgagtccttctatggcgccatacagcgtgaagacggcatcaagtacgttatccgtaaaagccttgccagccttgccgaaaaagacatcaaaaacatcgtcgatgatgccgttagggagaaggtagaggaagccgttaaaaaatatggtattaaggacgcagtttctggcgagaacacaatatggttcaatgaggcgaaacagattcctatcaagaaggtgaggctgtatgctacaaacataacaaaaccaattcatttaaaggaacaacgagatgcttctccaaaggaatacaaacagatgtatcacgttgcaagcgaacggaattattgtatggctctatacgaaggtcttaacgcaaagaagaggcttaaacgcgaatttgaattaataaagaactacgatgcagcaaaaggatatgatattcctagcacaaaaaatacacttcctcttaaatatatcctaaaacaaggtacgatggtccttttttatgaaggcacggctgacgaacttgaaaatttacctaagaaagaattgtcaaaacgtctctataaggttattgttatgactacgaaatctggttctggctacctttcatttcttcatcatatggaagcgagatccgacaaagaattgaaaactattgacttcaagctcaatggtgcatggtgtaatgatgacgattacagacctaggatggacatgtacagtacggctgttaatgttctggtagaaggctatgactttgagttgacgattacaggcgaaataaagttcaagtagtatagatgctgaaaagaaccatcttcataagttcacccaactcattgcggttaaatgacaaccagatggttatccaatcgaaggaagatgccgaactagtgaacaaggtaccaatcgaagatgtaggttttcttgtcatcgagaacccacagacctatatcagcatccccttactgaatgccctcacagagtataatgtatccgtcacgttttgcaacaaccatggtatgccaaagtcaatgcttttaaacttggacgccaacagtacgcaaggcgagtcgtaccagagacagatacaagttagcgagccactaaaaaagaatctttggaaacagataatagagtcaaagattaggaatcaagctcttctgcttgaaaagttaggattagaagggcaacgggtcctctattgtagcaaagacgtcaaaagtggtgatacagataaccgtgaaggcgtagctgccaaaatatactggagcatgctgtttggcgacgagttctatagagaccgttacggtatcgcaccaaacaacctgctcaattacggctacagcctactacgttcagcaacagcaagggcaatagtcgggtcggggctacttcctgtgtttgggctgttccatcataaccgctacaattcctaccctctcgccgacgatttgatggaaccattcagaccctacgtcgacgaggttgcattccggctttatgctaatggcatgacagagctaacaaaagacgtgaaggccgagtttgcaaaagtgttatatgccgatacaatggccgataagatgacacgacctttaagcctcgcattgacctacgcagcagcatctctcaccaggtgttattacggcgaacagaaaaaacttgtgttaccatattttatgtaaaatgccattcgaaaggattaacgcttaccggattatgtggttatttgtatttttcgatttaccaacgaatacaaagaaagaacgacacgacgccgcaagattcaggaatatgctcgaaaaggacggattccagatgatgcagtactctgtctatatccgtcattgtgtgtcaagggaaaacctcgatatgcatatgcgcaaagtagaggcactaatacccgaagaaggctacgtctgtatgagttccattacagacaaacaattctcggatattagaaattattggaaccatcaggttgttaaagaagaccgaacaccatctttaattgaattttattagtatttttgcgtataagaaataaaaaatcctcatcatttaagacttccttagttaaaagagctcagatttctcattcaaattatagaggtatttcattatataccattaatttatataactaaggttgtggtttgatgtaggataacgcaagttcacaaccggttactccagaaagaagtaaaacaacaagttgtggtttgatgtaggataacgcaagttcacaacttttcattacgatgagaataggtggtataggttgtggtttgatgtaggataacgcaagttcacaaccttatgtatgacaataagaactattggttgttgtggtttgatgtaggataacgcaagttcacaacgaggttctgatacgtacagtggaagccggggttgtggtttgatgtaggataacgcaagttcacaacattctattcgaatcccaatttgacagatagagttgtggtttgatgtaggataacgcatgttcacaacactggtgcttcaattacacaaatccttctggttgtggtttgatgtaggataacgcatgttcacaactatccgatttttgagaacacattatgaccggttgtggtttgatgtaggataacgcaagttcacaaccgaaacgaaattggccgaccgttctgatacgttgtggtttgatgtaggataacgcaagttcacaacacccgcaaagaacgcgttacactccgacaggttgtggtttgatgtaggataacgcaagttcacaacgaggttctgatacgtacagtggaagccggggttgtggtttgatgtaggataacgcaagttcacaacattctattcgaatcccaatttgacagatagagttgtggtttgatgtaggataacgcaagttcacaaccgtgcaatgatattgtacgagcgatacaagttgtggtttgatgtaggataacacaagttcacaacagaaatgattgaattaatgctaaagaataagttgtggtttgatgtaggataacgcatgttcacaactatccgatttttgagaacacattatgaccggttgtggtttgatgtaggataacgcaagttcacaaccgtgcaatgatattgtacgagcgatacaagttgtggtttgatgtaggataacacaagttcacaacagaaatgattgaattaatgctaaagaataagttgtggtttgatgtaggataacgcatgttcacaacactggtgcttcaattacacaaatccttctggttgtggtttgatgtaggataacgcatgttcacaactatccgatttttgagaacacattatgaccggttgtggtttgatgtaggataacgcaagttcacaactttaaagttaaaatgcctatgggcttcacgttgtggtttgatgtaggataacgcaagttcacaaccttctattcttctcctgtacacaagaaaaaaacggctggtaaataaacaccagccgttatctatttacaccaccaaagcattatagtcattcaataacgtacgtcatacttttctctatatcagtaagagtcgcattcttactgtcaactacgaatttcctattatcatgatatatggtatctcctttttgtatgtacgtgcctttatacaacggagaaaaaactttatcgggagaaactgtagtacccgacaagacacgtccgtctttcgtaaaaacaatatatgtgtaaccactgtgtgggccgtccctctcaaaataagaagctacaatatggtaattccatttcttatagagttgccagccgacagaataggccatacaaaccaccaaacaagcaaccataatgcgattggcgacctttatacactggtgttctttttcttttgtaaaccatgatatagcagaccaaaacaaagaaaaaaaggctgtaagaaagaatggtccacataagaaggctgcaaatactacaactattcctaaatcggttaaactggcaacagttaggaacaatgcagatataataacagagacacaacggaaaatattcatatttacataaaactataaacagtgattaaaaaagtgggaaaagtccatattcagatctgattgattccagaagcgtagaaacatctcaccatgttgatagcagcagaggcagagacggcaactacatatgcggcagtgactcaatagaggatacaccagcaaccagttcaaaaacgagcacaaaaggcattattgcctacttttaaggctgaattgctctttacaagcagataaatatgatatacttttgcataaacatattaaaaaaacatcaaagatgagagcatatatttcaggaaaaatttcaacaaagcaagattttgtacttcaaaacatctggtttgcgaatgaggaagcggaagataccgatattcctagcgagaactgcgtcggtatagaggctgaaaattttgagaccatgtttgacgacgatgacccaaccatattccactgccgttggaagggtgttttcctagtcacagccgacgaagacggtgaggaaacatacacagacgactggacagccgcagacttggttagtttgattaacgaaaaaaatctgacaattcgaaatttaagcggatttgtagacgaagacacgaacgtggttatcaccgccattaaactagaagacgaagaaggagaatttgagttctctgaagaaatgctagagatggaacccgtagaattttacgtttaatcagacaccgaaattcaaatcatcaacataatgcgtcccccctctttgataaacatagcggggttccggcagaccacagcatagacctgacggccagagacaggcttaccgtctgcgcgaatatgcatgcgtttacggttaatggtatcggcaatttgttcggtagtcagtccacggtttgcttgtgcaaggacgacaacaatgcactcttcaatagtcatttaacagttggaattaataaaaggaaagggcggcctaaaaagaccgcccttcttcctataaaaaggagattagttcttaatcaggttcttaccagtcatatcggcaggctgttccaagcccatgatgtggaggatagaaggagccacgtcggcaaggacaccatcggaaaccttagcagacttgttcttgtcgtcgcatacatagatgaacggaacagggttcaaagagtgggcagtattaggagtgccatcagggttaattgcgttatcggcattaccgtggtcagcaatgatgacagactcgtaaccattcgccaaagcagcagtaataacgtctttaacacaagcatcgatagcgacaacagccttctcgatagcctcgtagacacccgtgtgacccaccatgtcgccgttagcgaagttcaccacaataaagtcgaacttgttgctcttaatagattcaaccaacttatcttttacctcgtaagcgctcatttcaggcttcaagtcgtaggtagcgaccttaggagaagcaaccaaaacacgctcttcaccctcgtaaggagcctcacggccaccgttaaagaagaaggtaacgtgcgcatacttttcggtttcggcagtgtgtaactgcttcaagcccttgctagaaagatattcaccaagtgtgtttgaaacattttccttagggaagaggatgtcaacattcttgaaagaaggatcgtaaggagtcatacaatagaacttgatgcccttaatggtagacattccagcctcaggcatatcggtctgagagaggacagtagtcatttccttagcacggtcgttacgatagttgaagaaaataaccacatcaccctccttaatgcgtccgtcaacattcttgtcgagcagagcaggcataaactcgtcggtgaggttttgagagtcgttagacttgtcgtagttggcctggatagcgtcagccaggttatcgaccttttcaccgataccgttcaccaacaaatcgtatcccttcttaatacggtcccagttcttatcacggtccatagcgtaatagcgaccgataacagtagccacatgaccagcgctcttagccgtatggtcaatcaactgctgaacaaagcccttaccactcttagggtcggtatcgcggccgtccataaagcaatggatgaaagtgttgtcgacgccatattgtttagccacatcgcacaaagtgaagacatggttaagcgaagagtgcacgccacccgtagaggtcaagcccataaggtgcacattcttaccattctgtttagcataagtgaaagcagagacgataccagggttcttggcgatgctaccatcggcacaagcgcggttaattttaacaaggtcttgataaacgatacgtccggcaccaatattcaagtgtccgacctcagagttacccatctgtccgtcaggcagaccgacgttttcgccagaagcctgcaactttgaattcggataattggcgttcagataatccatgaacggagtaggcgtgttatagatcacatcgcccttacccttgttaccgattccccaaccatcgagaatcattaataaagccttgctcataatactagttaaattattttatatcgtatttaaatgcaaaattaataaagatttgttttaggagttttcctcaacgatgtcaaaatgcacatcggtagccctgttttttaaaatacccagccttttacgccccagttcgctgtgtccgacaacaccactcgagctgaagtttgcgtcagaaccggcaccagaggccgaattgttgaaatagtgttcagactttggtttaaacgcagtcctaacaccgaagaccagcctcagcaaggcagaccccaccatcagcaggggtataacaagcaaaaaaagtataaaaagaagaaaaatccccattttaataacaattcttagcaacagccgctacactgttagaagcattgatagcatagaaatgaatgcttggaacattgtgtgcgataaggtctttcacctgcatagaacaccactcgaccccacattgctcctgttcagcttccgtcttgcatttatccagttcaaccacaaaatcggacggtatgtcgaccctgaaagttttagcaagaaccgggagctgtgcaagccttttaacaggcttaatacccggaatgataggtacattaatacccaccgcacggcacttatcgacaaaatcgaaatacttccggttatcgaaaaacatctgagtaaccacatacgaagccccattgtcgaccttttgcttcaagtatttgaggtcgatgtcgaaattgagggcttcctcatgtttttctggataaccggccacaccataagagaaagggacaaccggcttgtcggaaatagaggaaccgtcgcaaaagattccctcgttgaacttattgatctgctcctgtaattcagtagcgtgcgaatacccgtctttcacaggggtaaagcgtttgtcttgaggggccttatcaccacgcaagacgagcaaatcgtgaatatcgaggaaattgaggtcaatgagcacatattccgtctcttcacggctgaatccgctacataagatatgagggacaacatcgatgttgtatttgtgcttaatggcggcagcaatggcaacagtacccgggcgccttcgcaaagtagccgcttggaacaaaccattatcggtattcttatagaccagttcgctacggtgagtagtgatattcacgtatttcggatcgaactcacgcaagcggtcaatagtagagaacaaagaatcgaggctgtttcccttaataggaggagagacctcgaaagaaaaagccgtagacctgttattaagaattttatcgataatcataaattgtaaaaatcgtctaaagtaaagttttcaagttgggaagccggaatttcggagagcctgccctccacacaatgcaacaccctaccggggaacatagaaacccagcgcatgttgtgtgtagccataaccacggacgtacccgattcaacaacctggtaaatcaactgcatgatttccttacccgtgtgcgcatcgaggttaccagtgggctcgtcggcaagaataacctgcgggttgtttaacagcgccctagcgatgaccaccctctgttgttcgccacccgacagttcatggggcattttgtaacccttattcgtcatacccacaaaatcgagcacttctttgatacgccggttaatgctagcagagtccttcatatctgtagcccgtaaaacgaactcaagattggcattaacagtgcggtcggtaagcagtttgaaatcttggaaaacgatacccagcttgcgtctgaggaaagggacctgtttcccgggcatcgtggtcaaatcataatcaagcacgcgcgcctcaccgccagaaatcttcgcctcggcataaaaagacttcaagagagtagatttaccgcaaccgacacgccctatcagataaacaatttcgcccttgcccagtttaaagaagacattacgcaagacgtcgatatcgttgtaagagacattaacgcccttgtaatcgataaaaagattagaatcggtcatctgcattccagaacttattttgtagcgttatgacgtcgtttgtgcaattcagcgaccacgtcgtcgatacgcagatttttagaagaaagaagaaccataaggtggtaaagcaaatcggccgactcgctaatcacctgttcatcggtgccgtgtgtagcggaaataagcgtagagagcgcctcctcccctaccatctgtgccatacggttaaccccatcggcaaacagttttgttgtgtaagagccttcgggcatctcagccttacgtgcctcaataaggtcttgcaaggaagaaaggaaattgaggtcggcagtgtttgtatcaccccagcaggtatccgtaccagtgtgacagacaggaccgacaggatgcacttggaccagtaacgtatcgttatcgcaatcgatagccatagaaaccatattgaggaagtttccactagtttcacccttcgtccacaacttctgacgggtccggctatagaaagtcacctttttagtctcaaccgttttattaaacgcctcctcgttcataaatcccagcatcaggaccttacgcgtatcagcatcttgaataatggcgggaaccagcccacccattttatcgaaatcaggtttcataaaaatcaaccaataaaagcggccaaatcggccagtttaatatatccctcgtaaatagccttccccgtaataacagcagggacaccagcctcgtccaaccggtgaatatcgtcgatagagctaaccccaccgctggcaataagatagaggtcgttatattcggaaagaatttgtttatagaggtcgacagaaggaccctgcagcatgccgtccctggcgatatcggtacagataaccttagagattcccctctgtttgaaggaaccgatgaaagggacaagatcttgagaagtcgtttcctgccaaccactgacggcgattttaccgtcttttgcatcggcaccaagaataatacggtcggccccgaacttgtcgatccattttaagaaggtatcggggtctttaaccgcaatgcttccgccggtaaccatagcagcgccacactcgaaagcgatacgcaggtcgtcgtcagactttaagccacctccaaaatcgatcacaaggtttgtgcgagaagcaattttctccaaaaccttgtagttgacaatgtgtttagccttagcaccgtctaagtcaacacaatgcaggcgagtgatacccgcatcttggaacatgagggccacctcgcagggatcttcgttatagacctttttctggtcgtagtcgccttgggagagtctgacacacttcccctcaataatatcgatagcaggaataatatctattttagccattttttactgcttgattattttgtaggactttttacctccctcgaaattgatattaactacatatatccccctaggcagaccactagtcggtaatacaacgggaacagcgccattggtgcgcgccgagagaagggtttgacccgtcgtcgatactacattgatgatgccatcgccatcgtacgccacttcgagaggttcaacaaccacatagtcgtcgcaaacagtaggatacacattgaacttagaggcatcggcattcttcacaccagtaacgggcacagggtcgagcgtggcaacgatattggcaatagcaacaataaacggagcgttataatcgcatccgccctcagtttcagtgtaagaagagccaccctcaataatattctggaatacgccagggttactaggaccaccaatcacaccaccgctggcaaacataaagtcggcttcattcttagttttagtaggaggattgtcgttacgccccatagcgtttcgatgatggatgcggaaagtgaaatcacctttgtaaccatgcaggaatgtatggttaaactcattatttccgaggacataatcaacaattctctggttgaaattatcggccagtttcaaatcttcagaagaagtaagcaccccatcggccaccaacttcgaataaagggcagcagcagcggcgccacccagcgccaacttattggttccccatctgcttttataataagggaagccattattatcggctttcgccgtttccagatgaagaccatacacatttttgcgcaagaaattggcaatattaccaccctgtccgttcgacgcattaggatcagctttaactatatagtagtaagcatagtc

SEQ ID NO: 2030 - DNA, 12546 bp, synthetic construct
  misc_feature 1..12546: note = Synthetic
  source 1..12546: mol_type = other DNA
cggcccgtgaccgtcgaggtgcatgccaacccggcggaatggaaggccgaggcatcggcttcgtgggtaacgatatccgatgtgacggccacttcgcttaccgtcgaggtcatcgacaatgacaccgagggtacgcgcgaggcggagataaccgtgacgtccggtgcggcggaggcggccatccgtatcgtgcaggtggccaaagactacgtctttccgcgttaccgctgccatccggaattccagtacggtacggctatgtcgccgagcggtcggtatgccggcggtttctattgggagtatgacgacgagagcaatctgaactgctatccggtggtgatagatgtcgccacgggtgagtggaccgaactcggaccatatccccaaacgcttttcagccttttcagcacctcctgcatcagcgattacggcgatttggtcatagcgaccgagaacgatgggaacgtcatgtttcgtctcgacggcagttacgaggagttcaagactccggcgggcttcacgagcaatccgcagataagccaggttgcggccgacggtacgtgggtaggctggtgtggcaaagacggtacctcgtatcctgtcaaatgggtggacggtgtggcggtagagctcccgaagcccgcgctgaattaccgtgacgagccgataggcgacgtgcaggcccgcggcatctcggccgacggccgcatcgtttacggaaccacgtgggataacttcgatttcggcatggtctattgggacgaagccggcgaagtacattatgtgggcgaggatgtgcgttactgccgtccggtggagcgtccggacggtcacggaggaactttcacgtataacctgtgcgacgggatgtggacgacggccaccaataccaatgtcagtccgaacgggaaatacatcgccggaacgtaccgtatcgagagcctgagtgccgacggtttcgagaaaaacgagcgaaactatccggccttctataataccgaaacgcaaaaaaccgtcgtttttgacgacctgcctggaggaggcgccctgagtgcgacgagcgacggtctgggctttacggttgacagtaccttcggccccagctccggcaaggtggtggatatcgagaacggcatctcgaatggatagagtccacgtacggtattctggttccggccggttacatcacctacatgcccgacagcaaggacaggttcctcggcgccatgctgtataccggcggtccggtggtcgagggcatcaactggtagatacgattgttttcataaaatttttcaggcgggtgcgccgggcggttttcgttcggtgcacctttttttgtgcgtgcgtttcgccgcgcaggtttcccggaggggcagcgacaaagtaggtatcgccggccgattcttttcacgtgttttaggtattgccggagccaggcggacaccctacttttgtctccagataaaaagatttttagccatttctttaaagtcggtaaggccggccccgcggccggccttttgtctattttgacggaatgttatctttgcagaaaacaacatacgccatgcagagaacaggaaaatataccaaggacgacccgatgagcgacctggtcagcgacaactacaggatattactgcttatgagccgcttcggtatcgggctcggtttcggggagagttccataggcgaagtgtgccgtgccaacggcgtggatacctccaccttcctcatcgtgaccaacatgatgctttacgatgagattccggccgatgcctacgacaaggtctcgatggagggtctcctctcctacctgcacaactcgcacgactactttctcggattccgcctgccggccatccgggagaaactcgctgcggcggtggggacgggcagcgacctttcgcgggccatcatgaaatatttcgacgactatacggccggtgtccatacccacatggcctacgaagaggaggtggtgttcccctacgtacgcgccctgctggaggggcgccgccagcaggattacagcatcgacatcttcagccggcaccacgaccaggtggagacgctgctcacggagttcaagaacatactgattaaatactacccgtcggccagtacgaacgaaatcaacaacgtgctgttcgacatcttcaactgcgagaacgacctcgcttcccacaatgccgtggaggacctgctgttcgtcccggcagtcggaagactggagaaaagagtggaggaggaaggatgagcgttacggtcaagataacggtggcggagccttcggtcatcatacgcagcggcatcatcgccgtgatagggagtgccgagaacctgaaggccgagatttacgaggtgagcgaaatcgaccagttgcggaacgtgctttcgtggcagcatccggatattctgctggtgaatcccgcatcgctcggcctctttccgctgcagcagctcaagaaggatacgggcaatcccgacatgaaatgcgtcgcactgcagttcgcatttaccgaccatgccgccctgaaaagttacgacgatgccatatcggtgtacgacagtgccgagacggtgaacgacaaactcgcccggctggtcagcgaaccggagcgcgacaagcggcacgaatcgctgagcggacgggaaaaggaggtcatcgcctgcgtggtgcagggtatgaccaacaagcagatagccgacaagctcttcatatcgacgcatacggtcatcacccaccggcgcaacatatccgccaaactcggcatccacagtccggccggtctgacgatttacgccatcgtaaacaagctggtggagctggacgacatcaaggactccgtagaggagcagctccccggagattagggttgcagccggaaccgcgggcctgccgctgagagtcagcgctggcggtaacgggctaccgtacctgcctccacgaactccgccttggctgctgtccatgcccggaaatggggcgaggcgttatgcgcggcgacggcctcttcgtctgcccaccgctcgatgaaacagaaggcacggctgtcggccacatcctcgtaaaggtcgtaaaagacgttgccgcattcggcacggctcgcttcgatgagaggctgtaccgctttcagaaaatcctcctgtttgccctcccttatcacatttctggctactatcgttatcatatcgttcgttgttggtgtcgtgtcggtaccatctctgtcgcgtgcggtcaggcgatgtcggcagtccagtaggagaaggtacggcgcgaaccatcctccatgccgacctcctgcgaccagcggtagggttctcccagccgaaaggcgacggactgccggaagagggacccgccgtaacagagcgtatggtattcgccgttctcgccgcagaggtcgattccggcggggaagtccgccaccgtcgcgcggttcagtctgcggccgatatactccctgcccaatcgctctgcccaggtcgtggtgatgaccgcctccagtcccgaagcgaggaacgcttccatggcctcctgcggcgagagttcccaaagcggttccaccacctcgataccgtagggccgtagacgctcttcgcggtaggtgcggacgtcgtgcagaaagatgtcgccgaagatgaaacgggtgactccctgcgaccggaaccgttcggcagccagccgcatggcatgcgtatcgtgttccggctcccctcccggcgttacgttcaccgtgcagagcggaatgccgatggatgcggcctgtgcccggagcacccgttcgggaatggcgtgcattgtggagcggccgtcggcgccgctgaccgtcgtcagaagcgatacgacgtcgtatttctccgagcgcagggctgtcagcagtgcgagcgccgaatccttgcctccgctccagttgaagacggctttcatgcgtgcgtccattccgattcctccgtcttttcttttgtgaacagtccgccgaccagcgtgaagtaggggggcaatacggggccttcgctccagcgcagcgggagaccgagcagttctttcgccgtgcgggctacgtcgaacccgcaggcttccagcgaagtgcgggcccggtcgggataacggcacggtttcccctcggtacgcagacagccgccctggccgcacagcaaacagctgcccgcaaaaagggcccggctgccgggatgacgcttttccgcttccagcaggcgggcatccatcggtcggcgggcatcctctacgatggcataggcggctgcggccgcttcggatacgtcggccggccggtgccgttccttggcgtccaatgttacgaccgccccgatgatgcggatgtggccgtagccggcaagccgttccagcgggtcggtatcgaaaggcggacaaccccatatccggccgtaattaccgcatgcccggcaatattcctcgatgcggcgtgcgtcgcagtagctgcggaggtaatctccggcgggcaggctggcggttatgtagcgggtacagggcatctcggtgcctgcaaagatagcgaacgcgcggcggattgccgcacttttttccgtcggcttcattccctgtggacatttctattttttgtaaagcggcccgctttcgtaacgggctccgggtagttttgcggcgtcaaataattgttcgggataaagatatgagattgtacacaccgagaattctgtcgttttttcttgcgctgtgccccttccttgcggcggaggcggcgcagccgctttactccgtgtcgggaagggtgaccgatgccgccacgggcgaaccggtgacaggcgccgtagtcatggtcaaggatacctacaagggaaccgaaaccgatatggagggccgttggcgcctcgacaaccttgccgcgggggattatacgttcgccgtcagtttcatctcctacaagagcatcgaggtgtcgtgcagggtggccgccgatgtggagggggtggatgtccgcctcgaaagcgattcggaagaggtcgaagaggtggtcgtgaaggcccgtatgcggagcgacaccgagatagccatgctcggaacgataaaggccgttccgcaggtcacgagcggtgtttcggcggcccagatatcgaaaagccccgaccggaacgcttcggaagtcgtccgtcgcgtccccggcatcaccatcatagacgaccgtttcatcatcgtgcgcggcctgtcgcagcgctacaacaacgcatggataaacggactggccgtcccgagtaccgagacagacagccgtgccttctccttcgacatgattcccagcagtcagattgacaacctgctggtctataaatccccctcgccggagataccgggcgacttctccggcggttttgtcaagatagtgaccaaaggtatccccgaagaaaacagcatcgaagtcggttattcgaccgggttcaatgtcaggacgcaattcaggcagttccgcatgaaccccggaagctgtacggatttcctcggtttcgacctcggcaagaggccgctcggccgctcgtttccggcgcacatggacctcgtcacttcgcccgacgagataacgaggctgacgagagaagggttcaacaacgactggcgcatccggagttttatccccatgcccgaccagcggctctccttctcgatggcccgccgctgggatacgaagcgcggccgtaccgtgggcaacatcaccgccgtcacatacagcaatacgtttaaaggagtcgaaggtatcaagaacgcccggtacggcatctactccgcggccgccgacacgcccatctatctcgacgattattatgacaaccaatattcgaacgatgtccggctcggagcgatgcacaactgggcgttcatcctcgacgcctctaaccgtatcgagttcaagaacctgctcaatatattggggcgtaaccgtctgaccgaacgccggggcatcaaggacatgagcagcatgtactatctcgaacagaccgaaatgcagtactcttcgcgcctgacctatacggggcagttctccggcacgcaccacctggccggtaccgatgcgacggtgacgtgggatgccggttactcctatgccgaccggaacgaacccgaccgccgcatcgtctccaatatggccggtatcggaagtacggatgacctggcggatgtggtgacgggcaacgacaacatcaaacgctacttccagaccctcggcgaccacatcgcttcggcttccggcaactatgtgcagcagttggcctgggggggtatccgacccacgttgaaggccggcatctacggcgagtaccgttaccgcagctacgaccagcgcgagttcatctaccgttacgacaacctttccgccgaagagcggcaatattatctcaagctgcctttccaggagatgctgtcgcccgaatggctgggagcggacaaggtctatatcgacgagataacccgcaagaccaatgcctacaccgccgacatctattacggagcggcttatgcggcgctcgacattccgctcggaaaattcgatatctatgccggggcacgtctcgaaagctacaccacgaagctgacgcgagaccgttcggatgcacccgaacttatcctgatgaccaccaagacgcaccacgacctcaatctgctgccttcggtcaatgtcacttaccggatagacgaccggcatcagttgcgggcggcttacgggcgttcgctcaaccgtccggagctgcgtgagctttcccctacggtctattacgatttcgacctcttcagcgagatagccggtaacgagaacctcaggacggccgtcatcgacaacgtggacctgcgttatgaattctatcccgcaccgggcgagacggtgagcctcggtgccttctacaaacacttccgcaatccgatagagtggacctatatcgacatgggcggttcgctccgctatatgtatgagaatgccgaccgggcccaaagctggggtgtggagcttgatgtgaggaaaaacctcggctttatcggtatgccgaacctttcgctggtgctcaatgcggcgtggatatacagcaacgtgacctttgtgcccggcgaggtggtgtccgaacccgaccggcccatgcagggacagtcgccctacgtgataaacgcgggactctattacagttccgaacgactcggactcgacgtggcgctgctctacaaccggattggcaagcggatagtggggctgggcaagtccaacagcgtcaatcccgaccccaatacgctgattcccgattcgtacgaaatgccgcgcaacgtgctcgatttctccgtatcgaaaaggatagggcgacgggtgacgctgagctgttcggtgaaggaccttctctcggaggacgtggtgtacaagcagttcccgaagttcgagaaggacggacagatgtaccgacgggaacaggtcacccggcgctacaatcccggtcagagcgtatcgctgactgtctcggtaaagctgtgaacgatattcgacaggacagacaatagagaaaacaccaatttttaatcgaacagaaaaagatgaaaaagaacatcaagatggccgccgtggcatgtatgctcctctcggcctttgctaccgtaagttgcgacaagaatacggacaacggcggcgagaatcctccgcagggcgaaacgttcgaactgggcgacggttcgaaggataatttcgaaatcgcttccgacatgacgctgacctatccgaacgtctatacgctcaaagggttcgtttatgtgcccgacggtgtgacgctgaccatcgagcccggtgtggtgataaagggcgacaaggctacgcagggtacgctcattatcgaacggggcggtaaaatcatggcacagggtacgccggagcgcccgattgtcttcacttctgcccaggctcccggcagccgcaagcctggtgactggggcggtatcatcctgctcggcaaggcgcccaacaacctcggcgaacagaccatcgagggcggcgtgcgttccaaacacggcggtaacgacccggcggacaattccggcgtgctgagctatgtacgtgtggaattccccggtatcgaatactctacggacaatgaaatcaacggaattaccttcggttcggtcgggagcggtaccaaaatcgaccacctgcaggtatcctactcgggggacgactcctatgagtggttcggcggtacggcgaatgcgaaatatctcgtcgcctattcgggttgggacgatgatttcgataccgacaacggcttcagcggcaaggtacagttcgccatgggcgtgcgcaatccgaggataggggacaagtcggcctccaacggtttcgaatcggacaacaacggcgacggtgcggctaccgaaccctacacctcatgcgtgttcgccaacgttagcctgttcgggccggtgtccaatcccgcatcctataccgaacaggccggcgccgagggtagcccggtcgatgcgagattccaggccgcgcttcatctgcgccgcaatacccagctcagtatctataactccctcatagcggctttcccggtagggctgattatcgagaacgacaaagggtctaccacacaggattgggctgagcagggcaaactcaacgtaaccaactgcgtgatggccggcatggtgaagaattaccaggatgcacagtattggaaggatggttcccagttcgacgatgaggatgcgggtagtttcgccgacggttatttcaaccgtgcggagggtggaaacagggtgttcgcagccctctccgacctcggcctcagcggcaatccgctcagcctttccgctccggtggtcttccccggcagtgacagtccgcttgcttcgggtgctgcatggacggaggagaaggtggcttcgggcttcgataaagtggactatatcggtgctttcggtccgaatgagaccgctgccgccaactggacgagcggctggtgcaatttcgacccccagaatacggtttactaaacgtcggcaggttggtcaatttgtcggtgggcgggctgctgcggcggtccgcccttttcccgttccgcggcggagcttccggtgtgccggcaatgcatgcggggattgcgttccgtgcaggaatattacagcccgaggtcttcgtcaatcaagaccaccgtaatcctccctttcggatggcatttgtgcagaatgagccgttcgttgcatatccgtcggggcgatgcacaatccatgcaccggcccgttttcacgcacggcgtgtcgaaatcctcatgacgggccgcattgcgcggggcggccgtttcacggatacgcctgaaggcggcatcgccgtcctccacgattttgttccgaccgacggtcaggatgacgtgccgcggtccgaaggctatcggagcgatgcggttgcctatcatgtccagccaatgcagctccccgtcgagggtgacggcattcgcgccggtcaggaacaggtcgcataacagcgcctgccggcgtctttctatcagttccctgaaaggaacgccctgttcgaaagtgtcgatgaacggataggtgcgctgcgtccgcagccactccaccgtccccgtcgcgtagagcgtcatcgagtcgccgaaggagatactcgccggcgcgagttcggcgatgcggctgcggatgtattcgccggcctcgtgtgcgtcggctgctgtcgccacctcaaaaccgttgcgcctcagcctgtcggcacatctctccgttgtctttgcctgttccatcatgtgtctccattatgggcggttccggcagatgttttccggagaccgtaaaaaaagtctccacggagtacgcggagacataggtattaaaacctgcggcccatggccttattgtggtaagatgtagaagttcttacattgcaaatataggaaaaataagtgcacaaatccaaaaattttccttatttttacgaaaaaccgccaatttatggagaaaagattgggtatagatgtaggaaccaattccctcggatgggctatcgtggaggtggacgacgaaggatgtacgctgctcgaccgaggggtggatatctttcaggagggggtagcacgtgagaagaatcaggagaaaccggccgtgcaggacaggaccgatgcccgtgccctacggcggcactatttccgtcgccgtttgcgcaagatagccctgttgcgggtgttggtacggcacgacctgtgtcccgcattgtcggaggagcagttgaacgcctggcaggggaaggggatttatccgttggacgatgcgttcatccgttggcagcgtaccgacgacaatgcggacaggaacccgtaccgcgaccgcttccggtgtctgaccgaagaactcgatttggcctgccgcgaagaacgttacgtgctgggcagggcgctgtatcatctgtgtcagcgccgcggatttctgagcaatcgcaaggatgcgggaaacgaggccgaggagggtaaggtgaagcaggagattaaaaccctctctgccgacatggccgctgcggggtgcgaatatctgggcgaatatttctaccggctttaccagcggaaagagaagattcgcaaacactatacagcccggaacgagcactatctggccgagtttcgtgccatttgccggaaacagcggcttgatgaggagttgcgacaggcattggaaaaagccattttctatcagaggcccctcaagtcgcaaaagggcttggtaggcaagtgtactttcgaaaaggacaagagccgctgtccggtgtcccatccgcgcttcgaggagttccggatgctccagttcatcaacaacgttcgggttacgggtcccggcgatgcggagccgcggcccctttcgccggaggaggtggagattgtccgtccgctgttcctgcgcaagagcaaaccgcatttcgatttcgaagacattgccaaaaagatagcgggcaaagggaactatgcctgccggggcgagttgctgcaggcgccgtaccgcttcaattgtgccggtaaatcgacggtgacggggtctcccgtatcggcccttttcgcttcggttttcggagatgattggcagcgtgagatttgcagcctgtatacgctcggtgccgggaaaaacgaggagcagatactcaacgacgtatggcatgtcctcttcgcctttgaggacgaggagcggttgcaggcctggttgcaggagaaactgcagctttcagccgacgatgcgaaaaccctggcggccttccgtctgccgcaggggtatgcgtcgctgagcctgaacgttatcaacaagatacttccctacctgcggcgcggataccgctacgacgaggcggtattctttgccaacctcggaaaggtgcttccggcggaggtgtatgccgacccggccaggcgccgcgaagtggagcaagggatttccgcccagatggatgatttgggcgacggagagaaaacacggaaggaggaacgtattcgcgattatctgcggcgttattggggcgtagaggagaagcggctggagcgcctttaccatccttcgatgattgaggcgtatccgtcggcgtctcccaacggacagggtctcctgcagctgggttcgccgcgcatcccggctgtccggaatccgatggccatgcgagccctgttccgactccgcgtactgctgaacgaactcctgcgcgaaggaaagattgaccgtggcacgaaaatcaatatcgagctcgcccgcgagctgaacgacgccaacaaacggaaggccatcgaacgttaccagcgggagcgggaggctgagaaccgcaaatatgccgaagagattcgccaacagtatgtcgaagcgacgggacattccatagagccctccgaagaggatattctcaaataccgtctgtgggtggagcaggggcattgttccctttatacggggaagacaatcgggatttccgagtttctcggcgacggccggcggtacgacatcgagcataccgtcccccgttcgcgtgggggagaggatgcgcagtacaacaagacgctgtgcgaagaggaattcataccgcgatattggcctgtgtcgagtcgtgcggatggttcgagcgcatcgaggggttggagcatcgggtctggggggcggaccgtcgcgcaaagagtgcgacgaccaaatcggcgaaggatttcgccattcaggaccggcactactggaggatgcacctcgattactggcgcaggaagtgcgaggcctttaccatgacggaggtgcccgaaggattcagcaatcggcagggtgtggatgttggcatcatcggccggtatgcgcggctctatctgcagacagtcttcgaccgggtttatacggtcaagggtgctacgacggctgcgttccgcaggatgtgggggctgcaggaggagtatgcggcgaaagagcgcgtgaatcatgtccaccactgtatagatgccattaccatcgcctgcatcggaagccgggagtacgccctgtgggcgcagtac

SEQ ID NO: 2031 - DNA, 12065 bp, synthetic construct
  misc_feature 1..12065: note = Synthetic
  source 1..12065: mol_type = other DNA
gtgttgctaaagctgaggctgaggctcttaagaaacaactcgaagaagctggagctgaagttgaacttaaataatattgcctgaaattcaggtaattaggttaagaatcccctataaagtcgattcttaacctttttgtgttattttcaatttcgggttcaattaatattatttttatgtcagtttcaacagtaaaaccacgcgtaaatttcgcctccgtaaagaatccgttgcccttccccgactttttggagattcagctgaagtcgtttcacgatttcttgcagctggacactccgttagagaagagaaagaacgagggattgtacaaggtttttgcggaaaactttccaattgccgacacaaggaataactttgtgctcgaattcttagactattacatcgacccgccgagatatacgatagaggaatgtcttgagcgcggcttgacatatagtgtgccgttgaaggcaaaattaaaattatactgtacggatcccgaccatgaggacttcgacaccgtaatccaggatgtttatcttggaccgattccgtatatgacggaaaagggcacatttgtgatcaacggtgcggagcgcgttgtcgtgtcgcagctgcaccgttcgcctggtgtgttcttcggacagagcacacacgccaacggaaccaaattgtattcagcacgtatcatcccgttccgtggctcatggatagagtttgccactgacatcaacaatgtgatgtatgcctacatcgaccgtaagaagaaattgccggtaacaacattgttgcgtgccatcggtcttgacagcgataaagacatcatagaaatctttggtcttgctgaggaaataaaagtaaacaaaacgaacctgaagaaatgcattggccgcaagcttgccgcccgagtgttgaaaacgtgggttgaagatttcgttgacgaagacaccggcgaggtggtttcgattgagcgaaacgatgtggtcatcgaccgcgagaccgttatcgaggaggagcatatccaggaaatccttgattcgggacttcagaccatccttctgcacaaggaggatgtagacatgagcgactactcgattatcttcaatacactccagaaagactcaagcaactctgaaaaagaggctatcaactatatctatcgccaattgcgcaacgcggagccaccggacgatgcgagcgcgcgtgaggtgataaccaaccttttcttctccgagaagcgttatgacttgggcgatgtgggccgttaccgcatcaacaagaaattgtcgcttacagtgccggaggaggtgaaagtgttgactaaggaagacatcatcgccatcatcaagtatttgattgagcttatcaattcgaagtcggatgtcgacgatatcgaccacctttcgaaccgtcgtgtgcgtaccgtaggcgagcagctctacaatcagtttggagtaggccttgcacgtatggcgcgtacaatccgtgagcgtatgaacgtccgcgacaacgaggtgtttactccgattgacctgatcaacgccaagacaatctcttccgttatcaatacgttcttcggaaccaacgcattgtcgcagttcatggaccagaccaacccgcttgccgagattactcacaagcgaagaatgtcggctctcggtcctggcggtttgtcgcgtgaccgtgccggatttgaggtgcgcgacgtgcactacacccactacggacgtctttgcccgattgagacccctgagggccctaacatcggtttgatttcgtcgttgtgtgtgtttgctaaaatcaacaacctcggctttatcgagactccttaccgcaaggttgagaacagcaaggtggatctcgacaacagccacgtcacttatctgacagcggaaatcgaggaaggtcagatcatcgcgcagggcaacgctccgcttaacgatgacggcactttcgtaagaaacaaggttaaagcgcgtcttgacgccgacttccctgtggtagcaccagaagaagtgcagcttatggacgtgtcgccgatgcagattgcctcaatcgccgcatctttgattccgttccttgagcacgatgatgccaaccgtgcgttgatgggatcgaacatgatgcgccaggctgtgccgttgttgcgcagcgaggctcctattgtcggcacaggcattgagaagcagcttgcccacgactcccgcacacagattatggcagagggcgccggtgtcatcgagtttgttgacgccagcgttatcagaatccgctatgaccgtactgaggacgaggaattcgtgaatttcgaggactcggttaaagaatatatcattccgaaattccgcatgaccaaccagagcaccacaatcgacttgcgtccaatctgcaagaagggacagcgcgtcgagaagggaatgattctgacagagggttatgccacggaaaacggcgagctcgcactcggccgcaaccttaaggtggcgttcatgccatggaagggttacaactacgaggatgccatcgtgctcaacgagcgcatggtgcgtgaggatatccttacgtctgtccacgtcagcgagtactctcttgaggtgcgcgagacaaaacgaggaatggaggaacttacgtcagacattccaaacgtcagcgaggacgctacaaaggatctcgacgagcgcggaattgtccgtgtgggcgcacacgttgtgccgggcgacatccttatcggtaagatcacacctaagggcgagagcgacccgacgccggaggaaaaacttctccgtgccatcttcggtgacaaggccggcgatgtgaaggatgcgtcgttgaaggcatctccttcgttgaagggtgtgattgttaagaccaacctttatgcaaaggcacagaagaagaagggcaaggcggcaaaccttgagcttcagcagatggacgaggaattcgaacagcgtcaggtggctttgaaggcacgtcttatcgagaaactcatcacgcttaccgacggcaagacttcgcaaggcgtgaaggacttcctcggcacagaggttattcctaagggcgagaagtttacggcagagtatttgaagggcatcgaggaattcgacaccatcaacctcagcaagtggacaacagacgctcacaagaacgatatgatccacgacacgatcatcaactacctgcgcaagtcgaaggaaatcgatgcagaattgcgccgcaagaagtttgacttctctatcggcgacgagcttccttcaggcatcatgcagcttgccaaggtttatgttgccaagaagcgtaagatcggtgtcggtgacaagatggcgggtcgccacggtaacaagggtatcgtttcgcgcgtagtgcgtcaggaagatatgccgttccttgccgacggaactccagtggatatcgttttgaacccgcttggtgtgccgtcacgtatgaacttgggacagattttcgagaccgttctcggatgggcaggccgcgagcttggcgagaaattcgctactccgattttcgacggagcgagcctcgacgacctcaattcatggaccgacaaggcgggagtgccacgctatggtaagacatacctttacgacggcggcacaggcgagcgcttcgaccaaccggcaaccgttggtgtaatctacatgcttaagctcggccacatggttgaagacaagatgcatgcccgcagcattggcccgtactcattgattacgcagcagccactcggcggtaaggcacaattcggtggacagcgtttcggagagatggaggtttgggcgcttgaggcattcggcgcatcccacatccttcaagagatcctgacaatcaagagtgacgacgtggttggccgcagcaaggcatacgaggcaatcgtcaaaggcgagcctatgccaactccgggcatacctgaatccttgaacgtgcttctgcacgagcttcgtggtctgggacttagcataaacttggaataaaacgacaaaagaatatggcattcaataaagataatagaataaaaagtaacttttcgaagattacgatcgggcttgcttcgccggaagaaatccttgagcggtcatacggcgaggtgctcaagcctgagacgatcaactatcgaacttacaaacctgaacgcgacggtctgttctgcgagcgcatttttggtccggtaaaggactatgagtgccactgcggaaagtacaaacgcatccgttacaaaggcatcgtctgcgaccgttgcggtgtggaagttacagagaagaaagtgcgccgcgaacgtacaggccatatctctttggtcgtgccggtagcccatatctggtatttccgctcattgcctaacaaaatcggttatcttctcggcttgccgtcgaagaagcttgattctgtaatctactacgagcgctatatcgtaatccaaccgggagccgcagccgagcttgagggtcatgaggaccttgcccgtctcgacctcctttcggaagacgaatatcttgaaatcgtggacaagttgccgcgcgagaactcgatgctcgaggactcagactccaacaagttcatctgcaagatgggtgccgacgcaatctacgatttgttgaagagcgtagaccttgacagcctttcttacgagttgcgccaccgtgccgacaccgacacgtcgcaacagcgcaagacggaggcattgaagcgtctgcaggttgtagagtcgttccgtgcgtcgaaaaaccgcaacaaaccggagtggatggtgctgaaagtggtgcctgtcactcctccggaattgcgcccgctcgttccgttggacggcggccgtttcgccaccagcgacttgaacgacctttatcgtagagtcattatccgtaacaaccgcttgaaacgccttatcgagatcaaggcgccagaggtgattctccgcaacgagaagcgtatgcttcaggaggcagtcgactcattgctcgacaactcacgcaagtcaagcgttgtaaagaccgagagcaaccgtccgttgaagtcactcagcgacagcttgaagggtaagcagggacgtttccgtcagaacttgctcggtaagcgtgtcgactactcagcgcgttcggtaatcgttgtaggtccggaattgaagatgcatgaatgcggtttgccaaaagacatggcagccgaactttataaaccgtttatcatccgcaagcttattgagcgcggcattgtgaagacagtgaagagcgccaagaagattgtagaccgcaaggagccgattgtatgggatatccttgaatacgtgatgaagggtcatccggtgcttctcaaccgtgccccgacacttcaccgtcttggtattcaggcattccagccacgcatgatcgagggcaaggctatccagttgcacccgttggcatgtacggcgttcaacgccgacttcgacggtgaccagatggctgttcacttgcctctcggcaacgaggcagtgctcgaggcgcagttgttgatgctcggcgcgcacaacatccttaacccggccaacggcgctcctatcaccgtgccgtcgcaggatatggtgcttggtctgtactacatcaccaagctccgcaagggcgacaagggcgagggtcttgtgttctacggaccggaagaggctcagattgcatacaacgaaggcaaatgtacgcttcacgccataatctctgttgttgtcgacgaccttgacgaaaacggaaacctcgtgaagacaatggttaaggaaacgtctgtcggacgtttgctcttcaaccagaacgtgccagaggagatgggctatgtcaacacattgatttccaagaaatcgttgcgcgacatcatcggcgccgtcatcaagcgttgcggtgtggttcgttcagccaagttccttgacgacatcaagaacctcggttactacatggcattcaagggcggcttgtcgttcaacttgggcgacgtgcttatccctgccgagaaggaagaatacgtaaaagaaggttacgcgcaggttgaagaagtgatgaacaactacaacatgggattcatcaccaacaacgagcgctacaaccagattattgatatttggacgcacgtcaactcccgcttgacaagcacattgatgaagcagcttacagcagccaaccagggcttcaacccaatcttcatgatgcttgactcaggagcccgtggttctaaggaccagattcgtcagctcgccggtatgcgtggtcttatggccaagccgcagaagagcggtgccgagggcggtcagattatcgagaacccgattttggcgaacttcaaggaaggcctttcagtgttggagtacttcatttctacccacggtgcccgcaagggtcttgcggatacggcattgaagaccgccgacgccggttatcttacccgtcgtcttgtcgacgtagcccacgacgtgattatcaccgaggaggactgcggcacgcttcgcggacttgtctgcacagaacttaagaacaacgaagacgttgttgcaactctcagcgagcgcattctcggacgtgtgtcggttcacgatgtggtagacccattgacaggcgacatcatcgtgaagagcggcgaggaaatcaacgatgcagcagcagagcgcatcgagaagtcgccgattgagtcggttgaagtgcgttcggtgcttacctgcgagtcgaagaagggcgtctgcgccaagtgctacggccgcaacctgtcgaccaaccgtatggttcagaaaggcgaggctgtcggtgtaatcgcggcacagtcaatcggtgagccgggtacgcagctgaccctccgtacgttccacgtcggtggtgtggcatccaatatcgcagccgtatcgtcagtgacatcacgctacgacggtgtgcttgagattgaagagctccgcacggttaagacagaggactgcgacgtagttgtaggccgtctggcagaaatgcgtatcgtcgacgccaatacgggcatggtgctgacaaacaccaacatcccttatggttcgaaactttacttcggcaacggagcaacagtcaagaaaggcgatgtaatctgcgaatgggacccgttcaacgccgttgttgtcagcgaggttgccggtaaggcacaattcgtcaacgtgattgaaggtgttacttaccgcaaggaaaccgacgagacatcgggcttgcacgaaaagattatcatagagtcgaaagaccgcaccaaggtgccggaggtcaacatcgttgacgccaacggacaggtgctgaaaacatattcattccctgtcaacgcccaccttatgattgaggatggtgatgaaatcaaggcaggtcaggtgtttatgaagacaccgcgcgcatctggtaacgcaggtgatatcaccggtggtcttccacgtgtcactgagctcttcgaggcacgcaacccgtctaacccagccatcgtttcagaaattgacggcgaggttatgttcggaaaaatcaagcgtggtaaccgcgaaatcagcgtgacatcgaagattggcgaagtgaagaaatatctcgtgccgttgtcgaagcaaatcctcgtacaggaaaacgactacgtgcgtgccggcacaccgctttcagacggtgcgatcactccgtcagacattcttaacatcaagggcccgacagccgttcaggaatacatcgtcaacgaggttcaggacgtctatcgcatgcagggtgtgaagatcaacgacaagcactttgaggtgattgtgcgtcagatgatgcgcaaggtctgcatccttgatccgggcgacacccgcttccttgagtcgcaggttgtcgacaagcgcgactttatggatgagaacgaccgcatttggggcaagaaggtggttaccgacgctggtgactcacagaatctccaggctggtcaaatcatcacagcgcgcaagctccgcgacgagaactcagctttgaagcgcaaggacttgaatctcgtacaggtacgcgatgccgttccggcaacgtccgaccagatgcttcagggtatcacccgcgcagcattgcagacttcaagcttcatgtcggcggcttccttccaggaaaccacgaaggtgctcaacgaggcagcaatcaacggcaagaccgacaatctggagggtatgaaggagaacgttatctgcggtcacttgattccggccggaacaggtctgcgcgactacaactcgcttgttgtaggaagcaaggaagactttgaatatctcgacaagagtctcgacgcccgtcttgaggctgaagcggctgaagacgctgccaaaatcaagaaggctgaagagaaaggcaaataaagaaactgattgaaaaaactgacaataaagatagctcggcgattggttcgtcgggctatctttttaatgagtggacaaacaaaaagcctccacggaaagtacgcggaggcataggatttatatccttcggcatatagccttattgtgataagatgtagaaataatcttatgttgcaaatttctacagaataattgatatttccaaataaatttcgctaaatttacggaatattgaaaaaaccgaaacaaaaaacgatatgaaaagagtatttggaatagatttgggaaccaattcaataggatggtcaatagtagagcagttggaaaatggaaaatacagacatataaaatctggtgttgacatttttaaggatggagtggatcacgataaatcaggagagcatccatgtgtgcaattacgaactaatgcgagaggattgcgccgacattattttcgccgtcgtttacataaaatagagttgcttaaaatattgatagaggaaagaatgtgcccgccgttgacagatgaagatcttaaacggtggcggtttaagaaaatctaccctaaagaagacaactttatggaatggcagcgcacaaacgacaatttggagaaaaatccgtatcatgatcgatatgttgcgttgacacgaaaacttgatttgtcgatagagagcgatagatatatacttggcagggcattttaccacttgtcgcagcgcagaggattcttgagcaatcgtaaagattcaacgaaagagcaagaaggagaggtcaaggctgctatatctgaattgtcagataaaattaaagaggcaggatgtagttatctttgtgagtatttctacaaattgtatcaggctggggataaaatacgagggcattatacggctcgcaatgagcattatctgaaggaatttcaggcaatttgcgacaagcagtgcctcggggctgatttgtgcaagcgtttgaataatgcaattttttaccagcgacctctgaagtctcagaaaggaaatattgggcgatgtacgtttgaacttggcaagcaaagatgttcgacatcgcatccagcttatgaagagtaccgcatgttgtgttttataaataatatccgtttgcatcgtcaaggggaggattctgatttccgtgtgcttacaaaagaggaggttggcgcaataattcccaaatttgtatgcaagtcgcaatttaaatttgaaaaattggcaaaggtgttggctcataaaaaagagaattatgggttcaagtatgattctgatgaaagtactcttaaatttaattatcgaaaagaaacaagcattgctggcagcccggtgactgctggattgaaagaaatattcggagaagaatggaaatcggaaatctgtagtgtgtatatgaagtcggaaggaaagacagaggaccggataatcgatgatgtgtggcatgtgctctattcttttgacaatgatgaaaacatccgggattgggcaaaaaagaatctgcagcttgatgatgaacaggcagaaaagtttgctaaaatcaaaatcgaacgtgattatgcatcgttgagcctgaatgctatccgaaagattctgccatatctgcgacgtggtttgcgttatgatgaggctgtgttctgtgcaaatattccggcggcgcttgggaatgtagaagatgttgatgaatataggaaaattgaggatgacgtagtcgcatgtgtgcgaaatttcaaaagctgtgaagtggcgggtagaaaaaatacattggaaaaagaagtggcagaattgttggaggagaagtatggcgtagacaaacgtcatcttggaaagatttatcatccgtcaaaaacagaaacttatccaactgcacagcccgacaataacggtctgcggttgcttggctcgcctcgaacggcatccgtgcgcaacccaatggctatgcgggcgttgtttagattgcgggcgttgacaaacgagttgcttaaaaagggagaaattaattcagaaacggttgtcaatattgagtttgcaaggggattgaacgatgccaatatgcgcaaggcaatagaaaattatcagcgggaaattgctgataggcatcagaaatatgccaaggaaataaaggactgttatttaaaagaaactggaaaaaatattgagcctacagaaaatgagattctgaaatatcaactttgggaggaacagaatcatcagtgtttatatacaggcaagatgataagtgtcgctgattttattggggctaatccaaagtttgatattgagcacactttgccacgagctgctggcggtgatgactctcaggtcaacaagacactttgtgacagccgtttcaaccgagaagtgaagaaggcacatttgccatcggaattggcgaatcatgcagaaatattgttgaaggcaaaaaatctgtggcaaaagaaaatttatgagttgaccaagcagatagaaggaggttcctacagggttctctaatcgacagggtgttgatattggtattataggcaagtatgccaagttgtatctgcacaccgtgtttgacaagatttttgttgtgaaaggagctacaactgcggctttccgaaaggtttggggcttgcagtcggtgtatgagaagaaagaacgcataaatcatgtgcatcattgtgtggatgctattacgattgcatgtatcgggaaaaagcagtatgatgactggaaatgttatcaggaggcggaagatatgtattatcgaggagaaactgggcgtccgtcaatggacaaaccgtggtctacattcacagaggatctaaagcagctgacagagggcttgctgattcatcattatgtgcccgacaatgctggaaaagcatcgaaaaagaagttgcgcgtccgtggtcgcattcagcgtaatgccgaagggcgggcgttgtatgctactggcgattgcgcacgtttgtcattgcatcagcaaactttctatggggcgattaaacaggatgatgagatacggtatgtggtgaggaaaccgttggattcccttgagaagaaagatatagaaaagattgtagacccagaggtccggcagaaagttaaagaggctgttgacaccaaagggatgaaagatgctgtagctgacggaatctggatgaatgaagaaaaaaggattccaataaaaaaagtgcgtatatacacatcaattgcgaatcctttgcgattgaagcgtcaacgagatttgtcggtgcatgactacaaacgagattattatgttgccaatgatggtaattattgtatgggaatttatgagggaaccgatgcaaaggacaaaaagaagaaggcgtttaagatagtcaacaatatggatgctgcaaactattttaaggcaagacaacgcggcgaagatgtggaattgttgccaatgtcggatggtaatgatttcccattgaaatgtgttcttaagactggctctgtggtgctcttctatcaagacactccaaaagagttgaaagaatgctcaaagaaagagcttgcgaaaagattgtaccgcgttgtgggaatgtcggagatgaaaataaagcaaaaaactggaaaaatagactgttatggaatgctatctttgactttccaccaagaggcccggccgagcagtgacttgaaagataaaaatgggttcgctcgtagtatggtggctgattgttccgggcatgagcgttatcttccatgatagcgtgctgagcgcctgg

SEQ ID NO: 2032 - DNA, 11955 bp, synthetic construct
  source 1..11955: mol_type = other DNA
  misc_feature 1..11955: note = Synthetic
gtcgtaagtggtataaattcactctgccacatataaaaaatgttcccacacggtctgtgcgggaacgtaggaataatttccttcggcatatagccttattgtggtaagatgtagaaatatctttttagtgtcgcttcgattattttctgcaaaaataatgcagatttttcatatatccaaattttttattaattttgtgtgttagaaaatactttttaacttgatattttaactcatccactgatatggctaccaaaacattaggtatcgaccttggcaccaactctatcggctgggccattgtggagaaccaggaaacatcgaaacgacttctcgaccgaggggttaatatcttccaggtcggcatgaaagtcgagaagaatgtcgaaagcccaacggtttccaagcgcacggaagcccgcgcttcccgcagaaaatatttcagacagcgttgccgcaaaatcaagcttctcgagattcttgtggagcagaaaatgtgtcctcctctctctgatgacgatctgaagctgtggcgcaccaaaaagcttttccctctcaatgaagatttcatcgaatggatacatacctccgataacgatgaccgcaacccgtatcacgaccgccaccgctgcctccatcagcgcctcaacttagacgatgaagccgaccgattcactcttggccgtgccctttaccatctggctcagcgacgcggtttcctcagcaaccgcaaggaccccggcgaaggaagcgacgataaggatagcgagaccggcaaggtgaaaaagtccatatccgagctctcggccgaaatgaacgcctgcggctgcgagtatctcggcgattatttctaccgcctctatggcaccggcacacgcatccgcaaccgctatacggcacgcaaggagcactatcttgcagaattcgaccagatctgtcgcacacagcagctcgacgatgcactggtgcgccgcctcaacaatgccattttctaccagcgtcccctcaagtcgcagaaaggtagcgtcggacactgcacattcgaaaaaggcaagccccgctgcaatctttcgcatccggcatttgagcagttccgtatgctgcaggtactcaataatatccgcatccgccgtcccggcgatgccgaattccggagccttaacgccgaagagaggcagtccgccgagccactgttctatcgtaagtcgaagcctaaattcgaatttgccgaaattgccgccgccatagccggcaagaagacgccccgtgcctttcgcgagtcagccaatcccgacgccgtcctcttcaattatcccgatacatttactgtaaccggctcccccgttaccgcacgcatccgcgaggcattcggtaatgactatatggccgctctgcgtcgcgactgcaaaatcgccgatggcaaatccgattcgcagctggtcaacgacctttggcacgccctctattcattcgatgatgaagacgctctgcagaaatggctcaccgacaactacggactctcggccgatgccgcccgcaagcttgccaaaccgttgccccaaggctacgcttcgctcagtctcaacgctatatcaaagatactcccctggctgcttcgtggcatgcgctacgatcaggccgtgttcctcgcaaatctcaaagcagtgctccctgccgatttatggaacagtcctgacgaccgcgaagccgtggtcgaggatatggaacgcatcgtggtagaagatgcccgactcatagtccatcttgccgagcatcgagaccgactgatgcaggttgaggtagcgcttgccttccggcttgacgccctgcggcgagaggatcagcgcctcatggccgtcgaactccgcgaagttcgggcactcccacatgaagccctgattgccgtgcgccttggccatgacgtgcttgaactgccagttctcgaggtcctctgactcgaagacgagcacctggccgacctcgtctgccgtctgcgcgccgacgaccgcatagtagcgtccctcgtgctgccagaccttcggatcgcggaagtgatgatcctcacccgtcgagacgttctgcggcagcttgatgaccggattcttctccgacttctcgaagtggatgccgtcgacgctgaccgcgaggttctgcgtctcgatgcggtccggctggcccggcttcttcagcaggtcgacatggcccgtgtacaagaggtagagcttgccgtccttctcgatgccactgcctgtgaagcagccatccgcatcgtacgggcgatccgggaagagcgcgactggctgacgctgccagtgcacgagatccttgctcgtcgcatgcgcccagtgcatcggcccccacttcggctcgtacgggtagtactgatagaagaaatggtactggccgccaaagtaggcaaagccattcggatcattgcaccagccgacgcgcggcgcgatgtggaagcgcggataccagcgcttgttgacctccgcctcatgtgccgcaataaacgcgtccggcgtgagttccttctgttcgtctgtcatcgtcttcacctcgtatagttcctatatcgaaccgattcgataaatacgtctggaaaatcgaagcagccttctcgcattccgtcgcatgtcgaaccgcttcgatgcttttattatattcactttcatcgcacatgtcaatcatttcatcgtatttatttttcttgtcattgtcattcaatttatctgaaaatactgtctctataagtaaaagatatgcaacaaaaccgagattgtgatagactaaacacaagaccagatgaaaggactgctcctatggcaagaatcaaagatgtcgccaagctcgctggcgtcagcaccagcacggtttctctcgtgctcaacaacaagggatacgtctcagccgccacgcgggccaaggtcgaggccgccgtccaagagctccactacgtgccgagcgaagtcgggcgcaacctctcgctcaaccgcacgaacctcatcggcgtcatcatcccggacgtcgctcacccctttttcgccgccctgctgcacgagattgagatagctctctacgattacggctacaagacgatgatctgctcgacgggcgagaagaagaacgccgagctcgccttcctcgacatgctgcgccgccatacgatggacggcctgatcatcggcgcccatgccctgcacatcgagaactaccagcacatcgagctgcccgtcatcgccttcgaccgctacctctgcgacgaaatcccgatcatccgcgctgaccaccatcagggcggccagctggccgccaatgcgctgctgaagcgccatccgcaccatgtcgtgcagatcaccggcgctccaaccgtccacacgacggcccacgaacacgaggacatcttcgcgcaagtcatcaagcaggccagcgtcccgctcgacacgattgtcatgccggccaacgccctgcagcccaaggacttctctacagccgcccgcgaggtctttgagcgctatcctgacgtcgatgccatttccggcacggacctaggcgccatctgtgcgctacgtgaggccagccgacgcggtcgccgctgtcccgacgacctctccatcgtcgcctacgacggcacctacctgacgcgcctcggcccgcagaccatgactgccgtcgtccagcccatccccacccttggccggcgtgccgccgaagccatcgtgcgccgcatccgccacgaagagctcccctcgctccagccgctcccgatgggcttccagcagggtgagacctgctgattatattgaaaacctacagattcgatagccttttcgtgtgttatgatttgtgcggcgcgaggtagatgcggccgtgggcgtcgatgcggctcagatggcgcaggtagaagcgggcgatgatgccggtcaagagcgcggaaatcagcgtgccctcgcggatgccctcgatggtgcccatggtcagcacggagacgatggcggcgattgcgacgaggctgatgtcgttgccgaccttgactttgccgaagtcgatgcctgttttgcgcgcgaagacgtagacggcaccctcgccggcgagcatgaggacatcggcgatgccctgtcccgcgacgccgagcgcgacgagcgccgtgccgagcaggcagagcagcagcttgagcgcgtaggcctccggcacgatggcgaagagctgcatgaagaagtcgatgcagaagccgaagaggatcgtcacggggatctgcagccagaagacagccgggaaatcgcgccgcagcatcaagagctcaaagacgacgaagaccatgttgacggcgaacgtcgtctggccgaatgtgaacggcgagatcaagcttaggacatacggcaggctcgagatcggcgacgtgcccaagaggctcttgaccacgagagcgatgccagccgactggatcatgacggctaggattagcagtaaatagcgtttgggggtagacaaaaaatcccttctttcacaataacctttttcattatacatgcatattgcttcaagttgcaatgtatgctatactaaaaataatcgaaaaggtatctatcgtaagataggccaaaaggctcccagtctgcacacctgggagcctttttcatatagaataaaaggtcagctgctcccaaatgaagggattggctgaccaacaggctaagaacgtgttgccgctaccgttctaaccatttctggatgcagtaccaaattgcacacgatactactccagcaagaacggacatcgaaaaggtatccactgtaaataagcccccttcctgttgccagtataggggcggcaacatacctagtatagcatagtttattgttctgtgagagggctcttctacaaaataagtaagccactcctttactgaagagtggcttgcttggctttagtgccaagagacacaaataatcgcctcggcctaggaaactgagcggctatttgtaactcgtttttataagggccaaccgtctatcggtggcttctttctttgttcattatatcattttcgcaagaatgcgacaaagtgtttatcgcctcactcgacccagtggatcttcttggcgtcgtagcggtcgacctgtggtttcttgccgacggggtagccgaagggcagcagggcgaacgcgtactggttgtcgggcaggttgaggatcttgccgactttctcaatgcggtccgggacgggggaaacggccatcatgacgccgccgaggccgagttcttcgagctcgagccagaggttttcggtggcgatggcgcagtcgatgtcggtgatgcccgggaagatgacgtccttgcgggcggcgatgacgagcacgacgggggccttggcggcggctccggcataggggctcgtcttagctagcgcctcaatcgtctcgcgcttcgtcacgacatagaattcccagggctgctggttgcccgccgacggcgcgacaaagccggcctgcagcagcttctcgattttctctttttccacgggtctatcctcgaatttgcggacgctcgtgcgggtgaagatggcgttcatgatatcatatcctttctctgttgtcgttatttattttcattatagcagatgcggctctctcctcaatactatccttttggttactatcatacaataaagtgcattcttcacaaaggatgcgattacggctacaatgaacacatcagctgaaatgagccgctacggcaaaaggaaaacctatgagatacgacgaaatagatggaggatatttatgttaaacgaaatcaattggccgcatgactacctgccgggcttcacggacaacttcgcctcgaatgaggtcatcgtcagaggcatcaacgcagaggagacgttcgcgaacctcatcgacacgagcatctggccgacgtactacagcaatgtcgctgatgtcgagttcgacaatacggagggcacgaaattggcaccggatacgcgcttccgcttcaagacgttcggcttcccgattgaggcagagattacggagtttgaggcaccgcatgacggtcagccgggccgcctggcatggcatggctgggctgaaggcgacgcagagcatcgccttgatgtcatccacgcctggcttatcgaggatctatcggagggtcgcgtgcgcatcctgacgcaggagtcgcagaagggcaagccggcggctgagctccatgaagatccgaaggacccgatgaatgtcggtcatcaggaatgggtccgtgggctcgccgctacggtactggcagcacatcaggactgatggccgcagactggtgcaaggcagcgggtcggctggtcatctggataggggagaaatcatggcaaaagagaaaatgttccactgcccggttgaggcagcactgagcctcatcggcggcaaatacaaatgcatcatcctctggcacctgatgcagcggacgcaccgctatggcgaactgcaccgcctgattccgcaagcgacgccgaagatgctgacacagcagctccgcgagctcgaggcagacggcgtcatccaccgcgaggtctaccctgtcgtgccaccgcgcacggagtatagcctgaccgagttcggccagagtttgtctcccatcatcgaggcgatgtgcgaatggggcaaggtgaatatgaagcagagaatactgcccggggctgaggaatgacggctctctggcaggagatgagatcaacaggagggatttttatgaagcgtgttcttttcttgtgcttggccgcgctgctgatgctgccattctttggtggccattcggaggctgctgccagcaagggcaagattctcgtcgtggcttcgagccagtctcagatggagctcgccaataagagcatcatgaatgtcggcttcttcctcaatgaattcgccgtgccgacggagtatctggcagagcgcggctatgagatcgtgcttgccacgccgagcggcgagatgcccgtcatggacaaggggtcgaacgacaagaaattctttggtggcgatgaagcggcccgctccaaggcggtggcgttcgtcgatggcctcaagcccatctcgctgcaggacgccatcaagggcggccttgaccagtatgcggccatctttgtgccgggcggccatgcgccgatgacggacctcatgcaggatgaggatctcggcacaatcttgcgctacttccacgagaagcagaagccgacggcgttcatctgtcatggcccgtctgcgatgcttgcagctctgccggatgccgcggcttaccgtcaggcgcttgtctcgcatgatgcgaagggagccattgctgctgccaagggttggatctacagcggctacgagatgacggttctctcagatgctgaggaatggccgggtgaagtcgcaaaaggcacggagatgccgtttcacgtcgagcaagctctgcagattgcgggcggcaagatgcgcgtcgacggcatgtacggtagccacgtcgtccatgaccgcgagctcatcacaggccagaatccgtcctcggacatcgaactggccaaagagctggacaagaccttgcaggctgagtgatgccaagcctataaaaagagccggatacccttgttggtatccggctcttttgtgtatttatgctgtcaggctcaggcctcgctggcgtgctcgtctgcgaggagctggcgggtgtgctcggcgacctgctccggcgtgatgtcggtgaggcgggcgacgccgctctcgattgctgccttggcgacagcggctgcgacagccggggcgacgcgcggatcgaacgggcttgtgatgacgtgctgctcgtcgagctctgtctcgtcgatgagatcggcgatggcctctgctgcggccatcttcatctcttcattgattgccttggcgcgtacgtcgagggcgccgcggaagatacccgggaaggccagcaggttgttgacctggttcgggtaatcgctgcggcctgtgcagacgatgcgggcaccggcagcataggcctcgtccggcatgatctctggcgtcgggttggccatgcccatgacaatcggatccttcttcatggagcggaccatgtcctgcgtgacggcaccggcgatggagacgccgatgaagacgtcggcatccttgatgacatcggcgagctggcccttctcgtgctgcgggttcgtgatcttggcgatatcatccttgtaggggttcatgtcttcctgacggccctcgtagatggcgcccatgcggtcgcagaggatgatgtcgtggccgcccatgctgtgaatcaggcgcgtgatagcctggccggccgcaccagcgccgttgaggacgaacttcgactcctcgaacttgcgccccgtgagcttgaaggcgttgatcagcgccgagacgacgacgatggccgtaccgtgctggtcatcgtggaagacggggatgtcgagcttctcgcgcaggcggcgctcgacgtcaaagcactgcggtgccttgatgtcctcgaggttgatgccgccgaaggtcggagccatgagctcgacagcgcggacaatctcgtcgacgtcctgcgtgtcgaggcagatggggacggagtcaacgccggcaaagcccttgaacaggatggacttgccctccatgaccggcaggccggcgccagcgccgatgttgccgagaccgaggacggcactgccattcgtcacgacggcgaccgtgttgcccttgttggtgtagtcgtagatcttattgtagtccttcttgatctcgaggcatggagccgcgacgccaggcgaataggccagcgtcaggtccttggccttctggagggggactttgctgtgcatctcgatcttgccgtggtgttccttgtgcaaggctaatgcctggtccgtcaatttgctcatgggggatacttcctttcttgctttgcttcttgtctgcgcagaatcgcgctcgtcaggcgatggggaaagcaaggctgacgtttatgatagggttattgagttatacttgtgataaacgttacattttacagtaaactttagttacaaccatgttcaaactgtaaaaacgtgttgcatactattatattgttgttgaaataaaaatacaaatataatttgttaatagtgaaataagttgccataataatatgagcctttcctacaatttgtttggcaggaaaggctcatattggtatgcttgtcgaaagacggtgtcttattgtgtctttgccgtgttgctgctgcgcgtcggagcggctggcgccgtctcagcaggggctgctgtcgtgtgggagctgcccgcatgcgagctgctcgtaaagtgatcgctcgtgccctcggagctcgagcggctcgtgctcctcgaactggaactgctgctgcttgagctgctcttgctcgagcttgaactcttgacactgctcgagctcgagctgctcttcgccttcgtcgtcgacggggcagaggtggcacccgccgggatggagctctcgtactcgtgctgcgtgcgttcgagctgtgccttctcgctggcgttcagcgtgatgccgagtgtctcggccagcgtcgtgcgcagcttctggaggtctgggatccagtagctgacgccgtcgatgtagagcggcttgcccggtaccatctcggtcttgagcccgttcttctgggcttccttgagcgtgccagcaaactcgagcagctggcggaaggagaggtcggtcttgacggaggacatgacttcgccgatgacgctcggcagcttcgggatgatggccggggatgtgaccttgtccatgcaggccttcatgaacttctgctggcgcttgatgcggccgatgtcgccctcttcgtcgcggtagcgcacataggtgacggccgtcttaccgtccatgtgctgcatgcccggctgcagatcgatgatcaggccgccgtcgtcgtcccacgggtcttcgtagtacatgcgcttctcgacatcgatgtcgatgccgccaatggcatcgatgattttctggaaggcctggatgttgacgacaacgtagtggtccatgttgacgccgaggaagtcctcgacggtgcgctgcgcgagcttctcgcctgcctcagggccgcccttggcactgccgtaggcgtaggcggcgttgatcttatcccagccgtggcccttgatcttgacgcgggtatcgcgcgggatggacatcagagcggcctggtctttcttcgggtcgagcgtcgcgaccatcagcgtgtcgctgcggccgacgtcgtcatcgcgctcgtcaacgcccatgatcatgatggtcgtcttgtccttggcagtcagcaggccctcctcgacgacgtcatcggccgacttgtcgagcaggctgttcgacgcgaagagcgcgcccatggcagccgccgcgataaaggcgacgatcaggagcccccaaaagagacctcgatgccggcggcgtgaacggcgcggctggcgaggcgggatcggattcgtttgcaaaatgataccttcttttctcaaaatcaagcataaatccctgctattctagcagggcacatttatagttacattataaggaaagcgcgtgggatgtgcaattactttattcatatccacaccatatcgtagcggtcaagcctgaaaaatcgatggatagatggtagaatggggggagaccatagagaaaggatgatggatatggcagcagagattgaacgcaagttccttgtcaaggagggctggcggccgcagacagagggggtgcgcatcgctcagggctacctctcttcggtgccagagcgcacggtgcgcgtgcgcatcaagggagagaaaggcttcctcacggtcaaggggcgaaacgagggcacacgacgtgcggagttcgagtacgagatcccgcttcttgatgcggaggccatgctcgctctttgcgagcagccactgatcgagaagcggcgcttcctcgagtcgtacggcggctttacatgggaggtcgatgtgttcgcgggtgccaatgaggggctcgttgtggcggaaattgagctgcccacagaagatgctgcgttcataaagccccactggattggggcggaggtctcgggcgatgtgcgttactacaattcgagcctgatccaccatccgtatcgggagtggaagtaagaggctgtgcataagtcgtctcggcgcttcgctagatatccacaggcagacgtgggaaaatcgcgcggctgaaacccaatatatggggctgcgggcaggagtacggtgtatatatggggttatccacggatttatccacattatccacagaatttgtggacaagagtcgttgattttaaccacaatatgcacagctgcctgtatatattatagtaggaaatcggattaaaaccgagggaaatgagatttatccacagctgtggatttctttgtggataaacagaataaagcaaaaaagagcgctggaccgtggctgacgcggtccagcgctctttacttatagcgggatgtgtttatttgtcttcaccattcttgagcggcttcttgaggatcgaaaggattacgcagccgacgacggcgccgacgaggatcgaaacgaggtacatcagcgggttgccgatggtcgggacgacgaagatgccgccgtgcggtgcgcgcagcgtgcaatcgaaggccatcgtcagggcacccgtaacggccgagccgacgacgcaggacgggatgacgcgcagcgggtcagctgcagcgaacgggatggcaccctcggtgatgaaggagagacccatgacgtagttcgtgacaccggctttgcgctcgctctccgtgaagcggttcttgaagaacgtcgtgcagagggcaatcgcgagcggcgggaccatgccgcctgccatgacggcagccatgacgtggaactcaccggaagccaagaggcccgtgcccgtgacgtaagca

SEQ ID NO: 2033 - DNA, 10219 bp, synthetic construct
  misc_feature 1..10219: note = Synthetic
  source 1..10219: mol_type = other DNA
cgcgaatcgacctggatcgggatttattccccgagtgaagactataacacaaaaataagatccacacgccgcggcgtgtggatctgaaaacaagaatcgctatatttgcatatctgaggaatctgaaggcgccctcccagacacactttttgaaacactaccacgttctacggtataaccgtctgccagttgctgtccggcatctttccgctattgcggatgctctgttgcaaccgcttcttttttaatgctcttatactccgaaaaaggtttgatcttgcagtggctgctgtcgctcctcgtcccaaagtaaagaaaatgccattctcgcaaccatgttgcctggcaatacctaccaacctttcggattccgcttcgcgtcgatctctctcgcgatcatctgaatatgacctatatgaagggtccaacctctcttcaaacactcgtaaatcgattcggtcattgcttccctccatgtttcaggttgcgtcattagccattcctgtgctgtttcctttccgtcctccatcaggattttgttcaaatcccgctcgtccggattcgggttgatgtagggatgcgccgcctgttccgctttctgcttcagggcttcctgtacggtcggctgacccgtcttcgttctgaacgcgtcttcctgacgcaggagctccatcgcctccctatcgccctcttgggcttgctgtgttatcgccagccagtacattgcttccaggttgtccatgatcttctttctctttgttgttcagcttttgttgctgaaagctgctctctttttctgtgggcactttcagatcgtttttctacgataacggattgaaaatgcaatataaaaaagtctccacggagtacgcggagacagtaggtttaaaaccttcggcatgtagccttattgtggtaagatgtagaactcttacgacacaaatgtaagaaaaagattctttttccgcaaatttttgcttaattttacagaaaaggattttttctcgcatggcaacgatactgggactggacctcggcaccaactcgctcggttgggccgtcgtcgaagagacggagcacggatacacgctcaaagagcagggtgtcgacatctttcaggagggtgtcgcacgcgaaaagaacaacgaaaagccggccgtgcaggaccggacgaacgcccgggcgctgcgtcggcaatacttccggcggcgtctgcgcaaaatcgacctgctccgggtcctcgtccgttacgacctctgtccgccgttgagcggggagcagctgaccgcatggcggaaagagaagcgctatccgctcgacgaggcttttctccaatggcagcgcaccgacgacaatgcggaccgcaatccctaccatgaccgctatgtggccttgagcgagcagctcgatctcggcaaccggcagcaccgttatctgctcggccgggcgctctaccatctggcgcaacgccgcggattcatcagcaaccgtaaggaggctggcaaggagcaggaagaggggacggtcaagagcagcatcaggagcctcacagccgagatggaggcggcgggttgccgttacctcggagaatacttctatcagctctatcagcacaaggagaagattcgcgggaagtacacctcgcgcaacgaacactacctggccgagttcgaggccatttgcgagaggcagcagctgcccgacgaatggcgcaaggctctgcaccgggccatcttcttccagcgcgacctgaaatcgcagaagggagcggtcggccggtgtaccttcgaacctcggaagagccgctgcccggcatcacacccgcgcttcgaggagttccgcatgctgcaattcatcaacaacatccgcatcacctctccgcaggacgccgcgccgcgtcccctgacacaggaggaggtcgaaatgatccggccgcttttctaccggaaaagcaagccccatttcgagttcgaggagatcgcgcgcaagatcgccggaaaggggaaatacgcctgccgggaggagcggatcgaggccccctatcgcttcaacttcgcccgcacaacgaccgtgtcgggatgtcccatcacggcatcgctgatcgccgtgttcggcagcgactggcttcgcgaaatgtgcagtctctatctgctcggggaggggaagaacgaggaacaggtgctgaatgatgtctggcatgccctctttttcttcaaggacgaggagtgtctccgcacctgggcgctggagaagctgcaacttacggcggagcaggcgaaggcttttgccgccatccgtctgccgcaggactacgccgcattgagcctgaatgcaatcaacaagatcctgccctacctgcgtctcgggtaccggtatgacgaagcggtcttcctggccaacctcaaggccgtattgcccaaagaggcatacgacaacgaggagcggcggcacgagatcgaacacgacatcgccgagctactgcttggctacaaacgggatcttgatgacaagtacgactccaaggagcaccgcatcgccaactatttcagcgaccacgggctcgacctgtcgcgattcgaccggctctatcacccctcgatgatcgagacctaccgcaaggcgcagcccgatgccgccgggttgctgcagctcggttcgccgcgtacaccggccgttcgcaatccgatggccatgcgggcgctgttccgcctgcgggccttggtgaacaggctgctgcgcgacgggaagatcgaccgcaacacgaagctccggatcgaatttgcccgggaactgaacaacgccaatctccgcaaggcgatcgaacagtatcagcgcgagcgggaggccgaaaaccggaaattcgccgaggagatacgcagccagtatgccgcggagacaggccggacgatcgatccgacggacgacgaggtgttgaagtaccggttgtgggaagagcagcagcatgtctgtccctacaccggacggcagatccgtatttcggatttcatcggcgccgatcccggtttcgacatcgaacataccatcccgagggcccgcggaggcgacgattcgcagatgaacaaaacgctgtgtgagaaccgctacaaccgcgcggtcaaacggtccaggctgccggccgaactctccgatcatgctgaaatcatggcgcgtatcgagtcgttcggatggcaggagaaggtcgagagtctgcaaaaacagatcgatgcgcaaatccgcaaaagcaaggccgcagcaacgaaagcggagaaggacggcgcgattcagcggcgccactacctgaaactgcaacaggattactggcgcggaaagtgcgagcggttcacgatgaccgaggtgccggagggattcagcaaccgccagggtgtcgacatcggcatcatcggccgctacgcccggctttacctgaagacggtctttgaacatatccatacggtcaagggagccactacctccgatttccgcaagatatgggggctgcaggcggagtacgagaaaaaggcacgcgtcaaccacgtacaccactgcatcgacgccatcacgatcgcctgcatcggacaccgggagtacctcgcatggaagcgttacgccgaagaggccgagcgctaccaactcggagagggcgaccgacccgacatcgaaaaaccgtggccgacctttacggaggatgtcaaggcggtggccgacgagttgcttgtctcgcaccatacggccgacaacatggccaaacagacacgcaaaaagctgcgggtccgcggccttgtcaggctcaacgatgcgggcaagcccatctacatgcagggcgacacggcacgccgcaaattacatgaagagacttattacggagccatcgaacgggacggaaagatccgctatgtcgtccgcaaatcacttgccaatttggaactgacggatgtcgaaaagatagttgacccggaagttcgtttgcgtattgaggaagctgtcaggaccgaggggctcgaaacggtgaaaaaagcagattatacagtttggatgaatcgagaaaaggggattcccattcgcaaggtacgaatttttgtcagaaagacaaccttaatcccattagacaaacagcaccgagatcaatccgataaggaatataaacgaaaatatcttgtctccaatgaaggcaattactgtatggccatctacgagggtgtggacaaaaagggcaaaaagaaacgaaccttcgagattgtcagtaacctcgaagcggcccgatacttcaaggcgagcaccgaccgcaacgatcggctcgaccgggtgccgctgcccgacgtgaacggctatccgttgaaatgcatcctgaaaaccggaaccatggtgttgttttacgagaatacaccagtcgaactttatgaatgttcccggaaagagttggtaaagcgtctctacaaagtgacggcaatggctgcagaagggcgggtacagtttctttttcatcaggaagcccgggatcagaaaacgatttcctccatatacggagctggagcctcacaattcagtctatccaaaccgtcgccgaaattgcgtctcagtgtttccagctttaacatgctagtcgaaggttatgatttcgagctgaccattacgggcgagatcaaattcaaacacgcgatgccatgctgaaacgagccctgttcttttcaaccccgtactgtctgagcctgcgcaacggccagatggtcatacatacccgcgaagcacccgagatgcagaaaagcgtcccgattgaagatatcgggttcgtagtccttgaggatcaacagacctccgtcacgctgccgctgctcaatgccctgtcggacaacaacgtggccgttattctctgcggcgagaaccgcatgccgaacgccatgctgatgaatctggactccaaccggacgcagggtgagaactaccgcgcgcagatcgaagcgagcgagccgttgaaaaaggggctgtggaaacaaattgtcgaggcaaagatacgcaaccaggcagctttgctgcggaagctcggtcgcgacggcgacaaactgaaaccctactacatgaacgtcaaaagcgccgacgccgacaaccgggaaggcattgcggcaaaggtttactggtcggaactgttcggtgcggatttcatccgctctcgcgagggtgctcctcccaacaatctgcttaactacggatacacgctcctgcgtgcagctgtggcccgctcgatcatggggtcggggctgtttcccgctttcgggatttttcaccgcaaccggtacaatgcgttcccattggcagatgacctgatggaaccctaccggccctatgtcgacgagttggtgcatgccctgtggatgcaaggccgccaccagctgaacaaagaggtgaaaagcgaactgttgcgtattctgttcgtcgacacacgtttcgacaaggtattgcgcccgctcgatgtcggacttacgtttacgtcggcttcgttggccaaatgtttttcgggaatacagaaaaaaattgcataccccatattggaataactcgatgtcggagctgcgattgaatgcatatcgaatcatgtggttgtttgtctttttcgacctgccgaccaataccaaggccgagcgacgccatgcggcccagttccgcaaggcgctggagaaagacggctttaccatgatgcagttttcggtctatgtccggcattgtgcctcgaaggagaacatgcaggttcacatcaatcgggtaaggcgttcgatgccgccctcgggctacacgagcatcctggccgttacggacaaacaatacggcgatattctgaatttctggggaaaaagcgaacggacaaaaccggatataccccagcagttggagtttttctgaaatatttggctatatttgttctttgaaatacgaaaaaagacatcaaatcgacttccgcggagttcaaacccgtttttttcagtcgggaaaccgggcataaaagccataaaatcaatgcgaacacagcccgtggttgtggtttgatgtagaaattcaataagatacaacgaagataccgtgtttgtggacttgtttggcgttgtggtttgatgtagaaattcaataagatacaacggcacgtcgttcaagaacgctccgaaactgttgtggtttgatgtagaaattcaataagatacaacttaccatgcgtgcgacattcgtgagttctagttgtggtttgatgtagaaattcaataagatacaaccctatgttatcaaccgtgagaatggtgctgttgtggtttgatgtagaaattcaataagatacaactgtcaaaagcgaaagagataatcagaaccagttgtggtttgatgtagaaattcaataagatacaactccggctcccgtactatcccgacagaataggttgtggtttgatgtagaaattcaataagatacaactctatggaatctgcatcatatcacaagatagttgtggtttgatgtagaaattcaataagatacaactattcgagaccaacaacaacggttcctatagttgtggtttgatgtagaaattcaataagatacaactttcgccttcaaccaccttggcaacttgttgttgtggtttgatgtagaaattcaataagatacaactatcgaggccggagactttcaagctatacggttgtggtttgatgtagaaattcaataagatacaacagattgtcatcataccatacacttaacaaggttgtggtttgatgtagaaattcaataagatacaactgttaaagtcaagcatatgcaagaagtatggttgtggtttgatgtagaaattcaataagatacaacattcgggcttgttctttactgaccaaagggttgtggtttgatgtagaaattcaataagatacaacattcgatcaagaatcgtgttccgaaagtcagttgtggtttgatgtagaaattcaataagatacaacaagcacgtaggacgatgcatcgagcgtctgttgtggtttgatgtagaaattcaataagatacaacaataacctgaaggaagagacgaagttcttcgttgtggtttgatgtagaaattcaataagatacaaccgatcatcgggacggtcggcgcgatgggcggttgtggtttgatgtagaaattcaataagatacaaccgcggcgctgcacggggcgcgcaagatcaggttgtggtttgatgtagaaattcaataagatacaactcatcaccgtgcggcccgttgccggcgccgttgtggtttgatgtagaaattcaataagatacaacatgatttcgtgaccttacacgcaccttgtagttgtggtttgatgtagaaattcaataagatacaacagttcatccgagtgcttggccaaagaaccggttgtggtttgatgtagaaattcaataagatacaaccgatactgcacacattgaaacaattcgcgcgttgtggtttgatgtagaaattcaataagatacaactctgagtaaagtacggctgttctcctatctgttgtggtttgatgtagaaattcaataagatacaacgctacccacacaattatcccacactcaacgttgtggtttgatgtagaaattcaataagatacaaccgtcaacgtgcgcggcctgctccgtttctggttgtggtttgatgtagaaattcaataagatacaacaccccaccctttacttgttttttctcgaagttgtggtttgatgtagaaattcaataagatacaacctcaaccgagaaatttcctgctcgatctggttgtggtttgatgtagaaattcaataagatacaacgcctgctcgcccgaggacggcggcgccagcgttgtggtttgatgtagaaattcaataagatacaacggtcccagctaattgaactgcgcgctgctgttgtggtttgatgtagaaattcaataagatacaactcaaataaccgtgaataaggaatggcttggttgtggtttgatgtagaaattcaataagatacaacaaggcgtaagaactgccccagcttgttaggttgtggtttgatgtagaaattcaataagatacaactttgaatggtgttcaaacgccgtttcacagttgtggtttgatgtagaaattcaataagatacaactgagggctacaagcgtgtgcgtttcccaaggttgtggtttgatgtagaaattcaataagatacaacagaagaccggggtgctgttgcccgtttcccgttgtggtttgatgtagaaattcaataagatacaacggtgccaccaatcgggcgacgaactacgcggttgtggtttgatgtagaaattcaataagatacaactgaatgtccgacgatatggcgaacgcgcgttgtggtttgatgtagaaattcaataagatacaacgcatccttaaccgcttccacgtgcgcggccgttgtggtttgatgtagaaattcaataagatacaaccctattacaatacttcggtagaatatttagttgtggtttgatgtagaaattcaataagatacaaccaatgcgaaaaatacttaatatcattttaggttgtggtttgatgtagaaattcaataagatacaacgaatacagtttgcgtgtttttgctctggtggttgtggtttgatgtagaaattcaataagatacaactcaaaacacttgtggaagccagctgtccgggttgtggtttgatgtagaaattcaataagatacaacgtctgtgctctatgccctcttccggctcgagttgtggtttgatgtagaaattcaataagatacaacactttcagaaatagcaacacgacttgccgtgttgtggtttgatgtagaaattcaataagatacaacgatcgaagcacgggaacacagccaggaccagttgtggtttgatgtagaaattcaataagatacaacaaataaacagataggatatgccagtcaatgttgtggtttgatgtagaaattcaataagatacaacgcgaacgcgattctgtcgcacgcggccaacgttgtggtttgatgtagaaattcaataagatacaacataccgttggtgaagttgcaagcgtttgcggttgtggtttgatgtagaaattcaataagatacaactcaaattttgccggttgcgctggcaagtcgttgtggtttgatgtagaaattcaataagatacaacgcctgagcgctgtacacggaccgtggcagtgttgtggtttgatgtagaattcaataagatacaaccggccgggcagcatttcacagctaccagaggttgtggtttgatgtagaaattcaataagatacaacaccgccgccagaaacagtggcaccaatctggttgtggtttgatgtagaaattcaataagatacaactatccatataggatgctcgcagttcattcgttgtggtttgatgtagaaattcaataagatacaacctgggtgccgttgcagctctaccatccggagttgtggtttgatgtagaaattcaataagatacaacttaacaaattcgcagaaattcgtctgtaagttgtggtttgatgtagaaattcaataagatacaacgaaaccatagagcgctgttgaacccaataggttgtggtttgatgtagaaattcaataagatacaacaacccctcaaaatgatcgaaccatgaaaaagttgtggtttgatgtagaaattcaataagatacaactcaatgcactggtggacggcatctcgcacagttgtggtttgatgtagaaattcaataagatacaacgtaatcaagaagcatcggattgtcgattcggttgtggtttgatgtagaaattcaataagatacaacgacgtacgtgttgccagggtaatcgcccgtgttgtggtttgatgtagaaattcaataagatacaacagcgtgttggccggttctccggcactctcggttgtggtttgatgtagaaattcaataagatacaaccgcgcgtcgtgctcgatgccgataaggatggttgtggtttgatgtagaaattcaataagatacaactaccgcggctatccttgtctaccgccatacaccgggccatatcaactgcacgggtcgttacctatgcatcccctgcccgcaccatgtgatcatcggctaacatcttcgcctacgtgtacaacaactacccgctgtacggagactggcagcggg

SEQ ID NO: 2034 - DNA, 9993 bp, synthetic construct
  source 1..9993: mol_type = other DNA
  misc_feature 1..9993: note = Synthetic
cgttcggatattgggcaaagacggccggagtgatactgctggtattattggccatacatgtactgatttactgcacggggtatcgcggcgacgctttgcgctggatacctgccgcacaattttttaattcgttgatggataaactgatgtgattatggatttcaatctgaatcaaattgcgaccacacacttcgctggcgaaggagaaaaatttgtatcaatcgacctggacgattatcggaaattcgtttcctcgcgtcatattgtccggtcgtccaacatcgtggtcaagaaaggggatttgcaatcggtgattccgagcgtgcgcaagtcatatgcggggagcattcatgcgtccgagtttttcgtctctatccggctgaaagagggggttccctgcaactatgaggaggttctgaatttgctgcagacgattcagtcgggcagttcttcggacgatgcgtctatacaatgggggctcaccataaaagctctaatggaggaggatgtccgggtacttatattggcgggagaaagggaagaagagtaaaaacaccctaaatctggacttgaggtgtcaatagatgtaaacctatcctcagtcaattcggattattgggggactgtagtatcaaaggtcatactctttcgcatttccttttcctcccgatagcgaccagccccggacttggcggcgacggctgcaaggccgtccccgtagaacgctccgtacagccttgcagccgatgccggcaagtcggatctttgcggacgggtggaaagggacgggcttccggcaaagagttacaactggcgcgcccccgttaccgactcgggccacgcgacttcttcttcggggtgatgaaacggcgtggctggtcctgctgcttttgagtttgggcagggcgtggttcgcggggatcgtcccaactctcccggtaggtcgtatccgatgccttctctttccagaggtagggccgtgccgtcgtgcctccccaccatttcaccagcgcccgcacgacatagcccgcctcgatccgatcccgatccatacgtcgcatcgtatatttcccgtactccacccagtcccgcggatcgctctgataaacccacgccatctgcagccggtcgtccatcaccacataaccctccgattgcgttccccgcacgaagatcggttctcctttgcggggcatctcgatctgctccttggttaagggcttgcctgcaatcgacagattccgatgcggcgcctctggttgctgttgccgttgcttctccgtctccaacttttgcaggatagctgcgacctgcggcctttgttcatccgtgtagttacggacccgctcgatcatcgcttgtcggaggcgattctgttcgatccgttgcgtcaggcggccgtagctggacttacggtctacctgcgaagccttgaacgtatgcccctccagggtgaaggttacgccctggatctccttcgtcggatcgccgccccgatgaacaaaggtcgtggcgacctgtcgtttggccagttcttctgcgagtgccgtccaggtggcacactcgggcagcacctcccgcaggtggtcgtaaatgcggtggcgcagctgctccggaccgtgcaaccgttccgtggagacctgctccttgccgcgcgagaaggtcagtccgtactcctgcttgagctccctgcagatgcgcatgttgcgcaggcgttcgttgcggtccggaaccagcgtcgtgtcgtaacgtacccggttgtagaggatatgcaggtgaggatgtttcgtatcggtgtggcgcacaacaaggtactgcgtgccggtaatctccatgcgttgcatatactcccgcgccaggtcgagcatcagttggttcgacatccgcggatcatcatcggggtggaacgacagcgagatatgtccgacaacccgttcgacatcggggcgggcccggcgctggaactcgaagctgccgatcagcgcctgccgggaagagagttctacaccgtcactcgtcaaaatgtaagcctttcccggctctttgccgagcaggtagcgcaccgcgccgccaaaggatttgccggtaacgattttgccgatcatcgtcttagagtctttgtttcaaccgtccgattacctcgtcgtagaagcggaggatccgccgcagctcctcctcgtgggaggcaacaccgaaggcatgctgaaggaaggccagctggttcaggttgttccgctcgcgcgtcaattcagagaccaggcgcaactcttcggtaccaatccgccgcaggatccgccccgagacgaccgcctggcgggcatactccgagagggtcagattgcaggctgctgccttgcgttgcatccgaaggtactccgcctcgctcacgcggaaacgtaccgtgcgtgagcgcaacatcgccgcgctcttccgcgggcgtccacccttgggtttcgttacctccatggcgcgaaggcattgacggtggaacaaacaatcgggagccgtttcgtgcagcgtgcagcgtcggtcgaaagcgacgtcccgtgccccgaatccgcgacgagcccggcgagcggcggatggttcggtatgcgaccctcgggagcagaccgggcggggcagccccgcagggcgaggtggttcgagatggcagccaaaaacccgatgcggggtttttgtgccacgagaacacaacctcgctcccttcggttttcggacccgggagtcggcagcacattcgacgtttgaagtcgaacggtgcggaatcccggggtcgcaaaggcgtcagcgcggaggcgctcccgtaccggcaaacggcaggaggttcatgtcgcggcaaggatgggaagcgtgcagctttggacccgaacgaatcgggacttgttgtcgtccaaccggggacggtaggcagcagatagaaggtggtcggctcttcattggggagccttgaaagggatgaatggcgttgtcatggtcggtggtttttgcgtcgttgtgaggataacggcacccgccgccgctttgtttcaccatagggcgcgattgcacgttcttgccggtatccggcggcagggatatgcacgaaaaaagccctcggatcagatgattcgagagctcgtatagtctgttactcggcagccggccgaaggttgcggtcaaggactgcccgaatccccgattcgggatagagcagcaggcggttgccaagtaccgtaaaggaaatctgccgtcggtcccgcagcgtctgtagggtgcgcggcgaaaggtgcaggcgtgtgcaaacctcttcaccagtcaggtagcgttcttcgccgatcatcgggcgacgctcctcggaggccttccgaagcatacgctccacgccccccagccgggcgaacaagcgctgtatctcgtcgctcgcttcgttgagatagtccagcggcatggctatcgcgtttgaacggttttgcgggagagccaggcggcgaggtcccggcgtcggtagtagaatttaccgcccaaccgcgagcagggaatcgctccccggtcccggtagctctgcagcgtgcgtttggtgatgttcagcgcccggcacacctcctcactgtccaatcacccgtcgtcctgcggtggcgtcaaacgacgttccaaacgttgggcaagggcagagaggtgttccacccgttcgaggagccgctgccaactccgctccccgatacatacgatcttttccatggtcttctttttttctgtttggtttgactatgcggcaacccggctctgtgggttgctctttgtgtggatggggacaccgaatattcagcggtcccggatccgaaaggctcggcgtttcatctttttcccggtttatgaatctttattcctgcaagcttgcactcggataacgcacgcagcccctcaaaagtttcgcccgcaaagtgatgtggcagtggttggcgtcggttggcgtcgtgagggtggacaaaccagaaaagaacaatcggattttaggcactgatataaataaaaaagtctccacggaatacgcggagacggtaggttgaaaaccttcggcatatagccttattgtggtaagatgtagaattcttacatcacaaatatagtgaaaaagatggaaatctgcaactttttatttaattttacaagaaacgacttcttcatatggcaaaagtattgggtcttgatcttggcaccaactcactgggatgggcgctcgttgacgaatctgaacaagggtatgctctgctggacaaaggggtggaaatctttcaggagggcgtcgcccgagaaaagaacaatgaaaaaccggccgttcaggatcggacgaatgcccgaacgttgcgccgtcactatttccggcgacgcctgcggaagattgagctgctcaaggttctcatacgttacgatctttgcccgcctttaaccgacgggcaactctccacatggcgtcaaaaaaagcaatatcctctcgacgaggagtttctccgctggcagcgaaccgacgacaatgaggatcgaaatccctatcacgatcgttacacggcgctcaccaggcaactcaatctcggggaacgcaggcagcgatggctgctgggccgggcactctatcacttggcgcagcggcgtggcttccttagtaaccgcaaggaggcgggagacgatacggaagggaaggtcaaaaccgacatcaagaatctctccgacgagatgacggctgccggatgcagttatctcggagaatacttctacgaattataccagcgtaaggagcgaatccgcggcaaatatacttcgcgcaacgaacattatctggccgagttcgatgccatctgcaaccgacaacagttgcccgacgaatgtcgcaaggcgctgcacagggcgatattcttccagcgcgacctcaaatcacagaagggatcggtcggtcgatgcaccttcgaaccgacgaagagtcggtgtcccgtttctcaccctcgattcgaggagttccgaatgttgtcgtttatcaacaacatccgggtgacggggccggacgacaacgcgccacgccctctgactcaagaggaggttgaaacgattcggccgctcttcttccggcgaagcaaaaacaaggtctatttcgattttgagaaaatcgccggcaaaatcgctggcaaagggagatacgcctgtaaggaggatcgcacggaagctccttaccgcttcaattttgccggcacggccaccgtatcgggatgtcccgtcacggcatcgcttatggccatctttggggacgactggcttcgtgaagcctgcagtctctatctgcttggcgaggggaaatcggaagagcaggtgctgaacgacatctggcatgcccttttctcgttcaacgacgaggagaggcttcgcgaatgggcatgcaagaacctgcaacttacgaccgagcaggccaaagacttcgcggccatccgacttccgcaggattatgcggccctgagcctgaatgccatcaacaagattcttccctatctgcgctgcggttatcggtatgacgaggcagtttttctggccaatttgcaggccgcactgccaaaggaggtctatgcggacgaaacacggcgacgcgaaatcgagcgggatatcgcctcgctgctgctcggctacaagcggaatccgtacgacaaattcgactcgaaagagcgtcgcatcgccgactatttcagcgaccacgggctcgatatgtcccgtttggatcgcttgtaccacccttcgaaaatcgagacctatccggatgcaaagcccaatgccgaaggaatcctgcaactcgggtccccgcggacatcggccatccgcaacccaatggccatgcgggcgctgttccgactgcgcgacctgataaatatcctgttacgagaggaaaaaattgaccgtgacacgaaaatccggatcgaatttgcccgcgggctcaatgatgccaaccgtcgcaaggctattgagcagtaccaacgtgaacgggaggccgaaaaccggaaatacgccgaagagatttgccgtcagtatgctgccgaaaccggccgcgaaataacgccttcggaggatgagttattgaaataccgactgtgggaggagcagcagcacgtctgcccttataccgggcggcaaatccgcatctcggacttcatcggggccaatccgggcttcgacatcgagcacacactcccgagagccaagggcggagatgactcgcagatgaacaagacgctctgcgaaaaccggttcaaccgggagacaaaacgggcgaaactgccggccgagttgtccaatcatgtcgagatcatggagcggatcgaatcgtttggctggcgggaaaaaatggagagtctgcaaaagcagattgaagtccaggtccgcaggagcaaaagtgcagccaccaaatccgaaaaggacggtgctattcaacgccgccactacctgcaaatgcagctcgattattggcgagggaagtacgagcgcttcaccatgaccgagattcccgaaggtttcagtaaccgacagggagtcgacatcggtatcatcggaaaatatgcacggctctatctgaagacggtttttgaccggatctatacggtcaaaggatccacaacggcagcattccgcaaaatgtgggggttgcaggaggaatacgccaacaaggagcgtgtaaaccatgtccaccactgcatcgacgccatcacgatcgcctgtatcggtcgccgtgagtacgaccgctgggcgcagtatgtagccgacgaagagcggttcagttacggagaaagcggtaaaccccgtttcgaaaagccgtggccgacctttaccgaggatgtcaaggcggtggccgacgaactgcttgtggctcaccatacgcccgacaacatggccaaacagactcgcaagaagttgcgggttcgcggccaagtcaagctgaatactgacggaaagccgatctatcagcaaggcgacacggcccgctgtcggttgcatcaggagaccttctacggagcgatcgaacggaacggtgacattcggtatgtcgtgcgcaaagcgctcggccagctgcaacccggcgacatcgacaagattgtcgacgatgcagtccgtgatcgcgtacgggaggcaatcgacgaggtcggattcaagacggcgataaattcagacgagtacacgatctggatgaaccgtgaaaagggcattcccatccgcaaggtgcgcatcttcacccccaacgtcacccaaccgattgcattgaaaaagcagcgagatctctccgacaaggagtataaacgcgattatcatgttgcgaacgacggaaattattgcatggccatctacgaaggccacgataaaaagggcaagccgaaacgctcctttgaactcgtcagcaatttcgaagcggcccaatatttcaaagcgagtgccgaccgggaagcgcgccccgatctggtaccgttggccgatgcgaatggatttccgctaaaatgcatcttgaaaacgggaaccatagtcctgttttatgagaactcaccggcggaactttatgaatgtacttgcaaggagttgacgaaacgactgtataaagtaacagcaatggcggcagaaggacgggtacaattcctctttcatcaggaagcccgaaatcagaaaacgcttaccgctctatatggagctggggcttctcaattttgccaatccaacccatcaccgaaattgcgcctcagcgtttccaattttaacatgttagtggaaggttatgatttcgaactgaccgttacgggtgaaataaaattcaaacacggtaccccatgctgaaacgagccttgtttttttcgactccgtactgtttgagtctgcgcaacggacagatgatcatccacacgcgcgaagctcccgaccaacggaaaagtatcccgatcgaggatatcggattcgtagtgctggaggatcaacagacctcgatcacacttccgctattgaacgcactgtcggataacaacgtagcggtaatcctgtgcggggaaaaccgcatgccgaacgccatgttgatgaacctggattccaatagcacgcaaggagaaagttatcgtgcgcagatcgaggcaagcgaaccgctgaaaaaagggctttggaaacagatcgtcgaagccaagatccgaaatcaggcagctttgttgcggaaactcaagcgcgacggagacaaactgaaaccctactacatgaatgtcaagagcgccgatgcggacaatcgggagggaatagcggccaaaatctattggatagagctgttcggcgacgagttttatcgctcccgcgaaggttcaccgcccaacaacctgctcaattacggctatacgatcctgcgagcggccgttgcccgtgcgatcatgggatccggactcttcccggccctgggcatcttccaccggaaccgttacaacgcctttccgttggccgacgatctgatggagccttatcgcccgtatgttgacgaaatcgtttaccgcctttatacaaacggtcatatgcagttaacccgtgaggtgaaaagtgaattgctgcggattttgtttgtcgacacccgtttcgacaagattgtacgaccgcttgaagtgggtttaacctttacaacctcttccatagcaaaatgcttcgccggcacacagaaaaaagtatcatatcccttgttggaataaggccatgtcagaaacacgattgaatgcctatcggatcatgtggttgtttgtctttttcgatttgccgaccaataccaaaaccgaacggcgtcatgcggcacaattccgcaaggcgttggagaaagacggcttcacgatgatgcaatattcggtgtacgtcaggcattgtgcctcgaaagagaacatgcaggttcacatcaatcgcgttcgacggtcaatgcctccggcaggatttacaagtattctgtctgtgacagacaaacagtatggagacattctcaacttctggggcaaaagtgaacgggcgaagccggatatgccgcagcagttggaatttttctaaaaaaacagtattttcgttctttgaaatagaaaataacacatcaaactcacttcgacggcgtttccgcatttgtttttccgattgggaagatcggtataacacactgaaattgagcagatggcgaccccggcgttgtggtttgatgtagaatttcaataagatacaactgtcagtattggaatgctgcataattgcagctgttgtttacattacccttttgactcaagaagatttcaaactcccttaaacacgtcaaatccaattcatcaaaacgcatattgaccgagcggaattgcgacataagggcaagtgttaccttgtgtttgctggcggaaccatacttttcgaccttttccaatctgtcgattatctgtctgaaataatcgcctaccgtacaatccatacgcttaccaatggtctcaaacagcgcttcaaaggttacagggatttcgagggcttccagtttcttaatcttcttctcgtactctttgattttggctgttatctgaaactgaatatcgtccctgtcagggcagtcgtccgttaccttttgtgcttgtgcatcccagcaggaacggactacggaaacacccaaaccgaccgatttcttgcggttatcatggaagaaaagcaggcataaagggctggtgttgttcttgtagattacgtccttgcggagtattactctgaaagtcattgttttgcatcattagatgcaggagggaaaacatatttccaatggagagttttatggagagtctatggagagtcaaggccgtgaaaaggctgtttcagccctctttttctaccctatgtaaacaaaaaatcagcaacctcatttctgtaagctgctgatttttagagcggaaaacgggactcggacccgcgacctcaaccttggcaaggttgcgctctaccaactgagctatttccgca

SEQ ID NO: 2035 - DNA, 8809 bp, synthetic construct
  source 1..8809: mol_type = other DNA
  misc_feature 1..8809: note = Synthetic
cgcatcatcgctgcggtgattctggtgctcatcctcaagctgctgccccagttccccacaccggtggagctggcgctgtactgcatcccgtacctcgtggtgggctgggacgtgctgcgcaaggcactgcttggcatcaagaaccgccagccctttgacgagtgcttcctgatggccgttgccaccgtgggcgcgtttgcgctgggcgattatgtggagggctgtgccgttatcatcttctaccagatcggcgagctgttccagagcgtggccgtgggcaagagccgccagagcatttccagcctgatggacatccgcccggactacgccaatgtggaggacgaggacggcaagctggagcaggtggaccccgatgacgtggaggtcggcaccgtgatcgtggtgcagcccggcgagcgagtgcccattgacggtgtgatcgtagagggcacctccgccctgaacaccgccgccctgaccggtgagagcctgccccgcgacgtccagaccggagacgaggtcatcagcggctgcgtgaacatgaccggcctgctgaaagtcaggactaccaaggaattcggcgagtccaccgtctcgaaaattctcgatctggtggaaaattccagcatgaagaaggcccgcgccgagaacttcatcacccggtttgcccgcgtgtacacccccgccgtgtgctacagcgcactggctctggcctttatcccgcccatcgtgctgctgctcatgggccagcccgcccgctttggtgactgggtctaccgtgccctgaccttccttgttatcagctgcccctgcgcactggtcatcagcattcccctgagcttcttcggcggcatcggcggtgcatctgcctgcggcattctggtcaagggttccacctatctggaagagctggcccgcaccggcatcgttgtgttcgacaagaccggcaccctgacccagggcacctttaaggtgaccggcatccaccccgcagagggcaccagcgaggagcagctggtggaagctgccgcgctggccgagagctggtccaagcaccccatctccctgagcatcaagaacgcttacggtaaggacattgaccccagccgtgtgaccgatgtgcaggagctgggcggccacggcgtgaccgcaaaggtggacggcaaaaccgtcgccgccggcaacgcccgcctgatggcaaagctgggcctgacagctcccgagatcactgagccgggcaccatcgtccatgttgccatggagggcagatatgcaggttatctgctcatcgctgatgtggtcaaacctcacagtgccgctgccatcaagggcctgaaacaggccggtgtccgcaagacggtcatgctgaccggcgacgcggagcctgtggcaaaggccgtttccgccgagctggggctggatgaataccatgcaggtctgctgcccggcgacaaggtggaccagatcgaaacgctcctcgccgcaaagcagcccaaagaaaacctcgcttttgtgggcgacggcatcaacgatgccccggttttgtcccgtgccgatgtgggcatcgccatgggtgctctgggctccgatgctgccatcgaggccgctgacgttgtcctgatggacgatgacccggccaagatcgcgctggccatgcgcattgcccgccgcaccctgcgcatcgtgtatcagaacatcgtgtttgctctggcgatcaagttcgcctgcctggtgctgggtgcgctgggtctggccagcatgtggaccgccatcttcgccgatgtgggcgtgatggtgctggcggtgctgaacgccatacgggccctgcgggtgaaaaatctgtgagtgaaaaaaggaccggctctcgccggtcctttttagcgcctaacatttttgtatgaattgcgcaaagtgtgaaaatgggggtagcattttcggggggaggctggtataatgtgcgggtagcagttgttgatttatgttgtcaacataatatagcatattagatatgcttgtaaaactttcacatttatattagttgcataggagaaacatatggagacctataagagacggcggggagaccggaaggacggccggctgctgcgggagctggattccctgcacttcatcaccggcatcatctacccaaaccggtgcgataatgaggcgtacatctccgtgaaggtggacctgaccgccatgaacgcatatctggccaggaagaacgaggaggagaaggactttccctacaccatgttccacatcgtggtggcggcgctggagaagaccatcaccctgcggccgaagctgaaccgctttattgtgaacagcaatttctatcagcggaacgaggtgtccgccgcgttcgtggtgaagaagcagttttccgacaagggcgcggaggcgctggccttcctgcacggaaaggagacggacacggtggcggaggtacacgactacatccgccggcaggtgacggagtgccgcagtgagaaggtggatgcctccaccgcgggcatggatatgttcaataagatgccccggtggatgggcaaggccatcgtgcgttttctgatgttcctggatcgccacggctgggtgccgtccgacctcatcgccaccgacccctattacagctctgtggtcatttcgaacctggggtccatcaagctcaagtgcggctatcaccacctgaccaactggggcacctgctccctgttctgcatcatcggcgagaaaaagaagtccccgtttatcaacgaggacggcaccgtgaccatgcgggagacgctggagttgggactgaccatcgacgagcggttggcggacggctattactactccaagtccgtgcggctgctggagtatctgctgacacacccggaggagctggaaaagcccatgagcgaggaggtacaatatgagtgaagtaaagaccccgtggaaggactatatgggcgatgtgcccatgcacctggattatttccagggcagtatgttcgaggccgtggagcgcatggccgagctgtatcccaacaacatcgcctttgatttcatgggcaagtccaccacctataaaaagatggtgcaggagatcgagaagtgcgccaagagcctgaagaccctgggcgtgcggcccggcgacaaggtgaccatcgccatgcccaactgcccccaggccatctatatgttctacgcggtgaacctggtgggcggcatcgccaacatgatccaccccctgtcggcggagaaggagatcgagttctatctgaacgcctccgagtccaccacggccatcacgctggatcagttctacgacaagttcgagcacatccggcagaacaccggcatcatcaacatcatcatcgcctccgtaaaggatgcgctgagccgcaccatccgggcgggctatatgctcaccgaggggcggaagatccagaagatccccgaggacgcgccggtcatccggtggaaggaatttatggatatgtcccggtactgcttctacaagaactaccgggtggagcgaggctacaacgatcccgcggtcattctgtactccggcggcaccaccggcaccacaaagggcatcgtgctgaccaacggcaacttcaacgcactgggccagcagatcatcgccaccaaccccatgttccggcccggcgaccggatgctggcggccatgcccctgttccacggcttcggtctgggcgtgtgcgtgcactccatgctgagccagggcggacggtgcatcctcatcccacggttcaccgccaagagctatgccaagcagatcgtgaagtacaagtgcaactttatcgccggtgtgcccacgctgtatgaggcgctgctgcgcctgcccagcatggacggcgcggacctgagcagcctgaagggcgtgttctccggcggcgacagcctgtctatcgagctgaagaagaaatttgacaagttcctgtacgatcaccacgcggtcattcaggtccgcgagggctacggcaccaccgagacggtgacggcctgctgcctgacgcccaccaatatctacaaggagggctccatcggcctgcccttccccgacacctatatcaagatcgtggagccggacaccgacaaggaggtgccctacggcaccgagggcgagatcctgctggcgggccccaccgtcatgaaggagtacatgaacaaccccgaggagacggcccgcaccctgcggacgcacgacgacggtttgacctgggtgtacaccggcgacctgggcaccatggacgaccagggctttatctacttcaagggccgcgccaagcggatgatcatcacctccggctacaacgtctatcccggccagctggagaacattctggacgcccatgaggacgtgcagatgagctgcatcatcggcgtgcccgatccctataagatgcagaaggtcaaggccttcgtgatgctcaagcccggcgtgcccgccagcgaggccaccaagcagacgctgctggactactgccgcaagcacgtggccaagtacgccatgccctacgacatcgagttccgcaagaccctgcccacgaccctggtggggaaggtcgcctaccgggagctggaggccgtccggccgctgttcctgcgcaagagcaaaccgcatttcgatttcgaagacattgccaaaaagatagcgggcaggaacaattatgcctgtaagggcgaccggacggaggcggcctggaggttcaatttcgcgcggggagcgaccgttacgggatgccctatgtcggcactgctggaggcggtcttcggcaacgaatggcggcgggagctgtgcaggctctatacgctcggtgcagggaagagcgaggagcggataatcgacgacgtatggcatgcgcttttcgccttcgagcacgaagagcggctgcggcagtggctgcaagagaaactgcaaatttcggccgacgatgcgaagaccctcgcggccttccgtctgccgcaggggtatgcgtcgctgagcctgaacgttatcaacaagatacttccctacctgcggcgcggataccgctacgacgaggcggtattctttgccaacctcggaaaggtgcttccggcggaggtgtatgccgacccggccaggcgccgcgaagtggagcaagggatttccgcccagatggatgatttgggcgacggagagaaaacacggaaggaggaacgcatccgcgactatctgcggctttactggggtgtggaagaggagcggttggaccgtctttatcatccgtcgatgattgaagcctatccgcaggcaaagcccgatgcgaacggcatcctgcggctggggtcgccgcgtactgcggccgtccggaatccgatggccatgcgtgcgcttttccgactgcgtgccttgataaacgaattgttgcgcgaagggaaaatcgaccgcggtacgagaatcaacatcgaattttcccgaaagttgaacgatgccaatatgaggaaggccatcgagcggtatcagcgggaacgcgaggccgagaaccggaaatttgccgcaaaaattcgcgaggagtatgcggctgcgacggggcacaccatcgaacctacggaagaagacctattgaaataccgcctgtgggaagagcagaaccatattgatttatattcggatacgggtaggatgatcggaatcgccgagtttctcggagctggccggacatacgacatcgagcataccgtaccccgttcgcgcgggggcgaggatgcgcagtacaacaagacgctgtgcgaagagaggttcaaccgggaggtcaagcggaacaagttgccgatggaacttgcctgcggtgaagagatatgggcccgtatcgaagcacttggctggccggagcttatcgactcattgcagggacagattgagggcgcaacgcgccgggttgacaatgcggtgaccaaaccggagaaggatgaggctatacagtaccgtcattatttgaagatgcgccgcgactactggcgcaggaagtgcgagtctttcaaaataaccgaagtgccggaagggttcagcaaccggcagggggtcgatatcggcatcatcggcaaatatgcacggcagtacctgcaaacggttttcgaccgggtttatccggtcaaggggagcgccacggccgatttccgcaccatgtggggattgcaggaggaacacacccggaaggaacgtgtgaaccacgtccatcactgtatagatgccattaccatcgcttgtatcggcaagcgggagtatgaccgttgggcgcggtacgtctgtcaggacgagcggtaccggaggggcgaggcggatagaccgcagcccgaaaaaccgtggccgacctttaccgaagatgtccgggcggtagccgaagaactgctcgtttcgcaccatacgcccgacaacatgcccaagcagagccgcaaacggctgcgcgtgcggggcagggtccagaagaacgacaagggcgaaaccaaatacatgcagggggataccgcccgcggcgccctgcatgagcaaactttctacggggctatcgagcgcgaaggcgaaatccgatatgtggtacgcaaatcgctcgaccagttactgccgaccgatgtggataaaatcgtggacgaaacggtgaagcggaaagtgcaggaggctatcgaagcattcggattcaaggaggcaatggacccgcagaagcatactgtctggatgaacaaggataaaaatgtaccgattcggaaggtgcggatattgaccggtgtgaaaaatccgattctcctgaagcctcatcgcgatgtatccgttaaggagtataagcgatattaccatgtcgtcaacgacgggaattactgcatggcgatttacgaaggcagagacaggcagggcaggttgaaacggacgtttgaaatcgtcaataaactggaggcggcccgttatttcaaacggagtgcggaccgggaatcccggcccgatttggtaccgctgtcggatgtcaacggttattcgctcaagtatctcttgaaaacggggacgatggtgttgttttatgaaaattccccggacgagttgtatgaatgttcggtcggagagttggctaaaaggttgtacaaggtcgtgggaatggcgcaggatggtcgtgtccagtttctgtttcatcaggaggcacgggaccggaaagccgttacggcggagtgtggaatgggaatttcggttttcgatgcacgccatcctgctccgaagttgaggataagagtttccaattttaaaatgttcgtcgaaggctatgacttcgaactgacggttacgggggaagtaaaattcaaacggtaattgcttcatggtgaaacgcgcgctgttcttttcgacgccttatagcctgagtcttcgggacaatcagatggttatccgtacgaaggaggcccccgacatgcagcggaccgttccggtcgaggatatcggggtggtggtgctggaggaccgacagacgtccgtgacgctgccgctgctgaatgcgctctcggataacaatgcggccgtcatcttctgcggcgacgaccggatgccgaacgccatgctgatgaatctcgattccaaccggacacagggcgagaactaccggacgcaaatcgaggcgagcgagccgttgaaaaaagggatatggcggcaaatcgtcgaggcgaaaatccgaaaccaggccgccttgctgcagaagttgggcaaagacggggagcggttgaagccctattaccggaatgtccgcagcggcgatgcggacaaccgggaggggactgccgccagaatttactgggcagagctgttcggccgggatttcgttcgtatgcgggagggagatgttcccaataacttgctgaattacggatatacggttctgcgggcggccgtcgcacggtcgctgatggggtcggggctgtttccggcgttcggcattttccaccgtaaccggtacaatgcctttccgttggccgacgatgtgatggaaccttatcgtccttttgtggacgaattggtgtacgggctccgtatgcagggcgagtcgcaactgacgcaggaggtcaaggggaccctgctgcggatactgttcgccgatacgcgtttcgagaaggtgatgcgtccgctggatgtcggcctgacgtttacggcggcatcgctggcgaaatgtttcgctggaacgcaaaagaagattgtttaccctttgttggagtgacaggatgtcggaagtccgtttgaatgcatatcgtatcatgtggctgttcgtgtttttcgatttgccgaccaataccaaaaccgagcgtcgtcatgcgactcagtttcgcaaggccctggagaaggatggcttttcgatgatgcagtattcggtgtacgtgcgtcactgcccctctaaagagaatatggaagtacatctccgtcgggtgcagaagtcgatgccgcctgccggatataccagtatcctgagcgttacggacaaacagtacagtgagattcggaactattgggggaaaagcgaacgggcccggcccgagatgcctcagcagctggaatttttttgatatattgctctttgaaatacgaaattacatccgaccaacttccccggtgtgcggcaggacgttttatgcatcggtgtcatatgtgtaacgtgcagaatatgaattactgccatgcgcgaggttgtggtttgatgtagaattggaatgagaaacaacaccaattaagacggcgctcaggatgagaagttgtggtttgatgtagaattggaatgagaaacaactcgcggcgtgg

SEQ ID NO: 2036 - DNA, 7628 bp, synthetic construct
  source 1..7628: mol_type = other DNA
  misc_feature 1..7628: note = Synthetic
gattggcggatgtgctttcgaaggttgcgtatagctcaagagcatcactattcctaagtcggtaactacgattggcgttaatcctttctgtggatgctcctcgcttgagagtattgtagtagcgggtaaccgagagtactgctctccaatgaattgtaatgccatcatcgaaatagctacaaatactcttattgcaggttgcaaaacaactgttattctcaagtcgataaagacaattggagattgtgctttctccggttgtacctcgcttgaaagcgttgtaatacctaaaggcgtagatatgattatgaagagggctttcgaaggttgcacatcactcaagagtatcactattcccgagtcggtaacgaagatttgggattatgctttcagtggttgcacatcgctcgaaagcgttgtgatacctaaaggcgtaaaggtgattatgaagggtgctttcaaagattgctcttcgctcaagagcatcactatacccgaatcggtaactatgattgatagtaatctcttcgaaggatgcacctcacttgagagtgtagctatacccgaatcggtaacgacgattgagagtaatctcttcgaaggatgcgcatcacttgagagtgtcactatacccgagtcggtaactaagattaaacatggtgctttcagtggttgcacctcgctcgagagtattacgattcccgattctgtgacagagatgacatatcctatgttctgttgtctcggtgtttttcaaggttgcacctcgcttaagagtatcactatacccgagtcggtaacgactattccagataaatctttctatggttgcacctcgcttgaaagcgttgtaataccaaaaggcgtaaagagtattaaaagtggagctttctcgaattgcacctcgctaactatggtgacattacctactggagtagataagattgaagaagatatatttgatgaatgttctgctctcgccacaatctatgtgcctgccaaaaaagctgactactacaaaaagcgtctgcctgagcagttgcacgacaaaattgtagaacttgcacccgagaagaagacaaaaaataactaactaatgtgcaactgccaacccaacgagtgcattgaatgcatcatctatatacgcctattatccattgttttctcgttattttttgtatatttgcacaaatgtcgtatattaattggaaaataagaaaatgttgaacgaaaccattattaatggtagcaaagtttttattgagaatggtgaggtaaaaactattttgaatgaagatattcaaaaaactgggtatatgagcgtagaggagatgggaagcatactgcacgcatatgtaaataatcttgaatatattggcaatggaacattctgggaatgtactgcactcaaagagattgtcataccaggcacggtgcgtataatcgattcaaatgcctttgcgaagtgtactgctcttgagaatattgtaatcaaggaggataagttcaacaacacaccactccgaatcgaagagtacgcatttaaaatgtgtagctcactaacctcaatcaccatccccgagagaacatcgcgcatacatttcgaggcgttccttcaaacgccagcgctgagtgagatacatggcaagagggagcacctggagagggtattacccgagtctcgccgcaaatatatcgttgagaacgacaaagagtagctacttttaggaataacgaaattggtgcgtgtagggacgatataatcccatcacgcaccaatttttggtgttgttagcaacctttagaatgtcactttgcctgtccttacatcatagtatgccttcttcaccatcaattcgcccttcgcaatcttctctgctacgtgagggtaggcaatgatgcgttcaacctgcacctgtgtatggtggtggattgcagcatcgagagcctctggcttgccgacatagtcgctgacatcattgcgaatggtgccgaggagatgcccgatatttccgtgctcctccacgcactcggagatagcaccagtaacgccaccgcaagaaccgtggccgagtacaaccagaagtagttcggcaagtagtaaagttgatatcggggagagagtaagcctgcgtgagctcggcgttctatcgcagcatcactaatttgctttgggattactccgcggtttcgtgtgccgagatttttatacttaacatcgaaatagcaggtagcatagagcaacagccttctaagctgtgggttgtaagcaatatatcggagccataaacaaaaagccctcaccgaagcgagggcgtaggtacatagaccttcggcatatagccttattgtggtaagatgtagaaattcttacattgcaaatatagttcatttctttgaaaacacaaaattatttgctaattttacggaagaaagatctaacacaaactactatatggcaaaaattttaggtttagacctcggtactaactctatcggttgggccattaccgaacaacaagacgataactacaccttgttggacaaaggtgtcgatattttccaggagggtgttgcccgcaccaaaagtggcgaggagccaatggttaaaactcgtaccgatgcccgagcattgcgccgacactcctatcgtcgcagactacgcaaaatagaacttctgaaagttttaatagccaatgatctctgcccttatttggataaggagcaactcgacaattggcgatacaaaaaacaatatccgctgaacgatgagtttatgctatggctacgcagcagcgatagcaacaatccctatgcagaccgctacaaggcattgactgagcaactaaacctctcggcgacggctgacagatacgcacttggtcgtgctctctaccacctctcgcaaagacgaggctttttgagcaaccgcaaagaggagggcggggatgatggtgctataaaaggcgctatcaaacagctcgatgaagatatggccgcagctggttgcggctatttaggagaattttactataagttattcctggctggcgagaagattcgcaccggcgatggttatggctatgcaggtcgtatcactcactacgaaaaggagtttaaggctatctgcgagaagcaaaatctatctgaggagttgcagaaagcactgcatcgagcaatcttcttccagcgacctctcaaatcgcagaaaggattagtaggtaactgcacctttgagaaggacaagtctcgttgccctatttcgcatcctagctttgaggaattcaggatgttgtgttttatcaacaacataaagattaaaactcctgcggacagcgaactgcgaatgttgaacgctgacgaagttcgactcattgagtcactgttttaccgtaaaagcaaggaacacttcgactttgaggatattgccaaaaaattggccggcggaaagaaaaatagttatgcccacatagccgacaaggttgatgcgccgtacaaatttaattataaaatgtcgcagaatgtgccaggctctcctctaactgcagcattgcgtaatctttttggcgaggattggctctcaacaatgagtagtgtctaccttaaaggtgagggtaagaccgaatcacagattctgaacgatgtgtggcacgtactcttctcgttcgatgacgacgacaagttgaaagagtgggcaaagacaaatttgcaactaaacgatgagcaagccgatgcctttgccgatataaaggttaaacagggctatactgcgttgagtctaaatgctataaataagattttgccatatctgcgaggaggatttcgttatgatgaggcggtgtttattgccaacttgccagcggttgttccgcaagagatgtggcagaatgagaatactcgcaatgctatcattaaagatatctgctctctgcttaatgaatttgccgagaatccactctatcgtcatttgacgaagaaacagacaattgacaatatgttgcttgacaactatggcattagttacaacgactctgcacgcctgtacgagccgtcaaatatcgagacctacccgcaggctcaaccaaatagagagggtttgcttcttcttggctcgcctcgtacatcttcggttcgtaatcctatggctatgcgcacgttgttccgtttgcgtgcattggttaatcagctgctaaaagatggcaagatagacaaggccaccaagattaacattgagtttgctcgtgggttgaatgacgcaaatatgcgaaatgcgattgagcgctatcagcgtgaaaacgagaaaaatagagcaacctatgcagcggatatagccaaactctacaaggagcaatgtggtgttgatattactccaaccgaggatgatattttgaaatatcaactttggattgaacaaaataaactttgcctatataccggtgaatcgatatctatttgcgattttatcggcgctaacccaaaatacgatatcgaacacaccgtgcctcgttcccgtggtggagataattcgcagatgaacaaaaccttatgtcaagccgatttcaatcgccgtatcaagcgagagaagttgcctgccgagcttgccaaccacgccgagattatggcgcatatagagcaacttggctgggacaaggagatcgagaaactcgaaaaacagatatatggttgtgatcgctctgtaaagagtgccgcaacaaaagagtcgaaagacaaggcaattcgagatcgccactatttccgaatgaggttaagctacttgcgtggcaagctttctcgattcacaatgaccgaagtacccgaggggttcagtaatcgccaaggtgtggatataggcattattggaagatatgccaagatgtatctcgaaaccgttttctgcagagtctacacggtcaagggtgcaactaccgccgacttccgtaagatgtgggggttgcaggaggagtatgcaaagaaagagcgagtgaatcacattcatcactgcatcgatgctataactatcgcctgcataggcagtggcgcatatgcaaagtgggcgcagttccaacgagatacagagcgatactattggcatcgtgagaataaaccagtttttgacaagccttggccaacattcaccgaggatgtaaaggctattgcttatgagttacttgtatcgcaccatactgccaacaatctgccaaaacatagtcgtaagaagttgcgcattcgtggtaaggtgcagttcaacgccgagggtaaacctatctatgttcaaggcgataccgcccgcgcgtcgttgcatcagcagaccttctatggtgcgattaagcgagatgacgagattaaatatgttgttcgcaagccattggatgcgcttcaacaatccgatgtcgataaaattgtcgatgaggctgtgcgagcgtgcgttaaggctgctattgagcgcgaaggtttcaaggaggcaatgtccaaacctatctgcttcaacgaggcaaaaggcgtatatataaagaaggtaagaatatatactccgagcgttacctcgcctatccacctgaaaaagcaccagatgctctctcgcttcgactacaagcagaactactatgtcgccaacgacggtaactactgtatggctatttacgaaggcgttgatgcaaaggggaagaccaagcgttcattccagattgtgaataatttggaggccgcaaagttctacaacggcaaaacttcgcgttacgacttggtaccacagtcagacgagaacgacttcccattgaagtgtattcttcgtaccggcactatggttctgttctacgaaaagagcccggaggaactctacgaatgttctcgtgcagagttggcaaagaggttgtataaggtggtcaaaatgatgaaagatggtcgcattacttttaaatatcaccaagaagctagaaatgacgagcaattaaagattgattacgaaaagatgtatggagtgaaagcgccaaaatcacttaccaatggatattcttgtgttaatttcgaaacgccttatcctaaactattattaagtacaggcaattttaacatgtatgtcgaaggctacgattttgagttgacagtgaccggtgagataaaattcaaacactaatagcctatgttgaagcgtgcgctattcttttcgactccattttgcttgagtttgaaggataatcagatggttatcaacaccaagcagatgcccaatatgaagcagaccgttcctatcgaggatatcggttttgtggtgctggagcatcagcagacatctatcactctgccgttgctcaatgcgctatcagataacaatgtggcggtgatcatatgtggcgagaatagaatgcctaacgcaatgttgatgaatctcgacagcaacaccacgcaaggcgagagtttccgtgcgcaaattgatgcaagtgaaccactcaaaaagggtgtttggaaacaggttgttgaggctaaaattcgcaaccaagctgccctattaaataagctcggcaaaaatggagacaagttaaaaccttattacaccaatgtcaagagtggtgatgcagacaatcgtgaaggtatagccgccaagatatattggaacgaactctttggcgatgattttgtgcgccatagggagggtgttgagcccaataatatgctcaattatggctatacattgcttcgtgctgcggttgcaagagcattgatgggctcgggattattgcctgcattaggtatttttcaccgcaatcgttacaatgcattcccgttagccgatgatataatggagccatatcgcccatatgtagatgagattgtataccatatgtatataaatggtatgaccgaattaaaccaagatgcaaaaagtcagttactacatattttgtttactgataccgtctttaataaggttacccgaccgttggaagtgggccttacgatgacaactgcctcgttggcaaaatgctatgttggaacaagtaaaaagatagtttatccactactcgaatagcctatgaccgaacttcgcctaaacgcctatcatattatgtggttatttgtcttttttgacctgccaaccactacgaaaaaagagcgtaaagcggccgctcaatttcgtaaagcgttggagaaagatggcttttcgatgatgcaatactcggtatatgtgcgacattgcccatcgaaagagaatatgaatgtgcatatagcgagggttcgagcctcgatgcctccatcgggattgaccagtattttgagcataaccgataagcagtatggcgaaatacaaaacttttggggaaaggttgaacgcgcaaaacctacaacaccccaacaattagaatttttttagcgttcttttgacattagcgtgaaatttcactacattgcagtgggtaagattgaaaaaatagcatcaaacgcacttcgctggcgacctaatagccattttgtttatcgaagaatcggtgtaacttcttggaaatcattaggcaaaaccccaggcgttgtggtttgatgtagaaatagaataagatacaacgcaaagaagaatctaccgcgagggttgcggttgtggtttgatgtagaaatagaataagacacaacgctgc

SEQ ID NO: 2037 - DNA, 6270 bp, synthetic construct
  misc_feature 1..6270: note = Synthetic
  source 1..6270: mol_type = other DNA
atgtaaaagccgatgcaatcctattccgatacaccacgcccgacggacgaaaagaggtggtgaaatttccgttagctggattctgcgaaaaatatctgatgcaattcacgaagtaaatcttggtgtagttggattacatcgtatctataaagaacaaggaaaaagaacccgaaaaaatgcggcgattttcctttgacactgacaagcgacaaactaaaaaaacgagggcgatataataaccctttcgacatagtttgccgctttctctatttaacaaaaaatcaacgaattcactaatgtttaaccagcattgagtttgccctattgtgtaaaccaacgtgtaaaccgcgccgagccacagcacaacaaagagaaacccaccgacaaaacccacaaccgtaactatctgttaatcaacgtcgccctacatttgcattcgcaattcggcaccgtagcttaattgaatagagcatctgactacggatcagaaggttacaggtttgagtcctgtcggtgtcacgaagaaaaaggagttacaaagtttgtaactcctttttcttttgtttgggcagaaaccctctgcggcgacaatcaacgcaccattcctacatccgacaacccggcatcgcccaaaccaaataggaaaaacattatcaataaaaaagtctccacggagtacgcggagacaataggttgaaaaccttcggcatatagccttattgtggtaagatgtagatttgttacgagacaaatataagctaaaatttggaatcttgcaactttttacataatttcacgaaaaagttattgtatgtcgaaagtactgggactggatctcggcaccaattcgttgggctgggcgattacggaagagaccgcaagcggatatgcgctgctcgataagggtgtcgatatttttcaggagggagttgcccgggaaaagaacaacgagaaaccggcagtccaagacagaaccgatgcgcgagcattgcgccggcactatttccgccgcagactgcgcaaaatcgaagtactcaagatactcatcgacaacggcctatgcccttggctgaccgacggacaattgaccgaatggcggaaacacaagacctatccgctcgacgaagcgttcatccgctggcaacggacggacgacaacgcagacaaaaatccataccacgaccgctatcgggcattgaccgaaacgctcgacctgaacaacgaatccgatcgccataccctcgggcgcgcattctatcatttggctcaacgacgcggattcatcagcaaccgtaaggaagcgggaaaagagagcgaagacggacaagtcaagcaaagcatcaagaatctgaccgctgacatggaaaacgccggatgcaggtatttgggcgaatatttccacatgctctatctgcggaaagaaaaaatccgaaaaaaatacacttcgcgcaacgaacactatctggcggaattccgggccatctgcgacagacagcacctgcccgaaccactggaacaggcattgtatcgggccatctttttccagcggcctttgaaatcgcaaaaaggaacggtcggcaaatgcacttttgaaaaacagaaatcgcgctgccccggttcccatccgcatttcgaggagttccgaatgtactctttcatcaacaacatccgcattgtcactccgaaagagaacgatttccgccctttgacgcaatcggaggtcgaaacaatcgttccgttattcctacgcaagagcaaacagcacttcgacttcgaggaaatcgcgcgcaaaatagccggcaagggacgttatgcctgcaaaggcgaccggaacgaagctccgtaccgattcaactacgcacgtattgcaaccgtgagcggatgtccagtcaccgcttcgctgatttcggtgttcggtgacgactggctgccggaaatatgccgccgctatacgcttgcttccggcaagagcgaacaacaaatactgaatgatgtatggcatgcgctgttctcgttcgacgacgaagaacggcttcgcacatgggcacgcgaaaagctccgccttacggacgaacaagctgcggcattcgctgcaatccgcataccgcaagaatatgtggctctgagcctgaacgccatagacaagatattgccgtatctgcgggcgggctaccgttacgatgaagcggttttcattgccaacctcaaggcagccctgccgcaggaaatcgccgaagatgaaacgcgtcttcaagaaattgaacgagacatcgtacgtctgctgcttgactacaaacgcaatccctatgataagtacgactcgaaagaacgacgcatcgaggcatatttcagcgacaacgggctcgacgtttcgcggctccaacgtctctaccacccgtcgatgatcgagtcctaccgagctcagcggccggattccaacggcatcctgcaactgggttcgccacgaaccgcatcggtacgcaatccgatggcgatgcgggcgctgttccggctgcgggcattggtcaaccgattgctgcgcgacggaaaaatcgaccccacgaccaaaatcaacatcgaattctcccgaggactgaacgatgcgaacaaacgcaaagccattgaacgataccaacgcgaacgggaggccgaacatcggcaattcgccgacgaaatccgaaaacaatacgcggcagaaaccggcacggaaatagaaccgaccgaaaccgacatactgaaataccgcctttgggaggagcagaaacatgtttgcccttacacgggcaggcaaatctgcatttcggatttcatcggctcggcaacgggcttcgacatcgaacacaccgtaccccgctcacgcggaggcgacaattcgcagatgaacaaaacgctttgcgaaaacaggttcaaccgagaagtaaaacgagccaagctcccgtccgaactatcggcacacgccgaaatcatggcatgcatcgaatggttcggatggcaggaggaagtagaagcgctgcaaaaaatgatagaagcgcaagtgcgcaagagcaaaggcgccaccacgaaaacagaaaaggacaacgccattcaacggcgccactatttgcaaatgcagctggcgtattggcgcggaaaaatcgaacgattcaccatggccgaagttccggacggattctccaacaggcagggagtggacattggaatcatcggccgctacgcccggctctatctgaaaacggtgttcgagcggatatacacggtaaaaggtgcaacgaccgccgaattccgcaaaatgtggggtttgcaggcggaatatgcacaaaaggaacgcgtgaatcatgtccaccactgcatcgacgccattacgattgcctgtatcggccgcaacgaatatgaccactgggcccgctatgtcggagacgaagaacgatacctgcgcaacgaaggagtacggccgcaatttgaaaaaccctggccgactttcactgaagatgtcaaagccatagccgacgaactgctcatctcgcaccacacgccagacaacctgcccaaacaaagccgcaagcggctgcgcatccgtggcaaagttcaggtcaacggccaaggcaaacccatctacatgcaaggcgatacggcccggggctcactgcaccaacaaactttctatggagcaatcaagcggaacgacgaaatcaaacatgtcgtccgcaaatcgctcgaccagcttcagcctaccgacgtggaaaagattgtcgacgaagcggtaaaacagaaagtgaaagaggcaattgattgtgtaggattcaaaacggcgatgaacccggaggaacacacgatttggatgaaccaggagaaagccgtaccgatccgcaaggtgcgcattttcacaccgagcgtcactcaaccgatacatctcaagaaacaacgcgacgcttcggaaaaaacatacaaacaagattaccttgtcacgaacgacggcaactactgcatggccgtttatgaaggaactgacaaacgcggaaagacccggcgttcgtttgaaattgtcagcaacctggaagccgcacaatatttcaaggcgagcgccgaccggacggcccgacccgacctcgtgccggtaaccgatacgaacggcaacccgctgaaatgcctgctgagaacaggcacgatggtgcttttctacgaaaattcgccggaagaactgcacgaatgttcccggaaagaactggcgaaacggctgtacaaggtaatcgccatgtcggccgaaggccgtgcccagttcctgttccatcaagaagcacgcgaacaaaaagcactcaaggagatatgcggaagcggagcttcggtgttcgaggcaaagtgtccggcaccgaaattacgattaagcacatcgaatttcaacatgtatgtcgaaggttacgatttcgacatgaccgttacaggagaaatcgaattcaaacacggaccgtcatgctgaaacgcgccctctttttctcgacgcccttttctctgagcctgcgcaacggccagatgatcgttcatacgaaagaggctcccgaaatgcagaaaagcattcccgtggaagacataggggtgatcgttctggaagaccaacagaccactgccaccctgccgctgctcaatgcgctttccgacaacaatgcagccgtcattctctgcggcaacgaccgcatgccgaatgccatgctgatgaacttagactccaacaagacgcaaggcgagagctatcgcgcccaggtcgaagcgagcgaaccgctcaaaaagagcatctggaaacaaatcgtcgaagcgaaaatccgcaatcaagcggccctgctacgaaaattgggcaaggacggagataaactgaaaccctactacatgaacgtgaaaagcggggacacggacaaccgggagggaatcgccgccaaaatatattggacagagcttttcggccgggaattcattcgttcgcgcgaaggctcggaaccgaacaatctattgaattacggctatacgattcttcgtgctgccgtagcccgctcattgatgggctcgggcctgctgccggctttcggcattttccaccgaaaccgctacaacgcattcccgctggcggacgacctgatggaaccctatcgcccatatgtcgacgaactggtatacaagctccaatccgaaggcaaactacgactgaccaaggaagtcaagggcgaattgctacggctgcttttcgtcgacacccgtttcgacaaggtattgcgtccgctcgacgtagggctcacgttcacctcggcgtctttggcgaaatgttttgccgggacccacaaaaagatactttatccgctcctcgaataatgtccgaatcgcgtctgaatgcctaccggatcatgtggctgttcgtattcttcgatctcccgacccaaaccaaaaccgagcgacggcatgccgcccagttccgcaaggcgttggagaaagacggcttttcgatgatgcaatactcggtttatgtccgacattgcgcctcgaaagaaaacctgcaagtgcatctcaaccgggtcagaaaatccatgcctccgagcggctatacaagtatcttgagcgtgacggacaaacaatacgggggaatcatgaatttttggggtaaaatcgaacgggcccgacccgaaacaccccaacaacttgaatttttctgaaaaaaagaattatattcgttctttgaaatacaaaaaacagcatctgatcgacttcatcgtggtatggaaccacgatttgcattcgttcatacgcaatgtaaatcatgcaaaatcaacctattccatgcacggcgttgtggtttgatgtagtttttccataagatacaaccgcaaacacgatctacgccaaccgtgtactgttgtggtttgatgtagtttttccataagatacaacctatctctctaagcctcatctctagtagcagttgtggtttgatgtagtttttccataagatacaacgcggtggcaaaacttgccataaccggtattgttgtggtttgatgtagtttttccataagatacaactgcctcgtaaaagacttgttgcgagaaacagttgtggtttgatgtagtttttccataagatacaacgcataaagggctgcattagaggtcaagtagttgtggtttgatgtagtttttccataagatacaacgcataaagggttgcgaggaggccttcgatggttgtggtttgatgtagtttttccataagatacaactttttatggatct

SEQ ID NO: 2038 - DNA, 5800 bp, synthetic construct
  source 1..5800: mol_type = other DNA
  misc_feature 1..5800: note = Synthetic
cttctgttttcggcaccatgaactcccgaaggcaaaaagccacagcgccggcacactccgcaatagcaaccgacggtttttaaattattcacgaaatataaaaaagtctccacggagtacgcggagacaataggttgaaaaccttcggcatatagccttattgtgataagatgtagaattcttacaccacaaatatagtaaaaaaagatgaatttctgcaattttttatttaattttacagaaaacactttcttcatatggcaaaagtattgggtttggaccttggcaccaactcactgggatgggcccttgtcgatgaatcggagaacgaatatacgctgattgacaaaggtgtagacattttccaggagggagttgcccgcgacaaaaacaatgaaaaacctgccgttcaggatcggacgagcgcccgggcactgcgccgccactatttccggcggcgtctgcgaaaaatcgaactgctcaaaatactcatccgttacgacctttgcccgccgttgcccgaggagctgttgaccgcctggcaaaaagagaaacgttacccgcaggacaatgaattcctccgttggcagcgaaccgacgacaatggggatcgaaatccttaccacgatcgttatgtagccctgtccgagcggctcgatctcgggaatcgcacacagcgctggctgcttggccgggcgctttatcatttggcacagcgacgcggattcctcagcaatcgcaaggaagcaggaaatgagaaagaagacggcacggtcaaggagtgtatcaaaaatctgtcggctgaaatagcagcggcagggtgtcggtacctcggagaatatttctacggactgtaccaacacaaggaacgaatccgcgacaaatacacctcgcgcaacgaacactacctggccgagttcaatgccatctgcgaccggcagcaattgcccgacgtaaggcgctgcatcgggcaatctttttccagcgcgacctcaaatcgcagaaggggtcagtcggccgatgcaccttcgagccgacgaagagtcggtgccccgtttcgcatccccgttttgaggagttccggatgctgtcgttcgtcaacaacatccggattacaggaccgggcgacaatgctccacgacctttgacacaggaagagttcgagacgattcgttcgctcttcttccggaaaagcaagccttatttcgatttcgaagagatcgcccgcagaatcgccggcaaagggaaatatgcctgcaaagaggagcgtacagaagctccttatcgtttcaatttcgcccgcacggccaccgtatcgggatgccccgtcacggcatcgctgcaagcgatcttcggagacgactggattacggagattcgcagcctttacctgcttggagcaggaaaaaacgaggaccagatgttgaatgacgtatggcacgccctcttttcgttcaacgacgaaggtcggctgcgtagctgggcctgcgaaaaattgcaactcacggatgaacaagccaaagcgtttgcagccatcaaactcccgcaggattacgcggcgttgagcctaaatgccatcggcaagattctggtctatctgcgctgtggctatcggtacgacgaggcggtattcctggccaacctgcgggcggcacttccgaaggaggtctatgccgacgaaagccgtcggcatgaaatcgaacaggacatcgtctcgctgctgcttgactacaagcgaaatccgtataacaagttcgattcaaaggagcaccgcattgccgactatttcagcgatcatggattggatgcctctcgtctgatgcgtctttatcatccctcgaaaatcgagacctatccggatgcgcaacccaaggcaaatggcattctgcaactcggctctccacgtactgcgaccattcgcaacccgatggccatgcgggccctgttccgattgcgcaacctgataaacacgctgttacgcgaaggcaggatcgaccgagacacgaagatccggattgaattcgcccgcggactcaatgatgcgaacaggcggaaggccatcgagcagtatcagcgggaacgggaggttgagaatcggaaatatgccgaagagatccacagccagtatgccgccgaaaccggccgcgagataaaaccctcggacgacgaagtgctgaaataccggctgtgggaagaacagcagcacgtctgtccctataccgggcggcaaatccgcatttcggacttcgtcgggtcggctccggatttcgacatcgagcacacgctcccgcaggctcgcggcggcgatgactcgcagatgaacaagacgctctgcgaaaaccggttcaaccgggagacaaaacgggcgaaactgccggccgagttgtccaaccatgtcgagatcatggagcggatcgaatcgtttggttggcgggaaaaaatggagagtctgcaaaagcagattgaagcccaggttcgcaggagcaaaagcgcagcgattaaatccgaaaaggacgacgccattcagcgccgtcactatttgcagatgcaactcgactactggcgcgggaaatacgaacgcttcaccatggccgagattcccgaaggattcagcaatcggcagggagtcgacatcggcatcatcggcaaatatgcacggctctatctgaagacggtttttgaccgaatctatacggtcaaaggttccacgaccgccgcgttccgcaagatgtggggactgcaggaggagtatgcccgcaaggagcgcacgaaccacgtccaccactgcatcgacgccatcacgatcgcctgtatcggccgccgggagtacgaccgctgggcgcaatatgtcgccgacgaggagcgatacggctacggcgaaagcggcaaaccccgcttcgagaaaccctggccgacctttaccgaagatgtcaaggcggcggccgacgaactgctcgttgtccaccacacgcccgacaacatgaccaaacagacgcgcaggaagttacgggttcgcggccggataaagttgaatgccgacggggaaccaatctaccagcaaggagacacggctcgctgccggttgcatcaggataccttctacggcgctattaagcaggatggagagatccgctatgtcatccgcaaatcgctcgcgcagttacagccgacggacatcgacaagattatcgacgatgcagtccgggatcgcgtacgggaggcaatcgacaaggtcggattcaagacggcgatgaatcccgatgaatacacgatctggatgaaccgggaaaagggcattcccatccgcaaggtgcggatcttcacaccgagtgtcaaacatccgatcgcgctaaaaaaacagcgcgacctatctgcaaaagagtacaagcgggattatcatgtcgtaaatgaggggaactattgcacggtcatctatgagggccaggacaaaaagggcaaaacgaaacgcacctttgaactcgtcagcaacctcgaagctgcccaatatttcaaagccagcgctgaccgggaagcccgccccgatctggtaccgcagaccgacacgaacggtttccccttgaaatacatcttaaaaacggggaccatggtcctgttttatgaaaataccccggcagaactttatgaatgtacccgcaaggagttggtaaaacgactctacaaggtaacagcaatggctgcagaaggacgggtacagttcctctttcatcaggaggcccgagatcagaaaacacttacctccttatatggagctgggacctctcaattctgccaatccaatccatcaccgaaattgcgcctcagcgtttccaattttaacatgttggtggaaggttatgatttcgaactgaccgtaacgggcgagataaaattcaaagatgaccggccatgctgaaacgaaccttgtttttttcgacaccctactgtttgagcctgcgcaacggccagatgatcatccacacgcgcgaggcccccgaccaacggaaaagcatcccgatcgaggatatcggcttcgtggtgctggaggaccagcagacctccatcacgctgccgctcttgaatgcgctgtcggacaacaacgtggcagttatcctgtgcggagagaaccgaatgccgaacgccttgttgatgaatttggattcaaacagaacgcaaggtgaacattatcggatgcagatcgctgcatccgaaccgctgaagaagggcctttggaaacagatcgtcgagaccaaaatccgcaaccaggctgccttgctgcggaagctggggtatgacggagacaaactgaaaccctgctacatgaatgtcaagagcgccgacgccgacaaccgggagggcatagcagcgagaatctactggtcagaactgttcggtgccgaattttaccgttcccgcgaaggttcgccgcccaacaacctgctcaattacggctatacgatcctgcgagccgccgtggcccgtgcgatcatgggctccggactgttcccagcattcgggatcttccatcggaatcgttacaactcctttccgctggccgatgacgtaatggaaccctatcgaccgtatgtcgacgaattggtctaccaactttacagaaacgggaatacacaactgaccaaaaaggtgaaaggcgaactgttgcggctcctgtttgtcgatactcgtttcgacaaggttgtgcgacctctcgaagtaggacttatgttttcagcctcttccctggccaaatgctttgctggaacccaaaaaaagattgcatatcctttattggagtagtcgaatgtcagaagtacgcttgaatgcttatcgaatcatgtggttgtttgtcttttttgatttgccaaccaatacaaaaacggaacgacgtcatgcggcgcaatttcgcaaggcgttggaaaaagatggtttcacaatgatgcagtattcagtctatgtgcgccattgtgcatcgaaggagaatatgcaggttcacattaagcgggttcgacgatcgatgcctccgacaggatttacaagtattcttgctgtaacggacaaacagtatggagacatattaaatttttggggtaaaagcgaacgagcaaaaccggaaattccgcaacaattggaatttttctgataaatcgttattttcgttctttgaaatacggaaaatgcatcaaactggcttcgtcggaacacccgatcgtatttttatagtggcagacagcccgtaagtaacactttatcaatcaatatgaggcccgacggttgtggtttgatgtagaatttcgataagatacaacgattttgcgctctttttcgaggaggaggtgttgtggtttgatgtagaatttcgataagatacaacttcaagactgaccaagcgataggaacgctgttgtggtttgatgtagaatttcgataagatacaacgacgaaaacgtagcgcttggctatccggcgttgtggtttgatgtagaatttcgataagatacaacatacgacgagaaagccctacgaatcgcagagttgtggtttgatgtagaatttcgataagatacaactcttcgagaaaggaaaaggcgagtatatcagttgtggtttgatgtagaatttcgataagatacaacgagcatttgtgctccttgcgctgcgtagtgttgtggtttgatgtagaatttcgataagatacaacttcaaaactgaccaagcgataggaactctgttgtggtttgatgtagaatttcgataagatacaactcgcaaggcaacaagtggtggacaagattggttgtggttt

SEQ ID NO: 2039 - DNA, 4048 bp, synthetic construct
  misc_feature 1..4048: note = Synthetic
  source 1..4048: mol_type = other DNA
aagggcagcatagccatggggtcgcggcgcaccacgcccaccgcgccggtggcggcggcggtggtctccgaggccatacacaggcggacaagctatgggaatcgaaataccgtccggcggtcgtcagtctggaggagcagtgcgacgccgccatgcgaaagacgacgaacgaggcggatgcctttgcgacggaaacacgctacgcagcctcgatcggcgttcagtaccggaaattctatgaagagagcattccgatatggatcgaacacgtaaaggctttgatggcctaccataagagcagcattcccgaagcgcggcgtttcgatgcgctgaatctggaacgcgcaaaactctccggacccgaatcggcaatccgcgcggcggaagcgatcgacagcgccgtggaatgcgcactctcctacctcgatgctgcgtttacggtcgtacagtttccctccgcaggatcggggcgcaccggcgactcctaaagcgatatccggcgaccggccatccgcgggaggaggcgtcgctgccgaacggcagcagacgatcagccgatcatgtcatacagtataaaaaatgtctccacggagtacgcggagacacaggtattaaaaccttcggcatatagccttattgtggtaagatgtagaatacttacaatacaaatatagacaactattcggaattctacaactttttatttaactttatggaaaaatatgcgttttatgtcgaagatattgggattagacctcggaactaattcgatcggatgggcgatcacagagcagacagacagcggatacaccctgctcgacaaaggtgtggatatctttcaggagggagttgcgcgtgagaaaaaaagcgagaaacccgccgtgcaggaccggacggatgcccgtgctctgcgacggcactatttccgccgccggctgcgcaaaatcgagctgctcaaggtcctgatccgccacgatctatgtccttcgctgaccgaagaacaactcggcgagtggcggaaaaagaagatctatccgctgaccgaggagttcctgctctggcagcgcacggacgacaatacggacaaaaatccataccgcgaccgttatcgtgcgttgaccgaagaactccacctcgacagccgcagagaccgatatgtgctcggccgagcactttaccatctggcgcaacgacgcggattcatcagcaaccgcaaggaggcgggcaaagaggcagaagagggtaaagtcaaaaagagtatcaaagacctgacagccgacatagaagccgctggataccattatctgggtgaatacttttatcagctttatcaacaaaaagataaaattcggaagaaatacacctcacgtaaggaccattatctaaccgaatttcacgccatctgcgaaaaacagcgccttccagaggagttgcggaaggcactggaacacgccatcttcttccaacggccgctgaaatcgcagaaaggattggtcggcaagtgcacgttcgaaaagacaaagagccgctgtccggcgtcacacccgcggtttgaggagttccgaatgttctctttcatcaatacgatccgtatccagacacctgccgattcggagccgcacccgttgtcgcaagaagaggtcgagacgattcgtccgctgttcctgcgcaagagcaagccccacttcgatttcgaggagatcgcccgcaagattgccggcaaaggacagtatgcctgcaaaggagatcgtatagaagctccctaccgtttcaactatgctgcacatacgaccgtaagcggctgccccgtaacggcagcactcgtctccattttcggcgacaactatcttacggaaatttgcagcctttacacgctcggcgcaggaaagagcgaaaagcagatgttgaacgacgtatggcacgccctcttctcgttcgacgatgaggagcagctctgcgcatgggcgaaagaaaaactgcaactttcggacgacgatgcgaagcgtttcgccgccatccgcctgccgcaggactatgccgcattgagcctcaacgccatccataagatgctgccttatctgcgccgcgggtatcgttacgatgaagcggtgtttttagccaatctgggtgcggtgatcgcctccgacatctggcacgctcccgcgcagcgcgataagataatcgaggccgtggccacgaccgtagccgaataccgtccgaatccatacgataaaaacgacagtaaagagaaccggatctatgcatgtctgcgagactgcggaattcccaatgaggcgataaagagtgagaaactgtatcacccctccatgatcgacgtttatcaggatgcaataccgaacgggaacggaatattgcaactcggttcaccgcggacatcggcagtccgtaatcccatggccatgcgggcgctgtttcgtctgcgcattctgataaacaagctcctgcgcgacggcaagatcgaccgtacgacaaaaataaacatcgaatttgcccgtggactgaacgatgccaaccaacgcagggcgatcgaacagtaccaacgcgaccgcgaagccgagcacaagaaatacgccgaggagattcgcaggcaatatgcggcagagacggggctggatatcgaaccgacggacgacgacctgctgaaataccggctctgggaagagcagaaccacatctgcctctatacgggaagccagattcgcatctccgactttatcggcgatgccgcgcgttacgacatcgagcataccgtgcctcgttcgcgcggaggcgacaactcgcaaatgaacaaaacgttgtgcgaaaatcgtttcaaccgcgacgtcaaaaaagccaagctcccttcggaactctccgtccacaccgaaattctggctcgcatcgaagccctcggctggctggaaaaaatcgacagtctgcaaaaacagatcgagggacagacgcgcaaaagcaaaagcgcaacgaccaaaccggaaaaagacaacgccatccagcaccgccattacctgcgtatgcagctcgattactggcgcggaaaatacgaacggtttatcctgaccgaagtccccgacggattcagcaaccggcagggtgtcgacatcggcatcatcggaaagtatgcccgactctatctgaaaactgtttttgaacggatctaaacggttaagggtgcgacgaccgacgaatttcgtaagatgtgggggttgcaggaagagtacgtcaaaaaagagcgtgtaaatcatgtacatcactgcatcgatgccatcaccatcgcctgcatcggacgcagcgagtacgaccgctgggcgcaatatacgggcgacgaagaacgctatgagcgcggcgagggtgcaaaaccccgtttcgagaagccgtggccgaccttcaccgaggacgttaagtcgatcgtagacgaattgctcgtctcgcactacacgcccgacaacatgcccaaacagagccgaaaaaagctgcgtgtacgcggcaaggtgaagcgaaatgatcggggtgaaccgatttttgttcagggagatactgctcgcggtgcgctccatcagcaaactttctatggagccatcaagcgtgacgacggaatcaaattcgtcgtgcgcaaatcgctcgaccagctacaaccggccgatgtcgagaagatcgtggacgacgcagtaaaacagcgcgtgcaggaggcgatcagggtctatggattcaaagaggcgatgacgctggacggagcgcctaaaatctggatgaacgaagagaagggcatccctatccgcaaggtacgtatctttgcgggaaagaccttatcgcccaagaccttaggagacaaaaagaaccgggatgtatccgttaaagcacacaaacgacctgtttacgtaacgtatggcggaaattattgtatggcgatctatgaggggacggacaaaacaggcaaaacaaagcggtcgttcgaggttgtcagcaatctggaggcggcacgctatttcaaggcgagcaccgaccgaactgcccgtcccgacctcgtgcc

SEQ ID NO: 2040 - DNA, 3651 bp, synthetic construct
  misc_feature 1..3651: note = Synthetic
  source 1..3651: mol_type = other DNA
tgaagcgcaccccgaaaatccggaaagggatttcggggtgcgctttttatccggttcgtcatcgtccgcccgcggcagagcctcgtgcacgaatgcgcccggaaacagaaggcgtcgctgaatttctattcgcgtgttttcccggtttcagagtctcgatataaagtattcctgcatattccaacgatatgcccttgatgaacgctgcaattggagatgcttcatgtcggtgcgtcgcacggcgagtggcggacggtccgacatgcgaccttctgttttcggcaccatgaactcccgaaggcaaaaagccacagcgccggcacactccgcaatagcaaccgacggtttttaaattattcacgaaatataaaaaaagtctccacggagtacgcggagacaataggttgaaaaccttcggcatatagccttattgtgataagatgtagaattcttacaccacaaatatagtaaaaaaagatgaatttctgcaattttttatttaattttacagaaaacactttcttcatatggcaaaagtattgggtttggaccttggcaccaactcactgggatgggcccttgtcgatgaatcggagaacgaatatacgctgattgacaaaggtgtagacattttccaggagggagttgcccgcgacaaaaacaatgaaaaacctgccgttcaggatcggacgagcgcccgggcactgcgccgccactatttccggcggcgtctgcgaaaaatcgaactgctcaaaatactcatccgttacgacctttgcccgccgttgcccgaggagctgttgaccgcctggcaaaaagagaaacgttacccgcaggacaatgaattcctccgttggcagcgaaccgacgacaatggggatcgaaatccttaccacgatcgttatgtagccctgtccgagcggctcgatctcgggaatcgcacacagcgctggctgcttggccgggcgctttatcatttggcacagcgacgcggattcctcagcaatcgcaaggaagcaggaaatgagaaagaagacggcacggtcaaggagtgtatcaaaaatctgtcggctgaaatagcagcggcagggtgtaccaacacaaggaacgaatccgcgacaaatacacctcgcgcaacgaacactacctggccgagttcaatgccatctgcgaccggcagcaattgcccgacgaatggcgtaaggcgctgcatcgggcaatctttttccagcgcgacctcaaatcgcagaaggggtcagtcggccgatgcaccttcgagccgacgaagagtcggtgccccgtttcgcatccccgttttgaggagttccggatgctgtcgttcgtcaacaacatccggattacaggaccgggcgacaatgctccacgacctttgacacaggaagagttcgagacgattcgttcgctcttcttccggaaaagcaagccttatttcgatttcgaagagatcgcccgcagaatcgccggcaaagggaaatatgcctgcaaagaggagcgtacagaagctccttatcgtttcaatttcgcccgcacggccaccgtatcgggatgccccgtcacggcatcgctgcaagcgatcttcggagacgactggattacggagattcgcagcctttacctgcttggagcaggaaaaaacgaggaccagatgttgaatgacgtatggcacgccctcttttcgttcaacgacgaaggtcggctgcgtagctgggcctgcgaaaaattgcaactcacggatgaacaagccaaagcgtttgcagccatcaaactcccgcaggattacgcggcgttgagcctaaatgccatcggcaagattctggtctatctgcgctgtggctatcggtacgacgaggcggtattcctggccaacctgcgggcggcacttccgaaggaggtctatgccgacgaaagccgtcggcatgaaatcgaacaggacatcgcctcgctgctgcttgactacaagcgaaatccgtataacaagttcgattcaaaggagcaccgcattgccgactatttcagcgatcatggattggatgcctctcgtctgatccgtctttatcatccctcgaaaatcgagacctatccggatgcgcaacccaaggcaaatggcattctgcaactcggctctccacgtactgcgaccattcgcaacccgatggccatgcgggccctgttccgattgcgcaacctgataaacacgctgttacgcgaaggcaggatcgaccgagacacgaagatccggattgaattcgcccgcggactcaatgatgcgaacaggcggaaggccatcgagcagtatcagcgggaacgggaggttgagaatcggaaatatgccgaagagatccacagccagtatgccgccgaaaccggccgcgagataaaaccctcggacgacgaagtgctgaaataccggctgtgggaagaacagcagcacgtctgtccctataccgggcggcaaatccgcatttcggacttcgtcgggtcggctccggatttcgacatcgagcacacgctcccgcaggctcgcggcggcgatgactcgcagatgaacaagacgctctgcgaaaaccggttcaaccgggagacaaaacgggcgaaactgccggccgagttgtccaaccatgtcgagatcatggagcggatcgaatcgtttggttggcgggaaaaaatggagagtctgcaaaagcagattgaagcccaggttcgcaggagcaaaagcgcagcgattaaatccgaaaaggacgacgccattcagcgccgtcactatttgcagatgcaactcgactactggcgcgggaaatacgaacgcttcaccatggccgagattcccgaaggattcagcaatcggcagggagtcgacatcggcatcatcggcaaatatgcacggctctatctgaagacggtttttgaccgaatctatacggtcaaaggttccacgaccgccgcgttccgcaagatgtggggactgcaggaggagtatgcccgcaaggagcgcacgaaccacgtccaccactgcatcgacgccatcacgatcgcctgtatcggccgccgggagtacgaccgctgggcgcaatatgtcgccgacgaggagcgatacggctacggcgaaagcggcaaaccccgcttcgagaaaccctggccgacctttaccgaagatgtcaaggcggcggccgacgaactgctcgttgcccaccacacgcccgacaacatgaccaaacagacacgcaagaaattgcgggttcgcggccgggtcaagctgagtgccgacggaaagccgatctatcaacagggcgatacggcccgttgccggctgcatctacggcgctattaagcaggatggagagatccgctatgtcatccgcaaatcgctcgcgcagttacagccgacggacatcgacaagattatcgacgatgcagtccgggatcgcgtacgggaggcaatcgacgaggtcggattcaagacggcgatgaatcccgatgaatacacgatctggatgaaccgggaaaagggcattcccatccgcaaggtgcggatcttcacaccgagtgtcaaacatccgatcgcgctaaaaaaacagcgcgacctatctgcaaaagagtacaagcgggattatcatgtcgtaaatgagggga

SEQ ID NO: 2041 - DNA, 3559 bp, synthetic construct
  source 1..3559: mol_type = other DNA
  misc_feature 1..3559: note = Synthetic
tggcacagcgacgcggattcctcagcaatcgcaaggaagcaggaaatgagaaagaagacggcacggtcaaggagtgtatcaaaaatctgtcggctgaaatagcagcggcagggggtcggtacctcggagaatatttctacggactgtaccaacacaaggaacgaatccgcgacaaatacacctcgcgcaacgaacactacctggccgagttcaatgccatctgcgaccggcagcaattgcccgacgaatggcgtaaggcgctgcatcgggcaatctttttccagcgcgacctcaaatcgcagaaggggtcagtcggccgatgcaccttcgagccgacgaagagtcggtgccccgtttcgcatccccgttttgaggagttccggtgctgtcgttcgtcaacaacatccggattacaggaccgggcgacaatgctccacgacctttgacacaggaagagttcgagacgattcgttcgctcttcttccggaaaagcaagccttatttcgatttcgaagagatcgcccgcagaatcgccggcaaagggaaatatgcctgcaaagaggagcgtacagaagctccttatcgtttcaatttcgcccgcacggccaccgtatcgggatgccccgtcacggcatcgctgcaagcgatcttcggagacgactggattacggagattcgcagcctttacctgcttggagcaggaaaaaacgaggaccagatgttgaatgacgtatggcacgccctcttttcgttcaacgacgaaggtcggctgcgtagctgggcctgcgaaaaattgcaactcacggatgaacaagccaaagcgtttgcagccatcaaactcccgcaggattatgcggcgttgagcctaaatgccatcggcaagattctggtctatctgcgctgtggctatcggtacgacgaggcggtattcctggccaacctgcgggcggcacttccgaaggaggtctatgccgacgaaagccgtcggcatgaaatcgaacaggacatcgcctcgctgctgcttgactacaagcgaaatccgtataacaagttcgattcaaaggagcaccgcattgccgactatttcagcgatcatggattggatgcctctcgtctgatgcgtctttatcatccctcgaaaatcgagacctatccggatgcgcaacccaaggcaaatggcattctgcaactcggctctccacgtactgcgaccattcgcaacccgatggccatgcgggccctgttccgattgcgcaacctgataaacacgctgttacgcgaaggcaggatcgaccgagacacgaagatccggattgaattcgcccgcggactcaatgatgcgaacaggcggaaggccatcgagcagtatcagcgggaacgggaggttgagaatcggaaatatgccgaagagatccacagccagtatgccgccgaaaccggccgcgagataaaaccctcggacgacgaagtgctgaaataccggctgtgggaagaacagcagcacgtctgtccctataccgggcggcaaatccgcatttcggacttcgtcgggtcggctccggatttcgacatcgagcacacgctcccgcaggctcgcggcgggggagactcgcagatgaacaagacgctctgcgaaaaccggttcaaccgggagacaaaacgggcgaaactgccggccgagttgtccaatcatgtcgagatcatggagcggatcgaatcgtttggctggcgggaaaaaatggagagtctgcaaaagcagattgaagcccaggttcgcaggagcaaaagcgcagcgattaaatccgaaaaggacgacgccattcagcgccgccactatttgcagatgcagctcgactactggcgcgggaaatacgaacgcttcaccatggccgagatcccgaaggattcagcaatcggcagggagtcgacatcggcatcatcggcaaatatgcacggctctatctgaagacggtttttgaccgaatctatacggtcaagggttccacgaccgccgcgttccgcaagatgtggggactgcaggaggagtatgcccgcaaggagcgcacgaaccacgtccaccactgcatcgacgccatcacgatcgcctgtatcggccgccgggagtacgaccgctgggcgcaatacgtcgccgacgaggagcgatacggctacggcgaaagcggcaaaccccgcctcgagaaaccctggccgacctttaccgaagatgtcaaggcggcggccgacgaactgctcgttgcccaccacacgcccgacaacatggccaaacagacgcgcaggaagttacgggttcgcggccggataaagctgaatgccgacggggaaccaatctaccagcaaggagacacggctcgctgccggttgcatcaggataccttctacggcgctattaagcaggatggagagatccgctatgtcatccgcaaatcgctcgcgcagttgcagccgacggacatcgacaagattatcgacgatgcagtccgggatcgcgtacgggaggcaatcgacgaggtcggattcaagacggcgatgaatcccgatgaatacacgatctggatgaaccgtgaaaagggcattcccatccgcaaggtgcggatcttcacaccgagtgtcaaacatccgatcgcgctaaaaaaacagcgcgacctatctgcaaaagagtacaagcgggattatcatgtcgtaaatgaggggaattattgcacggtcatctatgagggccaggacaaaaagggcaaaacgaaacgcacctttgaactcgtcagcaacctcgaagctgcccaatatttcaaagccagcgctgaccgggaagcccgccccgatctggtaccgcagaccgacacgaacggtttccccttgaaatgcatcttaaaaacggggaccatggtcctgttttatgaaaataccccggcagaactttatgaatgtacccgcaaggagttggtaaaacgactctacaaggtaacagcaatggctgcagaaggacgggtacagttcctctttcatcaggaggcccgagatcagaaaacacttacctccttatatggagctgggacctctcaattctgccaatccaatccatcaccgaaattgcgcctcagcgtttccaattttaacatgttggtggaaggttatgatttcgaactgaccgtaacgggcgagataaaattcaaagatgaccggccatgctgaaacgaaccttgtttttttcgacaccctactgtttgagcctgcgcaacggccaaatgatcatccacacgcgcgaggcccccgaccaacggaaaagcatcccgatcgaggatatcggcttcgtggtgctggaggaccagcagacctccatcacgctgccgctcttgaatgcgctgtcggacaacaacgtggcattatcctgtgcggagagaaccgaatgccgaacgccatgttgacgaatttggattcaaacagaacgcaaggtgaacattatcggatgcagatcgctgcatccgaaccgctgaagaagggcctttggaaacagatcgtcgagaccaaaatccgcaaccag

SEQ ID NO: 2042 - DNA, 8312 bp, synthetic construct
  source 1..8312: mol_type = other DNA
  misc_feature 1..8312: note = Synthetic
gctagcttcgtgcccagctccgtggccagcagcggcgtcaagatgctcccgatgccgaagcctgaaagtgacgcaattccaccggcagcgaaagccgcaactacaacgagaatgtcgaacatcatcctcaacgtctgggacctggagactgagcgtcatccttctgccaagatttcctcgaacagttcccgcacctttgctttggcggcctggagaacctgtcggccgaacggcgtgacccggtaaacccgacgcatccgcctgccgtcacgtttttccttcgaccggagataccccttgcgctccaggttgtgaagcatgggatagagcgtgccagggctgagtcggtagccgtgccgggcgagttcctccatgatgcccagtccgaaaatcccttcgtgtgcagcatgatggaggatgtggagtcgaatcagccccgaatacaactcgcgttcctgagcaatacggttcataagtaagtatcgccattcgttatcgaaagtcgactatagcagcgtacgcagattctgtcaagcctgatgacgtgtccctccgactggtacccggatgttttagggttggcttgagaaagcgcggcaaggacttccctcctatcgcgccttgcgttgccggggctccctcgccgggcgagcgttgacgaaggctgccgcggggcggtaacataaagattggggctcgtctgggaaaggacgctgtgtccctccttcgctcggggccccatcctgattcaagtgagaagtgaatatgaacgccaacgatctgcgtcccggcatggtcatccggcacaataatgacctctactcgattcacaaggccgagcaccgcacgcccggcaacctgcgtgcctttgtgcaggcccggatgcgcaacttgcgtaccggcgccctgatcgatcatcggttccgctcggaagataacgtcgagcgcgccatcctcgatgaaatcgaaatgcagttcttgtatgccgacgctgactccttctacttcatgaataccgagaactacgagcagatccacctctccaaggatgtggtgggcgaccacgcttggtatctggtgccggacgtcatgatcaaggtggaattctacgaaggccgtccggtgggcgtcgaattgccggccaccgtcgatctgaagattgtggagacggagccgggtctgaaaggcgggtctgccaccaacgttaccaaaccggcgaaagtcgagaccggactgatcgttcaggttcctcctttcatcaacgagggggaacggatcgccgtggataccgctaccggcacctacctccagagagcggagtcataggccgccgttgccgtctccatcgtatgcatgagagccctgcttggtgaggcggcgcggcagtattgctatgggggactgccggagagtgttctcggcagggtggttcagacaggtgcggcgtcccggtttagtgcctagttctgtgagttctctggatgggaaaggcgggttgaagccccgccgcaccggtggcgcctccctctcccccggcccctctcccgccgaggcgtgagagggtggccgaaggccgggggagggacctcgctacggcgggtctgaagacccgcccttccggttgaagacggatatgcagaattacgcggccaaagcgccagcccaataatcagaagggaatttcgtgctgggtctgtaactcgaggccctgcggagcgatcttgtaagtcgcttcgtagcgcgggggcttgcggcgatgcgccacctcgcggatgtattcatcttccttcaagaagcggaccaccacctgatcgccctcgacggtcatcttgccgtcataaacgtcatcgatctgccagagtgacttgagcatctggccatcatagctgtaaaggacggcggccaggcgcggatggctcttgccgagcttgaagccatagacaaagaagcggaagtcatcaatccccggtactttcacgaattcgtagcgtacgtcggcccgcggaatgaaattggtgacggctgccagatgcgtctttccctcgcgattctcgaacaaagccaccgtgttcacgcggtcgatatccgtccagcccaagctgtacccggcgccgatcaggagcgtgcccttccagggttccgcaaaggcagcgggcttgcagttgatcggatagcgaaccttgatgaagatattctccaactcgcggcgaacgtcaacgccggtgggcgtgcggtccgcgatccaggacttgagatggtccagcatcagattctgaatctcgaggctgcgcggaccggactcgtccaggtgcaggccgcgcagttgccaggagtagtagtccagcttgccgggcaagtcttccgggggcggctgtttttgcttcttcggcttcttcgcctccgccaggactgcgccgaaggttccgatgacgactaacagaacaagggcgaccgcgaaaccgcgcgcgatctgcgaccgggaacaaaagttggagagcatagcttcagaacccatcccgcacagaagaaatcagcgctccgaagagcggaggcactagcgcttgcgagtctgcgtgacgaccgtccgttgtagcggcggtcccgccatgcgggaccgccggctttgcctatcaacggcttcggccctcccgccacggcgggtacaagcacccgagcgccgctacagcgtaagaaacccgcctatcacacaggctccctgtatgagaaccaggccgaccggccaagggcctcgctccgataataaccgacttcgccgcgttcaaccaccctcttgttaggaatccgcctagttggcgccggagatttggaggtcgtagaggaagtctgggcgagcactgccgctccgatcgaggactgctccggttgacggctcaagttgggtttctcatctttcgcacggggcacactacccccggggtgattttcggggcgcggaaagtgtcgggcataatgcccgattatagctaggaaacgcccctgcacccgcccttaacccctcccgcacgcaaaaaagcgggttttttcctgccttcgagcccccaaattcgcccttctgacccctcttttcctgcccaaaccccccgaaaatcccccatttttggcccctttccgcgccccttttttcggacaaattgcccctgcccttcccgccgtgtggcgattttggatttgcgattccctgccgcggagggaccctcaaaaatgaaagcgcagtggggctcatcgccacgcacggcgcttaaggtcgctattgctagcgtagcctacgggaacgaagattcctgtctgaaaagtagaagccccgcgcggggcggggcaagagggttaaacctcacggcgcgaaagcgcagcttactaagataagccgggcaatcgcttctgagatacactaagcgtataataaccacatttaacgccttgtcaaggggggaaatatggacgaccaactggcaggggactttgttctcggaatcgatttgggatccaattcggtcggctgggcactcctccggcttgcgaatggcaagccgtgcggaatcattcgccaaggttcccgcgtttttgatgccgcatacgagaactacatgcaaggtgagaaggagcacacctcgaatgtgaaccgccgtgacgcgctacaccgccgccgccagagcaagcgtaaacgacggcgcattgtgaaggtctttcatatcttgcagcggtttggtttgttgcctccgaccgacgatgtgccagaaccttttcggaagtcggctacttgggtagagtctagtgactgcaatcaccgtgagcgccggggcgatatccgccaggactatttcaattggctcgacaagacgatacgttcttcgccttggttcgttgaccggtgccgttcgcgcacataccccgaaccggatcagacgctcccatacatcctccgcgccgccgcgtgcgacgaacccctggaaccatactttgtcggacgggccctctaccacctggcgcagcgccgtggtttcctgagcaaccgcgtgaggccagtcaaagaggatgaagaagaaggtgttgtcgcgtccgagatttcagagctaaaggaaagaatgcgtgcggagaacaccgaaacgctcggccatttttttgctggtcgttcacccgccggccagccattggaagtgaatcaacgaatccgcaggaatcgcaccgagcggagaatgtacaaggacgaattcccccgaatctggcaggagcaagagggacaccatgccgacttgttaactgaagagtgcaagaagcaactgcaccgcgcgatcttctaccaacggggtactcgccagcgtgcctccgccatcgggtggtgtgaactcgagccgggccgccgtcgcgccagagcccatctgctgatttcgcagagatatcgactccttcaaaaggtcaacgatctgagaatctcgcgctccggagagccgcaaagagacttgacgcgggaagagcgcggtgcgttgatctacgaactcgaacgcagaggcgacctgaagtttagtgaggttcgggacattttgagtctaaagaaatcgcatcgcttcaacctccaaagtgggggcgaatcgaaaatgcctggcaaccgcacggcctcccagctttacaaggtcttcggagacgagtggctcagcttttccgatgaactgaggcaaaagatcgtcggcgatgtgcacagcatcttgagtgtccgcgatgaagacgaccgcaagcgccgcgctacgctctatctaaggaagtatggacgtgaatcggcggcagaagacatggccaagtcaactttggaggggggccacctgggactgagcggcgccgcaatgtacaaactgatgcccttcttggagaggggggtatcctacggccacatcgcccctgactaccgctgtctctctgacgagattgctcgccagcttcttgacaagctagaccaaggtctctcgtatcaggaagcgcgcaagggattgctgcccgacattgccccaacaacagaaccgcttcctatgctaccgccggcccgcgacgtggttcgtagcctcttgaatcctgtggtcatgcgggtccttacggagatgcgcaaagtcgttaacgccgtgatcagacggttcggggggaaaccgttgcggatatacatcgagttggcccgcgatttgaacaagtcgaaggagcagcgggaaacgatggccgtagagatgcgggccaacgaggccgcacgcagaaaagccagaggccttatcgaggagcttacaggagacccttacccctctagggaggacatccgtaaagtccagctttttgacgcccaatccaacgggctctgcccctactgtctccatcacatgggggaacggagcttcttgggttctggaaccgaagtggaccacatcattccgcgtaactgccttttagacgattcattcctcaatgtggtgctctgtcacaccgagtgcaatggggcaaaaggcgatcaaactcctttccaagccttcagtgggaaaccagatctctacgcgcagatgctgaaagccgtcagcaaattcagcggcaagaaggggatcatcgaagaaaaacttcggcggttcaaaatggatggcgaagagcttgaaaagttcgtggccgattttagcagtcgccagctaaatgacacccggtatgcttcccgcgccgctgcagagtacctcgggctcctctatggcggcaaggtgggctccgacggcaaacagcacgtctttacgactacaggtaagtacacctcgctacttcggaacatctggaacctgaactcaatccttaaagatggggaaaccaatcacggtggatgggaagagaaaaaacgcgcagattatcgccaccacgcgattgatgcgttggtaatcgctcttacaaccaagcgtcgcattgatgagctcatggaggccgtccggcgcgctcaaaacgaagggaagcggcgtcccaggctcgacgatccctggccgggattcctactggaggtccgccagcgagtgaacgacatcgttgtatcccaccgcgtctcaacaaaggtcagtggcgcactacaccaagagaacttctattgggcccgtggggagggccgccagccggggctgtccataggcgagcgacgtatccgtaaacccgttgatcgaagcatgacgcgcgaacgggccgagaggattgtggacgccggtgtccgcaaagccatcctggagaaactggacgagcacggtggggacgcaaagaagttctccgatcccaaaaacctgccctccttgggcctccggggggagctgcgcactccgattaaaagcgcccgaatcgcggacacgatcaagacgtttaccttcggcgagggcgacaacgcgcgcgcggtgaagccggcgcggaatcatcacctggagatttacgctgagaccgactctcatgggaatgaaaagaggtggaaggctaagtgcgtaacgatgatcgaggcctaccgccgacttcgagcgcacgagcctgtcgtccagcaggaacatggtagcggaaccaagttcaaatttacaatagccccgacggaagtcctgcgttgcgacggggagcaggacggtaaggcactcagggggctattcgtagtgaagtcagtaagccaggaggaaaaggctcgctcgatcaaaattgaaatggtcagcgttagcgacgcgcgtcctcagcccgaaatcaagaaggcccacgcccggataacgaagtcgcccaacgaactgtttaagtggggggctaagaaggtggtcgtcagtccgctgggagaggtttccgaagcccatggctgagcgtatcctcgatctttcggaacgccccgctcacctgagcgtgcggaatgagctgctggtgatccggtttgggcctgtagcggcggtctatgaccgccggacgactggcgatggagaagtcgccccaacggaagccgccgaggccgcgccacccgaaacgcatacggtccccctggctgatattgccgtagtcatcgcttcgcacccgcagatctcctacacgcacgcggtgctttccgggctggccgccgccggtggaatgtttgtagtctgtgaccagaagcacctgcccgctgccatgctcttgccgctggtgacgcactcgacccagaccgaacgcttcgcggcgcaggcgaagctccctctgcccacctcgaagcgcctgtggcagcagattgtgcaggccaagctccgggcgcaggcccgtctcctcgaagaaaggacgggcaaggattggggcttgggtgcgctggctggccgagtgcgctccggcgatcccgaaaacatggagggccaagccgcccgtatctactggcgggccttgtttgcagatgaggatttccgccgagatccagagggggagggaataaactcgtgcctgaattacggctacgcggtgctgcgcgcggcggtggcgcgcgccatctgcgggacgggactgcatccctcgctcggtatccatcaccacaaccgctatgacgccttctgcctcgccgacgatttgatggagcccttccgcccggtggtggactgcgtggtggccaggcttcgggacctgcgcgggaacgacatcccgctcgataaggaagcgaagcgcgccctgctggaggcgctgctgggccggttcacggcggataacgaatcccgcaccttgtttgattgggtcagccggacggcctgttcgctgtccgccgttatcgaaggcagcgcggagaaactggaaattccgcgcctgtagcacgggcatcttgcccgtggtcaatcactgtcgcggcctgatccctgacccctgtaacctgtacttccatgcctcgacacgaacttgcactctcaggataccgggctatgtggctctttgcgatgttcgaccttcccgtcgataaacccgagttgcgccgcgagtacgcgcaattccgtcataagctgctgcggcagggcttcaccatgattcaatactccgtgtatgtccactacgtgcggagtgaggagtccgaggaggtctttcgcaaacgggtccatgcggtgctgcccagccacggccaggtgcggctcgtctccattaccgaccggcagtttgaaaagatggaagtttatgtgggaaaaaagcgggaacgagtcgaggacccgccgcaccaacttatgcttttttgattctcaaaaggggagtatccccccggaaatcaggcgattccggggggaagagtgtacctcagaagcgattcccggcaaaccatagcaggaggtgatatc

SEQ ID NO: 2043 - DNA, 6143 bp, synthetic construct
  source 1..6143: mol_type = other DNA
  misc_feature 1..6143: note = Synthetic
aatagctgcgcaattttgcgggggccccagtctccggcatgcttgtgtatctcgtgcctccggcacgttcccgttattgcgcctctcctgaggcgtcaattatgcggctgaaagccgcagccaaattgggcgctacagcgagcgcccctaccacctgaaggtcgccaactaagaactacgaactcataaaccggccgcaagccattccaactacgcatcagcatctcccaaccgcaacacgaatcaaaacaatacaacatttcactctatatactccaaagaactataggggaatgaatcccttcataaactattattgaggacagctctgggacaatattgcaataatgcgcaataccactggtagtcttctatccgaggattagttattgaacttatttatttcttcattgccaccctcatcctcgtgtaacttaagcgtgggacttcaggaatttcaaggatagtaggcaatctattgggtgataacttaggagaatatccattttgtagcgtggcaatggccagatcaatcttatcatcatgacgtgaaaatgcgagttcatacaattgataaaaaatatggataatttaaaaaagcacccaatgatcggaatctttgggtgcagttgatggaaatccttattaacagcttgacaccaaacaagtttgtttaaatatggtttccagagacaagataatcgaaagctgtctggaggtcaagaaaaatgttaaagaaacattacagacttggtatcgacatgggctcaagctctatcggatgggcaattattcttcttgatgaagataatgagccttgtggtgttgaaaaaatgggtgtacgaatatttcccgatggccgtgaagataaaacgccgactcctctgagtgttaaacgaagaggtttcaggggtgcccggcgaaatcacgacaggtttttgcagcgtatgcgcaatttactcgatgtgctggataagcacggtttattgccaaaagatcaggaagaacggaaatctgtcttcgctcaggatccatatcggttaagagcgcttgctctggatcaaaagctggaaatatctgagtttgcacgtaccctgtttcatttggcaaaaagacggggtttcaagagtaatagaaaaactgatgacccggatgcaacaaccaaattcatgactgctatcgagaacttgcacgataaacttcagcaaggtaatgccaggaccatcggcgaatatctttacaaaaagcaaaccctatctcccaatgaacatacaaagggcgcgatcagatttcgctacgactcgaaattatataccgaagatgagctgatattccctcacagagatatggtgatcagcgagtttgagctcatctgggaagcgcaaagcaagtatcatcccgaactaatcaattcactgaaggaggagatatatcatgccatcttttaccagcgcccactaaagccaacagtcaagggcaaatgcatttttgagcccgaagagtttagggctccaaaagctcaccctctctttcaggaatttcggattctgcaagatgtaaacaacctgcttgtggaagaaatagcagaccaatcatatagaccgctcactgcggaggaacgcagtaagatcatagatgttttaatgaacagcaaggaaagcaagctcagctctcttcgaaacaagctttttggtaagaacaaagagtactataaattcaattatgagactaataatcgcgataagctattggggaatcagacaaattgtgcttttataaagaagaaagacagcccattgcccaaatattggaattcattgtcccatgagcaacaagagttcttggttgaattgctttgttctgatctggatgaacaagatttaagtgattctctgacaaaaatatgtgaatcttccgagattgttgaagcgctgctctatatgaaactccccacagatttctgtaatgtgagcataaaggcattgaagaagatagtgccgtttcttcgacagggttatatctattctgatgcctgctcacgagctggatataatcactccgaaaaatggaatggagtagtatatcataatgctgatttaccctattatggcgaattgctgaaacactctgttttgcctttagcaaggcccagctatgatctggacgcggatgtccatgggaagataaacaatcccactgttcacattgccttaaaccagatccgaaagataatcaacgcgctggaaaaagtatatgggcctccggcacagatcgtaattgaattagctcgagaactaaagatgaacaaaacagataaagaagaattcgataaaagacagcgcaatcaggccacagcaaacgaaagaatagctaaagagttaaagcatttcaaaatagataataactatgagaaccgtaccagatttaagctatgggaagaactctccaatgatcctttggaaaggagatgcgtatataccggtagaattatccccatagaaaagctttttagccctgaatttgagatagagcatattctgcccaagtctcgcacgttcgatgatagcattccaaataagactatcagctattatgcggcaaatcgctataagggagaacacagtccctatgaggcttttggccaaagcaacgataattacgattgggaagcgatagtaaatagagcctccacgctcccggagaacaaacgcagacgcttcttaaaagactcaatggagcgttattcggacgaaaaagaagttcttgcaagaatgctgaacgatacccgatatatgtcgagagtagccaaagagtatctgcaatatgtggtgggggagagaaatatctgggttgtaaacggacaacaaacaagtatgcttagagggaaatggggtttgaaccggatactgaacgaagacggctctgggaccaaaaatcgcgctgatcatcggcatcatgccatagatgcatttgtgatcgggatgatgggccactccaccgtgaatcggctaagtactgcagtaaaacaaagccgcgacaggtatctggaaaaaatggcagatccataccccggttttgatcacaaggatttggagcgaaaagtacataacataatggtctcttacaaaccggatcagatcaatccggtaaagctacgcaaaagaaaccaaacagcaggaccactcttgaaagataccgcctatggatttgtggggccaaatcccaaaaacccccaaatgtatctatattcggaacgagtagctgtaaccgagataaaattgagcgatatagagaggataatcgatcccgttatcaaagaactcctaaaaaaacaaatcgcatccatatcagatgccaaacttctcaaaacaagcttagctgattggtcaaaaaaaaccggtataaagaaagtgaaaatgctgtttaatgcgaatccggataccatgattcatgtttacgataaatcgggcaagatatataaatgctatgccagtggagagaatctttttacggatatatactgcattaagccttgggataagagtggaaaatggtccatggagatagtgaccagttacaatgctcaccaattggacttcactcccaaatggaaacaggaataccccatggcaaagcttatcatgagactgtttaagaacgatgtggtttgtgtggacagcgaacagggcaggcagtatcgcagggtaaagaagatgagtcccggaagagtatatttacgtgatctaaacattgcaaaacgagataaagaagaaagagatgatggtgaaagcttctcagtaagcagacttcaaacactaaatgccagaaaagccgggatagatgcgatcggaagagcatttgatccatatgtgggggataccaatgcaagtactggagatcaatcgtagcggaatattactaagcttatataagggttttatacgagtctcaggagatgattttgtccaagatcaccccttggatttagtggattgtgtgatcttgaacagctatggcgcaaaagtctctaatcagcttatgattaagctgtgcgagataaacattcccatgctggtttgtggtaaaaacgccataccaatcggcattctaaatggagtggctcagaatgtaaacagaaaaagcagggttgaagcgcaactgggcacaagccaggcttttctgaaccgccaatggcaggctattgtgaaggctaagattcacaatcagatgcttctgctgaaatatatcgatgccccgtataaggatctgaaatggcttagggatatggttagtagcggtgacaaagaaaatcgtgaagcacaggcagcacgaatctattgggccagattgtttggctccgcttttcgcagaaacccagatgtggaaggtatcaacgcatacttgaactatgcttattcaattttaagagccggattctgcagatatatcgtagccaaaggtcttcttcctgagattgggatacatcacagaaatcatatgaatcctttctgcctggcagacgacctgatggaaccattccgtcctttcgccgataaagttgtctacgaactaaaccagaggggcttagccgatctgagtcccgcagataaaaaaactattatttctacactggacagtatgatctcttacgatgggaaaatccatcacattcaacaatgtatagcaatatatgtccaatatatggtgaactcctatgagcaaaagaaaaacaccctcaatttcccaatcttgccccctcaatggttacagactgatgtggatgatggtgatgtttgatctaccggttgtaaccgcgaatcaaaggaggattgccacaaaattccgtaatgagctagcaaaagaaggcttctctatgtgtcaattttctgtttatgccagattttgtggtcccagagaacgtacagacagaatttaccgtaaaatcgagaatctgattcctgaatccggtaaagtggacatcatagtttttaccgataagcaatttggccaaattgtcagaatcgaaaaccaaaaaaaaagaaaatcgagagaaaatccggatcaaatactcatctttgatgaagaagatttccaatctgaaaacagctgagacgccataagtttaatcaatctaaggccttatggcgcctctataaaatctaatagctgtttggtgtcaagctgcaacggtgctggcgctgccactcctcgtccacgaataaaatctaatagctgtttggtgtcaagctgcaacgcattagtggggatagattcaagaatcttaaataaaatctaatagctgtttggtgtcaagctgcaacggagatgttgatatcattgggggcagatggaataaaatctaatagctgtttggtgtcaagctgcaactagccgatcaagagggatatcgttgtttctataaaatctaatagctgtttggtgtcaagctgcaacgggatcgatcatctagacaaggctcgtgaaataaaatctaatagctgtttggtgtcaagctgcaactgcgtcagaccactccagcacataggctgggataaaatctaatagctgtttggtgtcaagctgcaacatagtgttaagctttgaacatacaatttatataaaatctaatagctgtttggtgtcaagctgcaacctgcataactgtattggcgaccatgacggaataaaatctaatagctgtttggtgtcaagctgcaaccaaaccatgcttcccctaaatacccggctgataaaatctaatagctgtttggtgtcaagctgcaacagcagattaacaatgttaccgatttcattggataaaatctaatagctgtttggtgtcaagctgcaacgatattcatccagttcagcgtcatactgtcataaaatctaatagctgtttggtgtcaagctgcaacggattctctgagtgccgttcattattagggtataaaatctaatagctgtttggtgtcaagctgcaacagacgcagatcttgccgccgcagcattcgaataaaatctaatagctgtttggtgtcaagctgcaaccaacgttcacaccgttattcgcgttaccgcataaaatctaatagctgtttggtgtcaagctgcaacgggacatacatatagtcgcacatata

SEQ ID NO: 2044 - DNA, 23042 bp, synthetic construct
  source 1..23042: mol_type = other DNA
  misc_feature 1..23042: note = Synthetic
cagggatgccccttaccggaactccaacctatgataaaggtgttgtatatataggagatcaggggggagcagtctacgctcttaatgccgaaacaggcgaactgatatggcagtatgatgctggaacttccattaatggcgccgccgctatgaatgaaaaaactatttttgtagggggaacagatggacgtgtctttgccattgaaagatcttcaggcaatttgctctggcaaactcttctcggcctggacctggctcccggcgctatatggggctctcccatatatggagcagaacgtctttttgctggcagcgcagacggcagaatctatgcttttgacccagaaacaggagtggttctctggactttcgacactgggcgggagcttcgctctacccctctctatcatgaggggctgatctttgtaggagatcatataggccgttttcacgccctggatcccaaaacgggcaatagacagtggggtggcggttctggcggtcccatcgatacggctacaaccacatggaagggattcatctattttggaagctgggacggattgctctcctgtgtaaagataaaaggcattatcccccaatggaaatataacgccaagtcggctattaccacttccgcaactccagaagatggccggctgttctttggcacacagaaaggaattctccacgctgtggacgctattaccggccagatgctctggacctatgaaaccgaaggagccatgcaagcgacccctatagccttcaataacattgtctatataggaacagctaccggcaaagtagcggccatctctgcaatagacggaaatatgatctgggaatatcagacaaacagagagatcctggcatctccagcactgggagacggcagagtgttctttggcagcatggatgggaaagtttacgctttttccacagaataaaaacaaaaaattaagggccggtacaaagccggccctttttctttatcttgttatttacagccttttagcgtctcttgccaaggcatccgcacggtccgttctctcccattgaggaagggggtcaaggtcaatacgccccatgtgcccataggcagcgagacggcgatactgtggtttcctcaaatcgaggtctcgaatgatagcagcaggcctgaaatcgaaatgccgttcaataagatctgtaagggcctcgtctgaaatcttgccggttccaaaggtatccaccataagagaaacaggttcggccactccaatagcataggcgatctggatcatacatttttcggctaaccctgcagcgactatattcttagccgcgtaacgggtcatatatgcaccggagcggtctactttagtggggtctttgcctgaaaaagcacccccgccgtgagacacccagccaccgtatgtatcaacaataatctttcggccggtgagccctgtgtcagccatagggcctcccttgacaaaccgtcccgtagggttgacaagaattgtcgtatcaggcctcaaaaggtgttctggcaccacgggctttataacgtgctctatgatatcaccacgaatctgagcttctgtcgctcctggatgatgctgagcagacacaacaaggttttctgccctaattgcctgaccgtctacatactcaagagacacctgggtctttccatcggggcgaagatagggaatggtcccatttttacgaaccagggccaaacgccgtgccaaccggtgggccaatgcgataggcataggcaaatattcctcagtttcggtacaagcatacccaatcatcatgccttggtcacccgcaccgaccttagccacttcagcctctcccatttctgtatgggatcgaacttcaagggccgtatcaacaccctgggcaatatcagaagactgttcatctatggctgtaagaaccgcacacgtatcaccgtcgaaaccatatttcgctctggtgtaccctatctcttttacaatatctctcgccaatttgggaatatccacgtatgtggatgtactaatctctcccgccaccataaccatgcctgtggtcacaagagtttcacacgccactcgccccatggggtcatctgccagaatcgcatcgagaactccatcagagatctggtctgcaattttgtcagggtgtccttctgttacggactcagacgtaatcaaaaactttctgtctgccatttagcaacctccaattcaacagatatagataaaaaaagaaccctttccaagaggaagggctcttttcacacgcaaaaagtcacacattcctctcttatcatccagccataaggctgcaggtattggcaccatgccttgctgctattggcaggttgccgggcttcatcgggccagtccctccacctctcaggataagagatacatttgtaaagtttcaaaacaccagctttagaattatagaggaaattcaaaaagtgtcaactggcggatcaaaatctgttgtagacggccaagccatcttaacttataacctctttgcaaattcttcaataagctccttggtaggagctttcatattctgagcagaaacatttattataagcttataaagatcaacggaactcgcttctgctactcccttaaacaagggaagaaaacttgagtgacatccagaaagaccaagtatcaattgctccggtggattaggattgtgatagcaatgttggagatcttgcgcaaggtctttatctataaaggacaaaagcgaaaagagatcatattccacactctctccagaacgaagcagggcagcaataaaaacctctgtcggaatattccctacgctgcgggccatccccattactccacaatcaatagaagtagcaccggcctgtaatgccgcaagtccatttgctaccgcaagtcccagattattatggccatgaaatccaatgggaattgaaactttctttatcatagcctcaacatactttttaacttcatcaggaagcatatagccggcagaatccattatagttacagcctgagcaccatatctttcaagagaacgtgcttcctcagccagttcatctggagggagaatgtagcctttcataaggcttgtacgtacttttattccacaccctcttatttctttaattaaatccttagcttttgcagaatccccagcatttatacctacgcgaagaaatcccaaccctttctgagcagctagtttaatctcacttatagtggcatgtttcggttggcaaaacattcctacctctgcctgtgaaaaataaggagagccaatctccagatactcctcatcagacaaaggcgcattttttacaccggctttgttccctcctaatccactaggatgcccgtattctataacttttatattgctatcaatgagacctttcattattttttcagtaagctcttttgggaagcctgcacctactacgttgccgccatcccgtagagtacagtcaagcagttccaccatatacgccatcactccttatcagtcgctccagtcgttcgtcaattgtcttccttttctgaagtctctcagcaacgggaaaacaacagaaatgattattaacactataatgaaaaaactgatcggtctaaaaagaacagggacaaggctcccatgaaaaagggtaagggtacgcctaaactcagcttccaccatagggccaagaataagggccagaactatgggggtaggtgaaaagttaaacctttccataaaataaccaaggactccgaatccaaaaagcagccagacatcaaggaaattatttcttatcgaatatgatcctataacgctcaaaacacaaattataggtgccaatactttagtaggagttttgactattttcacaaactgcttggcaaatgcaaatcctattaccgcaaacattatatttgcgacaaatagagagaccagaagagtgtacgttatttctccatattttgtgaaaaggtttgggcccggtatcaaaccctggatagtgagaccccctataaaaacagccgttaccgcgttacctgggatacccaatgtgagggcagggacaagagatcctcctgttacagcattgttagcggcttctggggccgctacaccttcgatgtttccttttccaaaagactccgggtttttagaagctcttttagcttcgttatagctaagaaatgctgctatgcttgttcctgctccaggcattattcccactatcacaccaatgacagaagatcgcaacatggtcttccacgtacgtctgatatcttctttttctggaatgatacggtccgaaaatttcagactctctgggttaacaattatagaagtcctatcatttacagatatctttattgcctgagaaagggagaaaaggcctataagggccggtagaataggtattccatcgagcaaagaatcgttgttgaaaataaaacgggggaaaccagtaaaattatccattcctgtggttgcaattagcaagccaaaaaaccctattaaaagtcctttcaggtaaccccctgtggagatactaatgatcactgacaaaccaaataagcctacaagaaaatattccgacggtccgaatttcaaagccatttttgcaagaaaaggagcaatacaaagaagagccatagcgctaataataccgccaactaaagaagccgttgttgaaataccgatagccttccccgctagcccctgctgcgtcaatgggaaaccgtcaaaggtagtcgctatggatgcatctgttccaggcgtacgaataagtatagctgtcaaagaaccaccataaactgagctgcaatagactgctccaagaagcatcaatcccacttttggatccatgccaaaggttagcgggatggccagagcaactcccattgttgatgaaagaccaggaagagctcctataataagacccgcaatcgttcccacaaaaagaataaaaatagatgccggttcaaaaacgtgtcccaaagctgggataaaatattccatcatcgtcattcaaccttccttaaaaaaagattcctttaggtataggaatgttgagcagggtttcgaaaaagaaatagataaccactgtagtccctactgaaacgagagtcgtgacaagccatgacgcggcacgcattaaaaacatgaacaagaacaaaaaaaggattgtcgaggaatagaacccgagtatttcgatagatgctatataagcaaagataataccccccacaaaaaagactcttgaaagcggttcttctgtctgtacaacattttcttcagaagatttttcttttctgatcgatcgtactcccagaagaaaagataggattattagtgccacactataaataataggcatcatttttgtttgagcaggataactccaagctcttaccaaggctgcaattccaacaaaaaacatcaagaaagagactccaaaatcagcttttttcaatccctgactctcccttcttaccagagatagaaaccgagggagttgaccccggaggaactactccctcggtgtgtttcttgagattctattctgacatcatggaataaacatgaatttattcctactttttaatccaaggggatgttttccaaagatcggaccagagcttatcttgctctatcaacagcgtcgtaaactcttccccaggaataaaatcgataggcatatttaagtttttaagttcgctctgatattctggcgtagccactatttttttcattgcttctaccagaatatcaagtgcttctgcaggaatgtctttgggtgcagcgaaaccccgcgacgctgttccttgcattacggtagggtatccaagttctgagaaggtaggaacatctggcaattctgcagaacgcttcgtatcctgtacagctaatgcatgtagctgtccaccctttaccatttcagccacttctgaaacattcacagcaataacatcgatatggccaccgagaagagcagctttggcaggagcatccccctcgtaaagaacaggattgagatctacgccagcctgtttcatgaactctgcaacaccaagatggtcccctgcgccaaaaccttcgtgggaaatggacaactttcccgggttagcttttgcttcttttacaagatcttctaacgtcttaatcgagctatctggtctcacgcagaagatgccggggtcagttacaacattagcaatgccaacaaaatcggtaattctataacgcactacatcaggttgaacaataggatttacgataactccgctaagattgatcagccctattgtgtagccatcaggattagcttttgcaatggaagtaaatcctacacttccaccagcacctggtttattgacgactacaaaaggctgcttgagttcagcctcaagatacttggctgtaatccgtgcaagaatatccgtacttccgccagccgcatatgcaactatcatgttgactggtttcgtgggatatgcagcaaaggccgttccagaaaaaacgaccaggaatatcagaacaacgacaacaagaatcttcttcataaagaccactctccttttgaaagcaacttcttgaccaggatacatactggagacgttcattctgcgcatattaattcactgcatggatttcttccaaatattcgatgaaacgcttcaccccctcacaaatatcttcttttgaacaggaataagaaatacgtacaaaaccaggagacaaaaatgcggttcccggtaccatagctacatttttacgttctagaagtccttcacaaaaagcaacgtcattttctaaataaataccattctctcttttcagacatgaagaaatatctacaaaaacataaaaggctccctgaggtttcacaaaattgatgtattcaatctgtgatagcaaatctacaataagatttcttcgttcaaaaaaacctttacgcatggtttcgcagtattcttgcgacttaaccagcgcccctacagaggcccattgggaaatggtgctcgttcccgaagtaagatgaccctgaaagtctgagatcgcttttatgagctttccaggaccaagggcatagcctatcctccatcccgtcattgcaaaggctttgctaacgccattgacattcagcacccaatttcttgcttcagggcaaaccttcaatatctgggggcattcttcttgatcaaagacaagccgttcatagatctcatcattaataatcatgatgccctttttacaagctagttcagccaaccctctcaaacactcttctgggtagatagcccctgttggattgttaggggaatttatgatcattgccaccgtcctgggggttatagccttttctgtcctctcaatatctggaatgaaattcgtatctgacgtttccacttccaccgggacaccttcaaaaagcctgatttgctctacatagctcacccatgccggcggaaaaactattacttcatcacctgggttgacaagagcacccagcgcttcataaattaactgcttagcaccggttcctacaacaatttcacgcgatggatcatagatcagccccatatgatcgcgataatactcccctactgcttcgcgaagagaggctattccacttgtcggaggataatgtgtttgtccttcatccatagccttccgcgcagctatcactgcttctgacggtgaatcgtaatcgggttctccggttgtaaaagaaattaccttaaatccatggcttcttttttcacgggcttttgctgccattaaagatgtagctgaaggtttcatacgggcaattctgtcacttattctcataatctttcccccatactttctccagagttttcttgatagaatgcgttccaattcaatgctatttcgctgaatttccccacccgctcacgcgcgtgctcccaatcttccatagcaacagatgttgcaagagcattaagaacagccataaccgcgacattcgagttgaaaaaactcatgctttcatattcaacttgcaatacaatatccgccaatattcccgtaggagaaatctcgctatctgttatcgctatgattttgcaaccggttttttcagcttcttgtgccgcatgaactgtaaaacgactgtaacgtggcaaacatataggaaggagaacgtcctttgaggatattctggaaaaacagtcaaaatactccgttgtttcatgagaaatcaacgtcacacgatctcgaatctgtttcataacaccgctaaaatacattgctgaagggtactgagtccccaagccaacaacaaatacctcatttgccttcgatagcaaagttacggcatcgttaaacaaagtgtcgggaattcttgagagagtttttttaacattttcaatatcgttgcgcacggaatcgcgaaatgtgaaattaccgtctttggtgacagctctttccatacgttcagtagggagtattctccgccgcaaatgttgctggatctccttttgcatctcaggaaatccagaatatcccatatccactgacgcacgggaaatagaggatgtgcttatgcctattttttctgcgagatcgccaattgcgagaaaagcagcaacatctggataatcaaggataaatcgaatcaacttttcttgagttcccttacttttgggataggccattttaatacgtttcatgttccctcccacctctctttgaaaatatattaccatatttctattggaatataaaaataaatttttatctttttgaaaaggctgaccattaggatcattttttatgttgacttttgctttcattaagagggttactaacgcaatcattttctagggttcactaaggtatacttatatgtgaaaaagaccaacaacatggagaaaaaacatgagaatattcaggagaaagaaaaaaataggactagcccttgggggaggcgctgttcttggcgctgctcatatcggggtattaaaagcaatcgaagagtttaacatccccatcagctatatcgctggaacaagcattggagcaatcatctctgccttttacgcctttggcaaaaactgggaagaaatggcaattcttctgaaagggttgaactggctggacatttcaagaatctctctatcgcaattcgggctgctctcaaataaaaaactcggcaaactcataacagacaatctcggagatgtttcctttgacgaagcctgtatccccctcgcgatgatagcaacggatattacaagcggtgaaaaagtggtgcttaaaagtggaaatgtggcggctgccgtaatggcaagctcgtgcatcccaggtatttttattcctgtggagatagacaatcgactcctcgtcgacggcgaacttgtggaaaatgtccccataacaccccttaaggatatgggagctaacttcatcatcagcgttgatctctttggcaaattaaagcaaaaaaaaccagagaatattatagaagtgctattcaaatccttccacatcgcgctggaaaccgctacaaaacttcagacagaggaaagcgatattcttatcaggccagacctttcccctttcaacactttcgatataagcaaagctgagaatataatcgaaatagggtatatggaagcaaaaagaatgttgggggaaaataaaattgtgggttagaagtccttatttttggataaaaactgccactgcataaattgcaaaaggaaatcccctgtttatttttgcttatttaaaaaaatatttctaaatttgaacatacaatattattagtgtatattaatattaaataaaaaacgcccccacagggagggcgtgaggtcgtttatttccaaaatgaaataaacggagccttacggacgaaagtccttactgtaaacagtctgacaatccccgcttagatacacttgtttaattaaacgctataagtcaacttttgtcaatttatgaaggagggagaaccttgtctaaacaatcagaaaccattttaggtttagatgtaggaacaaattctatcggctgggctctcttggaagttagaggagaacagcttctctctataaagaattgtggtgttcgtatttttccggagggaattacaagagataacaagggaaaagaaactcctcttaaccaagaaagacgccttgcaagaagcatgagaagacaaacacaaagaaaaactgggcgtatgcggcacctcttattaacattacaaaaaaacaatctccttcctcttggcgaacttcacgacttagaaagccctcttgctattttaatgaaagaagacccttatatcctacgcaaaaaagcactgtatgaatcgatagaacttcatctctttgggagggccctctatcacctggcacaacgtcgaggttttctttcaaatcgcaaaagtatttcccaaggtgaagccaaagaaaaaagcgttatgaaagtcagtttttctcaaacaagaaaagctatggaagaaatgcacgctttaacttatggggaatttttagcaaatttaaattctcatgagcaacgcaggcgggggcaatatattctaagacaatggatagaagatgagtatgaaaaaatttggtgtcgccaaagcgtgtattatcctgagattctgacgccagaacttaaagaaagtattaaaaaaattattttctatcaacgtccgcttaaactcgttaatcatctcattgggaattgccagcttgagccacaccgaaaaagagcacctatggcctttcctgcagcacagtattttcgcatgttacaaatgataaatgacacacaaatacaatatgaagggcaaacacggaaactggctcaagaagagcgctctaagcttatagaaaaactccttcaaaaaaacttaaagtttaatgatgctcgtaaagttctcaaattgcccaaaagcagttcttttaacatggaaaatggatctagaaaagattttcttggggtctccacaatacctaaatttataaaaatttttggcgataaatgggaagccttaacccccgaagacaaatcccaagtttttgaagactggtggagttatacgaatgaagaagcccttatcaaaaggatgcaagaaaaatggcaacttcccttagaaaaagcagaaaaatttgccaagctagaattagaaagtggatactctgcattttctagaaaagccttatctaaactaattccccttctcgaagaagggctctctttacaaacatctatcatcaaaatctacggagaaaagccttctcagattggtgttgataagcttttacctgctgaaaatgtcaggaatcctattgttcaacgttctctctctgaaatacgaaaagttgtaaatgacttaattaaaaaacatggaaaaccagaaatcattcgcatagaactcgcaagagatcttaaacgaaacatcgcacagcgacaagaaatttttaataaacaagaacaaagaagaaaacaaagagaaaaaatagctcacaaaataactcaagaaattgaaattcagtaccctttacgtcgagatatagaaaaagcattgctttatgatgaatgtaaaggtatttgcccatacactggcaaaagcatcagcttttgtgacctttttggtgctcatccactcttcgatgtggaacacattatcccttttagtcgttgtctcgataattctttcaacaataaaactctttgttttgtagatgagaatagaaatatcaaagagaatagcacgccttgggaaatttatggtcatgatcccgaaaactggcaagaaattattcagcgggtagaaaaatttggtaactttgagaagctaagacgttttaaattaaaagatgtatttaatggtggagacaactctgcttgggatgagttcgcaagtcaacagttaaatgacacaagatatataacccgttttgcgactcgctatttaagccaactttattattcagatagcaaattgcatgtacaaccaataagatcaggaagaatcaccgcttttcttcgaaatgcgtggggacttaacaatatattgggtgatggaataaaaaatagaaacgatcacagacatcatgtaatagacgcaatcacgataggactcacaacttcttccaccataaaagatctttccatggcttctaaaaggagctttcgttcgggaagcttcgattcagatagttttccgaaaccttgtaacgatttttttaatacagtaaagaagtccattgataaaattattgtttctcacagggtctctcacaagattaatgggcctctacataaagagaaaatgtatggtttcatagaatccgacacacatggggaaccggtaaaagctgtaatccgtaagcctatagaaactctttcaataaacgaagtagaaaaaatagtggatcctgtagtgaaaaaagccgtaaaagaaaaattacgagaatcttcctacaaagaaccaagcaatgcttttgcggtcaaagaaaaccatcctttgcttttttctaaaaatggcacacaaacacctattcataaagtaagagtgttccaaaatgataaacctaaaactattgggcgaaaacaaaacaagcgaaatgttttaacatcaaacaaccatcatcttgaactatatttatctaaaagccatagagggaaagaaacattccaaggaaaagttgtaactaacctcgagatgatgcaatctttggcaaaactaaaaaaacgtaattcacaacaatctctttatccatctcatgatgaaaatggaaatcctctcgccatggttctattcaagggagatatggtgaaagttacttggaataaaaaggatgttatatgtgtaattcaatcgatatcaaaaggagacatcgaaatgagactccacaacgacgcaagacccaataaggaaaggaaaaaagaacgcattcgatttcggtcatttccatctctctacgacgctaacattaaaaaaattcatatttcgccaacagggtttattcatgagtaatcatctaatagatattagcgaagcttccggttatttacacatacaaaatcatcagcttattattcaatttaaagacaaatctcctcctgcttctgtacctgtagaagatattacagccttagttgtgtcttctccagacacaatctatagccatcaactcctctcgtctttggcggaaagaggagtatctcttattatttgtggaaggaatcgtcttccaaatggaatatttttgccaatacaaggtcattcaatacaaacagaacgccttaaagcacaagctgaagcctctttacctttaaagaaacaactttggaaaaacattatacaggctaaaatacgaaaccaggcaaatctacttaaaaaattacgtggggatgatttcggactttcctatctctctaataaggtgcgatcaggagatcctgaaaacaaagaaggacaagcagctaaaatttattgggctaatctgtttaacaatccacactttaacagaggaaaggatgagcccccaccaaacaattatcttaactacggttatgctgtccttcgtgcaactgttgcaagagctatatgtgcatcgggacttcatccctcattaggcctacaccaccataaccgctataactctttttgccttgctgatgatatcatggagccattcagacctattgtagacgaagaaattgcacagttagtacataaaaacgaaattgaattatcgctgaacagcgcacataaaaaaaggcttctccaaaccttaacaaaacctttcatttacaaccaagagacaagaactctttttgatattgtctctcgcattacatcaaacctagcccaaattttccttaccggcaaaggctctattgctttccccaacgttatttcagaaagaaaatgacgagaaaaaaacaggaggtggcgaaactttcgccgtatagaagcatgtgggttatcgcaatgtttgatctacctgttgataccggagaaaatagaaaagcatatactaccttccgcaaaaaactccttaatgaaggatttatgatgctccaattttctgtttatgctcggttttgttccagtcatgattccgcctcaacttaccgcgccaggataaaaaaagttttaccaccaaacgggcaagtaagacttatttatcttacagatcatcaattcggacgaatggaagtttttaacgggaaaaaacgcacctctccagaaggaaaacccaaacaaataatgcttttttaaaagaacaaaagccagctaacccccattcgaacaagggttagctggctcacagtgtacctaagcggtgattatcagtcaattacagccgagattccttttcccaccggtaaattgatagtgtacctaagcggtgattatcagtcaattacagcaagttgacgatctactccatgcgtggcgatagtgtacctaagcggtgattatcagtcaattacagcgcagacggcacctttaaggacgatacctttagtgtacctaagcggtgattatcagtcaattacagcatcagtatctatacttgctttcgcggtgtaagtgtacctaagcggtgattatcagtcaattacagcagcggcaacgacgccaagagcttcaacagagtgtacctaagcggtgattatcagtcaattacagcataaactctatcaaagccttgtggcgcaaagtgtacctaagcggtgattatcagtcaattacagctataaataaaagtggccgcaagcctgcccgagtgtacctaagcggtgattatcagtcaattacagcgtttcagcggcgcggctcggggtatgcggcagtgtacctaagcggtgattatcagtcaattacagctttctttcgccacgtagccaccgttttattagtgtacctaagcggtgattatcagtcaattacagcattacctcggcgaggaccgctacgacgggcagtgtacctaagcggtgattatcagtcaattacagcttataggggggtggggaaatgaattatcttagtgtacctaagcggtgattatcagtcaattacagctaagttgttcaaatggataggcaaaagcccagtgtacctaagcggtgattatcagtcaattacagctttgtctccctcgccagctcaccttccctgagtgtacctaagcggtgattatcagtcaattacagcgatgaaagagcgaggctcgatccacggtacagtgtacctaagcggtgattatcagtcaattacagcgcacctgtacagagagatggcatggattacagtgtacctaagcggtgattatcagtcaattacagcgctacgagcgaaagccgatgaagaagaagcagtgtacctaagcggtgattatcagtcaattacagcgcaaagaagatgtgtaagactctggtcagcagtgtacctaagcggtgattatcagtcaattacagcttgatttaaccttcggagagaacggctataagtgtacctaagcggtgattatcagtcaattacagcggaagtgcattcgagaaagcttctgggtggagtgtacctaagcggtgattatcagtcaattacagcttttatggaatagggagcaaatctaaaaaaagtgtacctaagcggtgattatcagtcaattacagcataaactcaaggatggcacacacgttgcgaagtgtacctaagcggtgattatcagtcaattacagcgaaacatagtccgtggagttaggttttttaagtgtacctaagcggtgattatcagtcaattacagcttaaaaaagaccacttggtggctgataaacagtgtacctaagcggtgattatcagtcaattacagcgtcacttgctccacgttggcgtatacgctgagtgtacctaagcggtgattatcagtcaattacagcattgcccggattgccctctaattttttcatagtgtacctaagcggtgattatcagtcaattacagctgcaacagcgctgtgggagatttaaaatatagtgtacctaagcggtgattatcagtcaattacagccagacaaccctgtgtctattgagtctggcgagtgtacctaagcggtgattatcagtcaattacagcaggtttgcaaaaaacagaaaccaataaggtcaaaagagggaacagtattaattgaggacgccgcctctgcgtatggaacagtgattgtatcaaaaaaagtggcttatttggaactccaggaaagttggactttaaaattgactttgttgaagcttttaatggggttcaggttccccttcgggcgaccctttcacaaactgccaccgggagcgaaggggccgctatagtgggttttctctttgtttccgtgctttctggacttttcaggggagataacatctcgattaatcccggtactatttttaaggcctatgttgataaagatactataatttttaatgacgcgccagagctggctgaagaaataatagtaagcggagaaagtgatattgatgcccgtttattaaaaatgtatagagatttagagaaaaagtaaaatgacaaagcgggaatcataactatccaattgattcccgcttaacttcatccccctacttacacggcgagtagccgcagctgaagcagtaggcacaccctgagatcatttccatggggctgccgcattcagggcagcgcaggtcatgtttttctgttggcctctcttctttttctataagtttttctagcagcatggcaatagcgtctggaatagagcgggcaacgtgggtgtcgtcgtagtcgaatacccagtactcttttcctgataggcccttcagtgttgcaatgaagtcttcgagcttgccgccacttcgcaatccgatagagatagctcttgaaagggcttctgtcatggcgttgagctcagagccgctctttccgatggaggcaaagacctcaaaaggttcagtgccatcaaagttgagggttacgtacatgcttccccacggcgttttttgcttgatcgtttttccgaacaccacaagacccgggcgccgtttaaccttgcttgtgtggggaactccctcttcttttttcttcacctctatgggctgggcagatctggatccgtcacggtagatggtgattcccttggttcccagcttgtaacacatttcatacactttttgcacatcttcaacatctgcggaatagggcaagttcactgttttgctgatgccgctgtcgatatagcgtgaaaaaatgcctgtaacggcaacatgttcatctgtggatatgtcataggcagtgacataggttgggtcagagatacaacctgtctgcttcagttcctggtgcagctcttcgctgagcagcttgtggcagaattctcgcagctcatgcccttccccatcctttttaataatacgccgggtccatgtccaggcaaagttgggttcaattcccgagcttgtatccataagcattgaaattgagcctgtgggggcaatgctgagccggcggctatttcttatctgacctgattccagggctttcagaacatcttttacttttgcgagacgttcttcctcacttcccagactctcattgttcacaatgctttctatggcatttattaacgtgtagggaaccgtgtcgcttcccctcataagagcgacaaggagaattatgtcttcaatggctgcacttttaagccattcggcagtaaagagctctttctggcctgtttcatctctgaatttatggaagaggtctttcaccaggtggctttcatcaaagggagcttttcctataaccgaaactatttcttctgtggcgcacaaagcggctgccgccatgctttcaccaagagaggtgcagtattcgtcaaaacgttctccgccgtagcgcattcccaacaaaatggcggcatctgccagccccatgacacccaaccccacagggcgaatccttttcgttcgctcttcgatgcgaggcaggggatatgagcaggcgtcgatcacgaggtcaaggtaataaattgagcggtagacctgatccacaaagccgtctgtgtcaaaagcaggaaggccgcctttagaagtaacgaaggcttctacattaatagagcccaggttgcagctcgtgtaattcggcagcggctgctccccgcagggattggtggattctatgcgccactccggatcaagcttgagaaggttgtctgcattggcacggtcgatgaagaatacaccggggtcaccccgtttccaggcgctttcagaaagcttgttccaaaggtctttcgctttcacagtttttgccactgagccgttaatacgcgatattagtggaaaatcaccctcttcctcaacagccttaagcagggcatctgaaacacagactgagatattaaaatatgaaagtttgttttcttctattttcgcatctataaaatccataatatccggatgattatcaaagagcatccccatgagagcggcacggcgcttccccccctgtaccaccactgaccccatggtattccaggtttccataaaggagatggggccactggcctgtcccccggtccccccgtttatacccgcccctttttctctcagccatccgaaatttccaccaacaccaccaccgaatttactaataatgctagcatcttttacggagtcgaaaatgccttcgatgctatcaggaatatcaataacaaaacatgcgaaaagctgctgattttttgttttcgaggccagcagggtttcgtattcttcaaaggtcatgtgatctggagacttatagacaagggtcgacagcttgggatcagtagtcatacccgctccggccccaaaaaggcacggagagttaaaaagaaaccgcctgttgagaatatcgttaaaaatattcttctcaagggtttgaagccataaaagggattttgcatcgtttttatcgaggtagagggtttctgcactcgctataatacgagccacccggcgcgcaaattcttcaaaggaacgctcttgtcgtactcccccttcttcttcgtcgtaacggtggataaaataacgctgagcaagaagccatgtggcattttctgacaagcggggctccgcagggtgctcaagaatatccaggtcgatctcgtggttaaagcgctggttgaattcttttttcattactctcgacctctcttctttttattgccctatatatagggtttgttgaaaatcaaaacactatttataaatttaccacgccataggtttttggcatgagactgaaggctcaatcatattctggagcgttattcctcccagggtgtaacatgatatcattaatgctatatcaaaaaaagcaacagattctgcggaggtgaaagcagtggggaaatataatttcgatgcaattatcgatcggcatcatacctcgtgtgagaaatgggattttttaaaagataagtttggccgtgatgacctccttgccatgtgggtggctgatatggattttacagcccctccagaagtgatagaggtgctgaaagagcgggtggaccacggtattttcggctataccggcagaacggatagttatttcgattcaatagtccagtgggttggcaaaagacatggctggaaggtagaagctgactggatccgtcacgctcctggcgttgtgccggccctttctatgtctgttcttgcctttacccagcctggagacggcattctggttcagccccccgtataccctcctttttacagcgctgtaaatggacgggggcgccgaattgtagaaaaccctctggtatttcgtgacggccggtttgaaatggattttgacgatcttgagaaaaagatagattcttcggtaaagatgctctttctctgtaatcctcacaatcctgttgggcgggtatggacagaggaagaactcaaaagattaggcgaaatctgcgaacgtcacgacctctttattgtttcggacgagatccattcagacattatttttaacggatttcgccatgttcccatagcgtctctctcaccagaacttgccgcaagaaccattacctgtatcgcgcccagcaagaccttcaatattgcggggctatcaacatcagccattatcattcccaacaagaggattcgtgataattacaccgctgttctagattttcttcacatcgacggtgggaatatctttggaacttttgccctggaaacagcgtaccgcaaaggagagccgtggctagaggagcttatcgaatatcttgaaggcaacgtaaattttattgaagactatttgaaggaaaatattccttccataaagctggttcggccagaggctacctatgtccccttccttgattgccgaggccttggcctttcaaatgatgcccttttcgatctgctgatcaataaggcgcgggtagccatgaataatggcgcatggtttggaaaaggcggagagggctttatgcgcatcaatatagcaacgccccgggccctcataaaggaaggactggaccgcatcgccagagccttggcctgcatagaaaaataacacgacatatgagttaaagagcggagcttccttttgaggaacagctccgctcttcttgtttttctgcttttcttattctgttctttctttaagcggtttgcctaggttcttgcgaatgtaagggcaatacaatgcagctacaggattgtgcccaagctttctatctttcacaacaagggtcgtcaccggtacctcggaatggcgataaaagatagagtcgtgccctacacaaagtccaagaacaatattgaactcacaccctgcctcgttcaatattctggcctgctctgccgggttacatgaaacactccccagccatgggcgttggggcatatcaagacttgcttttgtcattccgccaactttacagcagacagtgtggacttcaaactctttgccaatgagatctccaaggagtgcagcttcttctgaaaaacccacacaaaaggcaacccccaactttttaaaccctaaacgacgggcaaactccagagtttcatctacccgacaggcctctccataaaagagagcttctacttcagctgaaaccgtcacgagccgcctgtcaagggggtcatcatataaaggaaggctgtctgtagtaatacaggggtttccctctctacagggatgctctttgcacttatgacactgcattattctatgcttcctcgttagcatatcgctttgaaacgaactctatgatgattctatcgacatcggtcattccttcgacatttatcgccgctgcgttttcaactgtcttttcgatggtttcgcccactactccttgggggccgtcaagttcgttcccttcaagcacgatcatggcagcacagtaggcctcataggctcctgtgcccaccttaagggcgcaagtgtctttggcgccgtcgcagaccatgcccacaaggttgctgacaaggatttcagcggctttctctgctttccaaagatctccggagagaaggaaggttatgccggaagccgatccagctcccgcagccacactgcatccgcatactgggctgagtcgccccatgcggctttttataaagcttgtggtcaggtggctcagggcgatggccctagctgtttcttctctgctcttctgataatagtctgccacaatagaaacgggaaggatggctgttatgccatggttaccgctgcctgcgctgctcataacgggaaaagaggcccccgacattctggcatccgcagctgctgcagaaatagcttttactttatctccaagggtacggaggtctgtgccatctccagcaagtttcatcatggtttttcctactccgagccctagttttcttgttgggtcaagccctagtccggcaatctccatattcatgcgtacgccttccataacgtaatccacgtcttcttcgtctaaatcttcaataaggcgcacgagttcgccataggtcatggctttgatttgatcgggaatgcttttttcttcacttttctgtgtgttctgggaatttccctgaagtgtatattgagatttgccatcgagggctacgttaacaatattcgtgtggcttcccttgataacgcactctgattggtgattttctgtggttacaactgctctgacataaacaccattcttgttcatgtcggctacaaccttcactttgccttgctctacgagctccttcgctttcaatactgcttcatctgaacaatctcgcaatacttcaagtccatactctgcattgccgcaaatggctgccagggccgctgcaataacattgcccttcagtccatttgttcctggaatacccactgctattccgtttttgtagatgctgctgctaaccgttacctctacatctcttaaacactcgcagccagcctcttcacgcgcccgggcgacagccagtgccaccgctccgggctcggtacaccctagcgctggttttacttcagagcgtaaaaactccttaactgtaaacattttacttcctcctttaatttgagtatctatttttgtttattttttggcttaaccatttcttctggttgaatccaatcttcaaaatctttttctgacagatatcccaaagcgagagctgcttctttgagagacatttcttctacataagcctttttagctatttctgcagccttatcgtaacctaaatgaggggtcaatgccgttacgagcataagtgagttttctacattccatttaattctttttagttgaggctctattcctcgcacacagtgttcttcaaaagaaatcatggcatcagccagcaatcggcatgactggagaaaattgtaaataagaacaggcataaagacgttcagttcgaaattaccctggctggcagctatgccaacagcagtgtcatttcccataacctggacggccaccatggtcacagcctcacattgggta

SEQ ID NO: 2045 - DNA, 23039 bp, synthetic construct
  misc_feature 1..23039: note = Synthetic
  source 1..23039: mol_type = other DNA
ggggacatcatctattcaattagtataaaaggagtgtttttagctggagtcgcttctttttcttacacctcatatattctttacgggaactctcttatgaaaaatatctcataccagattattgtcgcctatgtctgttccttttctgctttgtcttttctaatagctggcgtaactactcataatctgttgctttctcatactccatctgtgtggcttattttctgtttcatttcttttgtttccgtttctggtttcctctcttttttccttggtgtaaaactaacgactcccgcaatcgctgccattcttagcatgacagaaccacttgtaaccgttatcctctctattgtcttttttcgagaacatctgagcttttcgcaatattttggtggaattttagtactgacaggatctcttatagcgttgctgaaagggcaataggtacttaaaaacaagaataattgctttatactaaagcccctttctcagccgttgcgatctcaatttcatctttagcccttttcttctgccctaactcttcatacacacaggctcgttcatatcgaatggttgaaagcaaatctgtcggtctatctttctttcgacgtaacgccgcagtcaacacatcgcgcgcagcagagaaatagccgagttttctaagagctttgcccctatacaacaacaaagcgctatgaagagctgtttcgttatttataccctcactgatctctatcacttctttaagagcaactgcctcttcagggatatttttcgatatttctataagcagctccgctaaagaaaggcgaagagacacatcgtggggactttctgccataagctctctaagtataacaacagcttcgtcatactcctccacttgctgcagggcttctactaaagcaagggaaactcccttttcatctggccatatttccacgtttacttcttcggaaagaggtaagtgaagcgacatgcagacacctaatttcttaaaaagggaacctagagaattcttttgttccttcgcttgacgaaaagcaacaaccgcctgctgaggattattcccgctaaggcttataagcccagccataaaggctgaatctgctatatttagagattggcaaaagcaaattaaagctttgtcttcgttagactctaaatacgccctcaagccatctataaagttttcttctgattgcgacaggaaaaatcttctaaaaaagccaggagagagtttcttttttataatttcctcccgcgtcgcaatagaacgcgaacctgattcttttaagcttgaaccttttttccaggagctcatagtcgtgtaataaagacccgtcccaggaatacctactgtcttccttactccgcgaggacctaccgttaccttcgcacctctcgcccctacagaaacagaagctcccgatttactcaaattaatggaaataccaggagcaactctaaagcgtctcgtaaaacgaaaccccatgccattccctcccttgatatggctaacctatcatagcaactcttcgtattcaacctaaaaaagctactctccacataagcgtcgctataacgtaaaatacataagaccgcttctaaatgtccatcttttttataaccgaaagctaaaaaattatactaggggaaactctggatacttttaatttagtgaatgagtctcagggggcagtgctgtgattataagtgccagtagacgtacagacataccagctttttatgccacgtggttcataactcgcttgaaagagggattcgtttatgtgcaaaaccctatgaacctcaaacaaatcagcaacattccactcaataaagaagtcgtcgattgtattgttttttggacaaaaaacgcaattcctctgataagccatctcgacgctataaatcgcatggggttcagatattattttctcttcaccctcaatccttatgataacagcatcgaaaaaagagtaggcgacaaaaaagaaattataaaaggatttaaaaagttaagcgatacaatcgggaaagaaagggttatctggcgctatgaccctgttatcatcaataacaacctttccattgaatatcatcttcgctcattttacaaactgagcaagctgctttctggctatacgtccaaatgtatttttagttacgtagatctatatgccaaaataaaacgaagagcacaagaaatagtaggagagatcggcattcaaaatatgcataaaattgcttacggtttctctgaaattgcaaaagaatggaatatttcgcttgagacatgttccgaaaaaatccccttgagtcagtatggcatacaacatgcttcatgcattgataagagaactatagaaaaaattacaggataccctctcaaagggacaaacgacaaaaatcagcgccccgaatgtgggtgcatggaaagcatcgatataggagcatacaatagctgctctcacggctgcctctattgttatgccaacacaagcgatgagactgtttacaaaaacatacaacttcacaccccttcttctcccctgctcataggaacaccacgtgcaaaaaacaaaataacagacagggcagtaaagttattgaaagaaacgcaaattttgttattgtaacaaagctggttaaagacggtgcactcctgccgcaataaaagaaaatccagccttagtaagagcttcggcagtgctatttacagccttatgtttcaaaagataattacgagaaagggcgtcccaatctccagaagcctctatttcctttttatctctaaaataatcaaggatatccgagggatgggcaagttgctgctcatcctctggatttccaccttcatgtttcgctgaaatattaggtatcgtttttacgagttctaacaagtcatctcttcggttataaggctgctgaacaatactcttccatgtttccgtaatatgatgttctatacggacttggttttctagtttaagctccttgcgaatagctgctgcttgggcaagatgttcggcatcaatagagttagacagattaaatccagccagaggcgtagatccatcctcccgtgcaaaaagccgagcagcaagcaatgtccataaaacggcatacggattatcgttccccataaaaactgagattttaaacttaatattcacccctaagcgataaagaaggtaccccaaaaaaaccgtccctggattaatattaagaacttcatcaacaccgtaatttacatagtaataaaggaattcatcaatccaccgtaagggatggctgttaggttgcccgattccaccaaaatatcccgtaatagtgctcgggcctccaaggtggatgttagaaccatccgtccctttcgtatcaagagtttctacgcaacttgcacctaaaatttttatagcagcccgcactgcgggcaaatcttcgttttcagcttcttgttccttcatttttctcacgcgaataaaccgtccaggaagaacttcccctttttcaatagcctgcttaacttctgctacgagccacggaaaatattggagggcactgatctctaaagttggggcctttgtttcgtcatagtcccatatcgggcgatctggggcaactcgggaacgatattctgaaagagaaataaaacttccgctatctttggcattctgaagccattccaaatcttttatgtagggagatcttattcgctctagctttttcatatggttttctactttccccgcttcatgcgcttttttgttgatttcgtctactgttccatactttgcaactaccctgctcaagtcagacacggcatcgtttcgagggtcggaaaggaaattattaatatcatctaccacgcaaggagcaatactcaaaaactgataggccatttcgaaattcctcctcacatataaaataattttacttcccacagatccttcttaccgcccaaacactgtatcttaataaaccgtaaacataataataaaacaaaaagattacatttgggaatacctctgtcttacaaaaaatattcctcctattgacactccgtaattttgaggacatccttccagcgctgggaatacatcgcagtcttgacatcaattatgaacttgacattgaaatggaagttgttgtggccggcgcaggcattttccctaacatcttatcccaaatagattctcacacaattgacgaacaaaagaaaatacataacaatgatagttctaaaggatgtaaaagttaaagaactcacagattgaggagaaattaaatgcaatgaaaacattcattgggaacaaaaaaattggactcgcccttggaggtggggctgttcttggtgctgcccatataggagtattaaaagcatttgaagaatgtaacatccccgtaagttatatagctggaacaagtattggagcgttcatctccgctttttttgcttttggcaagagatgggaagaaattagggaaattgcaagaggtttgaattggcttgatatctcaggaatatccctatcacaatttggattgctttcaaataaaaaactaggtcaactcattattgaaaatcttgggaacgttactttcgacgaggctcatattcccgtagctatggtagcagcagacattacaagtggagaaaaagttgtgcttaaaaaaggggatgtggcaactgccgtaacggcaagtacatgcattccaggtgttttcgtgcctgtggagataaataatcaacttcttgtggatggcgggatagttgaaaatgtccctataactccactaaaagagatgggagctgatttgattattggtgtcgatcttaacgctaaacacggagaaaaaagacctgagaatattattgaagtgttactgagatctttcgatattgcattgaaaacagccacaaagttacagactgaagaagccgatatcctcattaaaccagatctttttgctttcaatatgatcgatacaggacaaacagaagcccttattgaaaagggatattttgaagcacgtaaaacattagaaaacataatctaggaagtgctgcgaaaacgatatctagagaggtctcatgatatggccaaatacagtatgcttaataaggcagatgtttctcttgatgtaataattttattcattatcgggatgataatgttgattactggtacattgcttttcccagtatctgcgggaatactcccttactatgaaaatggcttgtatggattgctgctgttcatttttgctttacagatgatcacccttgggaaaacaccttttcgagaaatgcgccaatcaaagcttttacttattatcggcgtagtaattgcatcaataggtattgtcacatgctttattcctgatatcttcaacccaattccccgcatactgttgtccctctgctttggcccgggggggattttgcttcttatacaaatggtcttttccaaagaaaaactccgatcatggttacaatatggaagaagtttccaccacctcattttcgggtgcggagcagtgtatctattatccatgttgattggaatgcttatttgggatcacagcctattttcaacgtctataacagccgtaaccattctgatttatggggtagcaattgtctatcttgcagaaactcttcgacgaatatatcgcatgtatccagaagcagaaaaatcacgtgagggggatatagatctttcttcagataaagctatgattttagtgacagctatttttatgcagcttcttggaatactgctgattccggtaaattgggggttgcttcctttttccggaagtgcacaacttggacttctgatggttatttttgcagtacaaatgctagcattcggaaatacaccaatcgggccattcttccgttcatggctcatgattttattcggctttatatttgctgcactcggaattatatcctgcattattcctgaaattttagtctcgccattaacagtgctcatcggagcccttaacataattggtggcatcacaacattagggaaaacatgtcttcccctcttcaaaaaaggaaggaatccacatctccctacgcctcgaattctggtgaaactttatgtaactcaactagcgatgaatctagtggctattctttttggtgtatcgatgtttgtttcccacctgattccaggacaaattattggcgtgatccttactgcaaatggatgcatccttttatatttattacatatattgtctcttatcgataagataagggcagagggtaccaactaaccaccctaaaaataagtcccctttgtacgatagttttcacgacgctcacgtgccagtttgcgaatggtcttgtcaaattcttctctgttccccctataaagagcatctacatcgcgcataatttgagggaaaataattacaagagacttattctccatttcctcaaaaatatagtcaactgcatcatctacactgatagaatctgggggcggtgttaattccccaaatattggcgtacgaacattgccaggacaaaatacactaaattgcagaccatcagcttccagctcatattgtaggctctcggtcatagagataacggcgcttttacttgcagcatataccgcttgataagggacaggaattcgccctgttatggaccccgcgtttataatgtgtccgaacccctgctctcgcataagaggtatcgcagcatatgttccgtaaacaacacccattaaatttaagtcaataataaatctccaaatatcgaaggttatcttctctgtaggaagtgtcatccccattcctgcattgttgaatacgaaatcaaggtgtccatcaaaggcttttgctgcgctaataagtttcgtaacatgctcgagatttgtaacatctacaagttgaggaaaaacttttccttgatatgcgagacccaaccgtctagattccctttcaagatttgtctcgtttacatcccccataaagactgccatagcgccccttgcaagcaaatgctctgctattcccaagcctatgccagaagcagctcctgttaccactgctactttattttcaaaatatccactcatatcacaccccatttatcctctacggcaaaattcttgaatcgccaacgttgagcctagcagtaccttttgccattgccacgctaacatgttttaatattggcaaatctgcaagagtactgataatcttgaactgtagcggatgctgctcctgagtgagttttgtccattgaattccgccttcacacgcccaaacccgcttcgccatcatctcttgtggataaagagttgcgtgactcaacgtagcgccacctttgccaagattgggcaaataacgccatccaaagtaatttgttttgtaatctttgtttatttcattaacatccttttcgcaaagttcgctttttcttagaaaatcaaccttgaggaaattattattttcatagcttgcactcgtgtaccaatggctaccaacatgatgttcggcagaaatatcagcaaaaactttaggcataccgtcctcttcgcgccccccaataatggcgcaggcgtgattttcccaaattacaaacacatattcaccaacaagcccttctgaattacccaaatatcgaacaggtgctgtaacttgtatgaggcgatattccccacctgccatccaatctacatcacgacagtttgcaaattgaacacttaccaaaggctgtcgaagctcaaagtcctccggaataagttgtagtaaagcctcttgttctgtttcatacttcacactgatactcgtcatatctccatactctgttctcaccggataaaaaggatatcctccaaaatgtaccggcattttgtaaacataatcatcattaaacctgaatttgcctctcaaaacaccacctccatgcataacagtttaaattattatataatatttattttcgttgaacaatataataataacgttcctaatttgcttttgcaccatgttaaaatttaaaaactatttttactctcatcttttcgttatactgagagatatctatacttataatgaaagagtatggtagagaaaaaagagggtgacattatgagatgtacgttgctgtcattgctcgttggatcgattatatttttcatggcaacacaaacgtatgccgcaaccataaaaagagaggaaaagagcgatgatgagtgggaagccatcctcacgccggaacaatacgctatcaccagaaaaaaggggacagaacctcctttctcaggagcatattggaactcacacgaaaaaggaacgtatgtttgtgcttgttgtggagcttggcttttttcttcagaagaaaaatttgattcgggctcaggttggccaagcttctgggcaaccgtaaaagatgctcctataacagcaagacaagatttctctttcggaaaggaacgaacagaagttctttgcgcccgctgtgacgctcacttaggacatctttttccagacgggcctgaacctactggaatgcgatattgcataaactcagctgctttgaaatttattcctgaagaataaagaaggcacacgtagcctgaaaaaattgagtctattaggcaatagttacatttgatggcaaacatcaagccgtagtttaagattatgggcaatgtggataactttgagatattcagcatgagttgggcaacggtttatctcttgaaaagtatcggacgatacctctcccgcgggatgatactgagacattacattaacataggtatagggagaaactttctctgcaaggaaacggagaatagcctcactgccagcaacttctccaggcataactaaatggcgcacaaggagacctcgtttcgccaaaccatgttcgtcgagcttcaaatctcccacttggcgattcatttccataattgcctcgcacgcaacttctggataatcagcagccgtgagataacgaaaagcctgagcggcgctccatattttgaagtctggcatataaatatcaatgatcccttcaagaagtcgcaggctatagagtgaatcataggctgaagtattgtaaacgattggcaggcgaagccctttttcagcagcaattgacaccgctgcaataatctgtggaaccacatgagatggagttactacatttatattgtggcagtcagcaagttgcaactctaacataaaggcagcaagctgttctggagtaatttcaacaccatttcccaaatgagatatttcatagttctgacaaaaaacacaatttaaattgcagaaagcaaaaaaaatcgtgccactcccattttgcccacgtaaacaatcctcttctccaaaatgtgcaaagtggcttgaaactcgtgcaagtagtcctgttttacatattcctgtctcgcctgccagacggttcgcttcacaacaacggggacaaagggtacaactttcgagatcagctagagcccgttccgctcgtcgctttaattctccactatacaaaagagaaagatatgctggctcaaaatctcggctcaagagagtgaatcgatcgacactataatccatagactcttccccctcaacaatattccgcagaatgttcttcgaagggctttatctttacctttggcaaacttctaccattttagccacaataaaaaaaggacttcaaacacatcaaagcattgaagtcccttactctttcttatatggtgccggaggggagactcgaactcccacagacccaaggcccgattgttagtgtatattactattaaataaaaaacgcccccaactgggagggcgcgaggtcgtttatctctaagatgaaataaacggagcctttcgggcaaaagcccttactgtaaacagtctggcaatcaccgcttagatacacttattttattaaacaatataaatttgtttttgtcaatttaatataaagggaggaagaaacttgcttatacaaacaaaaacaattttaggtctagatgtagggacaaattcaataggctgggctctcctggaaactcaaggagaaaagcttctttctataacagataccggcgttcgtattttcccagaaggagttgcaaaagataacaaaggaaaagaaactccacttaaccaagaaaggcgtctcgcaagaaacatgagaagacttacacaaagaaaagccggacgcatgaagcatcttttactgacattgcaggaaaacaatcttcttccccacggaaatctctttgatttagaaggctctctagccattttaatgagagaggatccctatctcttacgaaaaaaagcattatatgaaccattagaacttcattttttggggagagtcatctaccatcttgcacaacaccgaggttttctttcaaatcggaaaaacacttctaaagatgaagaagaaaaaggtgcgatgaaaactagttttttacaaacggaagaaacaatggaggaaatgcatgctttaacttacggagagtttttagcaaatgtaaatccacacgaacaacgcagacggggccaatatattttaagacaatggatagaaaatgaatatgaagaaatttggtcccgccaatgcatatattatccggaaattttaacacccaaacttagagaacatataaaaaggatcattttttatcaacgcccgcttaagcctgttaatcatcttattggaaattgccaacttgaatcccaccggaaaagagctcccatggctttccctgaagcgcaaattctccgtatgttacaaatagtaaatgatacgttaatacaatataaagggcaaacaagggaactaacagaacaagagcgctctatacttatagagaaactccttctaaaaaacttaaaatttaatgatgcgcgcaaacttctaaaattacctaagggcagttcttttaacatggaaaatgggactcaaaaatattttcttggggtttctactgttcccaaatttataaaaatttttggagataaatgggacactttaagttctcaagatagatcccaaatttttgaagactggtggagttataccaatgaagaagcccttattagaagaatgcaaaagaaatgggagcttcctttagaaaaagcccaaaattttgccagtctagaactagaaagtggatattctgcgttttctagaaaagctttatctaagttaatacctcttcttaaaaaaggattctctctacaaacatccattacaaaagtttacggagggaaaggttatcaaatcggtactaataaacttttgcctgcagaaaatataaggaatcctattgttcaacgtgcactttctgagatacggaaagtcgtaaataatttaatcaaggaatatggaaaaccagaaataattcgtatagaacttgctcgagatctcaaacaaaacacagcgcagcgacaagaaatttttaaaaaacaagaacaaagaagaaaacagagagagaaaatagctcataaaattactcaagaaattggaattgagaacccatcgggccgatatatagaaaaagcattgcttcatgaggaatgcaaaggcatttgtccatatactggcaagagtattagctataatgatcttttgggtgctcatccgctttttgacatagaacatattatcccttttagccgttgccttgacaattcttttaataacaaaactctttgtttcgtagatgagaatagaaataaaaaaaaggatcacacaccttgggaaatttatagtcatgatgtggaaaagtggcaagaaattattcagagagtggaaaagtttggcaactttgagaaattaagacgtttcaaattaaaagatgtgtttaatggcggagatgactctgcctgggaagaattcacaagtcagcaactaaacgatacacgatacataactcgttttgctactcgttatttaaaccaactttacgactccgatgggaaaaaacatgtacaacctataaaatcagggaaaatcactgcttttcttagaaatgcatggggacttaacaatatattaggtaatgggataaaaaacagaaacgaccatagacatcatgctatagatgctatcgtaataggacttacatctacttctgccataaaaagcctctctatagcatcccaaaagagctttcgtcctggaagttttaatccagatagttttcctcaaccttgcaacaattttcttaataaaacaaaaaaatctattgataaaatcattgtttctcatagaggttcttacaagattaatggcacgttacataaagaaaaaatgtacggttttataaaatcaaacacaaaggataaaactgtaaatgctgtaattcgtaaacccatagaagacctttctacaaatgaagtcgaaaaaatagttgaccctgtagtgaaaaaagccgtagaagaaaggttgaaagaattagcctgcaaagaaccaaagaaagcttttgccgccaaagaaaaccatccttttcttctttctaaagacggtagccaaacacttatacataaagtaagagtgttccaaaacgttaaccccaaaacaattggtcaagaaaaaaataagcgaaacgttttaacatcgaataaccatcatcttgaattatatctatctaaaaacaatagtggaaaagaaacattccaagggaaagttgcgactaatctagagatggtacaatctttagcaaaactaaaaaagtataattcccgtcaatctctttatccgttccacgatgaaaagggaaatcctctcgctatggttctattcaaaggagatatggtaaaagttactttgaatgggaaagatgttatatgtgtaattctatcaatatcaaacggagatattgaaatgagacttcataatgatgcaagaattaacagtgacaggaaacatgaacgcattcgttttcgatcatatactactctctataatgctaatataaaaaaacttactgtatcaccagcaggttttattcgtgaataactgtctaatagatatcagcgaggcttccggttatttacataccaaaaatcgacaacttataattcagttcaaagatgaatcaccacctgcttctgtacctattgaagacattacagctctagttatctcttctccggatacaatatatagccaccaacttctatcggctttgagtgaaagcggcgtttgccttattgtttgtggtaggaatcgccttccaaatgggattcttttgccaatacaaggtcattccacacaaacggaacgtttaaaagcacaagctgaagctaaattgccgctaaagaaacaactttggaaaagtattgtacaagctaaaataacaaatcaggctcatctacttaaaaagttacgtggagatgatttcggacttctctatctctctaacaaggtgcgctctggagatcctgataacaaagaaggacaagcagcaaaaatttattggagtaatctgtttaacacctttagctttaccagaggaagaaatgaacccccgccaaataattaccttaactatggctacgcagttcttcgtgctattgttgcgagagctatatgcacatctggacttcatccttcgttaggtatacaccatcataatcgctataattttttctgccttgctgacgatattatggaaccgtttaggtctattgtagacgaagaagttgtacaattagttcgtaaaaacaaaatcgaattatctctgaatagcgagcataaaaaacagcttctccaagctctaacaaaatcttttgtctttaatggagaaacaagaactctttttgatattatttcccgcataacatcaaatctagcccaaatctttcttgccgggaaaggcacattttgtttccctaacattatttcaaaaagaaaatgacgagaaaaaaacaggaggaggcgaaactctcgccatatagaagtatgtgggttattgcaatgtttgatctaccagtgggtactagagaaaataaaaaatcatattccacctttcgcaaaaaacttcttaatgaaggttttatgatgcttcaattttctgtttacgctcgattttgttcaaattctgattccgcttcaacttaccgttctagaatacaaaaagttttacctccaaatgggcaagtaaggcttatttatctcacagaccatcaattcggacgaatggaagtttataacgggaaaaaacgcactgctccagaaggaagacctaaacaaattatgctcttttaaaagggtaaaaaaacagctaacctcgatgaaaactaaggttagctggctcatagtgtacctaagcggtggttaccagtcaattacagcacagacagtgataacaacaaatgcgtgctcagtgtacctaagcggtggttaccagtcaattacagctcgatgatgttatgaaggatcttcgcaaggagtgtacctaagcggtggttaccagtcaattacagcaacagactcacaatctgttttcggcaggggagtgtacctaagcggtggttaccagtcaattacagcagtatcccctgcggctttacgaatagccctagtgtacctaagcggtggttaccagtcaattacagccgaatccctaccaccttcttcttgaaccaagtgtacctaaggccaacaaggacgacctttgcgccatgggcgggagtgtacctctaagtacagccgttgcgatcgcttatttcaggacaaaaagctcagggagaacctcatatatataaacacaaaaaactctcggtggagtaccctgtcgggacagactttccccaatggggttagcctatccacatgggcgctcacggagagctctctaatcaagatataccaacagaagctgatcttgtcaaactaaaacaataatttccctgtaaataaagcaaaatcttatgttgtttctgatagtttttactgtaacaccaaattagacggtggccaagactctacaaattgttccttacattttttactttcagacataaaaaatcccccttcagcttgcttcgacaaaaccgaaaaaggggaaatccgtcgagcattctgttttttgacactcggcgggctcttagtttttctggagctttcttttaactcgctaaagtgttaggccgtctcttggggcctctttatcagtaacatggtgccggaggggagactcgaactcccacagacccaaggcccggcggattttgagtccgctgcgtctaccattccgccactccggcaacgccaatatttttatcacagaaaggggatgatgtccagcgatttaacgtatttccatgtagatggaccaccccatctactgaagaagcgcccttctgactttcagaagggcgcaagttgttcattttatagtaataacagagacagggcaattatcccgtgcttccattcccgcaccttccacagattcaggaatatggtctacataaacctcggtgcggccatcttcacccatacgaaatacctgtaggcaaatcgatgcgcataatccgcaggaaatacaaccttctctatagttgctttcatatgctaacccccttcgaggtttcagagtcaaacgtaccctatctaaagcatgtatgccgctacgtttttaaggagtgttcttttctttcgaaactatgaaatgcaaaggccgccacgcagagtaacgaaagaagagttatgacgccgtaagattgaaatgaaaatttgactataagaagggctacaactacaggtgcgtacctttttgcttcacgaaagagtatttctgctgccgctgttggaatattgccactcaggcacatgatccatgttaaaagaaaaatccacaaaacgaggcctacgcctccaaaaagggcaatggaccataacgcccccccacaccatgctccaaagtagagtgctccaacacgagatagaaggataaaggcttgaaagagagtattttgcttttgtctttccagaatataaaggatggaatagagaggagccacacagaaaactgtaaaaagccagggagacatccattgtgtataaatacctgccatatgccatcgctctccaaataagaacgcaaaaagctctggccccactaaggtgagataaaggaaaggcaaaaaacctatcctaaccaagagagcgaaagttgatcgtgtcagttcatcaagggagttatggtagtaagcctgactggctttttgaaagaacacttgttgaatagccatgccaataaactgcataggaaggttgataacctgaaaagaaagcgcaaaaaaaccagtggtgcgagggtcatagagagaagcgagaataataggtgttaactgactacttaaggtgttcataagatctgaccacgtgttgtagagaggaaatcggcgatacttttttgccacatgcagaagacgcaaaggggaagctgcttgaacctgacgaaaggaaatggttttttgaagaatatacacgactcccaagctctggctcactatataccctgcaataagcccgaggggacgaaaaccagccattcccatggccactgttacaaaagcactccctattccctgaactccttttgatagggcgagttctgtgaaacgccctgctcgagtacaccagcttatgagtattttataaatacctgcccagagaattccgaggggaaaaagccaaaagcttatggggaaggtccccagaaaggcaagaggtggaacaaaacgtgttcctatccaaacaacaccacttaccgtaccgatcagaagaatttcaatgaaaaggcttagtatcagaagcgcagtgccatcgccatctttagaggggacaggtatggcctgatgatacgccagccccgcaagacttacgccagtaagcagcaccgacgtatagagggctaacgcaccataatctgaaggggaataaagcctggatgcaaaaggcatcactgcgagcaaagctatctggcctattgaatttcccagtgtcaaaatccacatatctttaaaaagagatgattggaaaaacattgattggttcgatggcaaattgcggtgcaagccaaacataaggatagtccctccagcaatttttcttatcttacaataaatgagttcaaagaagcggtcaatagaaggaaaaaaaagaatgtagcaaaaagcatagcgttcagcaaacaattccgagttacatctttcacgatgttgtgtataatgtgttcataatatgaaaagaaggggggggaatgtggcttatgtcgaaggtgtggatcactacaaaaagtggggattttggagaaacaagtttggggaacggtaagcgagtccctaaagatgatttgagagtggaagtatacggcactcttgatgaatgccaggcccatgtcggcatggcgagggctttttgtgagcttaaggaaatttatgatactttatattggatggaagagcaattagggcttttgatggggtatatttccctctatcctggactctcttgcccggatgtaaacgctctagaggaaatagtggaaaaggtgggaaccataacaggtcaaaaatttcgtttcatacgccccggcgattctaaaacaggtgccgctttacatgtagcgcggactgtggcaagaagagcagaacgcgtggctcttaagctatatcgtacaaaagaacttcctctagaaggctatacgtatatcaaccgtctctctgatgctatatatgccctttctttatggtatgaccacgcaataaggaatgaagaatccctttaagttgtataatgggtgcaaagtgctcgcttttgaggaggattgtgaatatgaaccaacaaccactaaccccggctaccaaccaggggttgaggcagattgtctacgaaaaattaaaagaagccattgttagcggagcttttaaacctggggcaaagttatctgaaatcgagctagcggagcagttggctgtttcgcggactcctgtccgcgaggccatacgacagctaagccagacagggcttattactttaaccccccgtagaggtgcctatgtaacgctcccctcccttaaggatgcggcggatctttacgtgctgcgacaagctctggaagtaatagctattgaaaatgtctgtcagaatccacctaagaaagaacttaaactttttagagagatttttggcggaatgacaagcgccactccccacgaagaatatctttctgaagatcggcgtttccacctttttctttatgaagcaagtgggaatatttatcttcataaaacccttaacaacatagtagatctcatcaacttatgtcgtccctactctatgcgatctgaacccacagtcatgagcctcttcttaaaagggcaccttgctattattgatgccgtgctggcacacaactgtgagaaagcaaaagaagaaatggctcatcatattgaagacacgaaagtcagtcttctttccttcctaaagcaaaatcctggagatttcaccggcgaatagtatttaaacaacctgatattgataatagaaggggccgatttatatacaggcggcccctaactattcttctttgtctgaggagaaacgcctccagaaacgtttcaacctttctaaaatacttcgttccttaccaagagtacctggaaaatagaaacgttggggctttaatacatatttctggggaacccaatgtcgcgggtcactgtgaggatagatatatcccttcccaccaggtttaaggtgttcaggcacttcttgaagattcccttttcgaatggactgcatggcgttatccacagccatatatgcgctgttgctctttggggcggaagcaagatacaaaaccgcttctgaaagaatgatacgtgcctcaggcattcctgtcatatctgaagcataggaagccgcggcagctacttgcaatgcctgaggatcagctaatccaacatcctcagcagcaaaaatcaaaaggcggcgacaaatgaaacgaaggtcctctcctccctctaagaggcgggacagccaatagacggctgcatcagggtcagagcctcgcatacttttaatgagagccgagataatagcatagtgatcgtctgcctttgcatcaaaacgaatggatgccgatggaacgaggcgctcaatatggtcgagagtcagcttttgagaaccggcagcagccgcagaagtcgccaatatttcaagacgagtcaacgcctggcgggcgtcccctcccgcaaggcgagctagaacatggaaaacttcttctgtagcggtgaggtttaacattcccaaccccttctctttatcagagaaagaacgagaaaggatgtgtaccaaactctcttctgttaaggggttcaattgaaaaacaatgagacgggaaagcaatgttttattgatctcaaaccatgggttttctgtcgtagttcctacaagaataatatctcccttctccacagagggaagaagggtattctgctggctcttattaaaatgataaatttcatctacaaaagcaatagcggcaaatccccccaaggcctttaaattaccagcttcttctacgagatcacgaagttccgaaactttagcagaaacagcgttgatctcgagaaggcttcttccggtaactgtagccataagacgaacaagagttgtttttcccacaccaggaggcccgtacaagatacaacttggcacgttccccttttctaaaagctgccgcaagggcatccccggtccaagaagatgctcttgccctataaaatcatcgagtgtaacagggcgcatgcgatcagcaagtggccgttcccataaagtgttcttcatcattttaagagtgcctccatctccctttccacgagatgaggcacaccagaaagaaggacaccatctgtcccttcgcggatagagatgagggggaacctctttttgagaacctcccgaataacagccccctgctccatgccaagatagacaggcgaaagacccggccaatttttccactgggcaggagataagctaacggatggagaaatcacgagagaacctgcgccaagacgggcagcttcctcgcatagagagccgatatcaggggcatcgtcaggaatctgaagtgaaaggagccatgcttttatcagccatctctctcccttttgctccaccaacgatgtatattcccagggaatgagaggcaacggagattgcaaggcttccaagagatctttcattgtaggaaaaacggcatcagcccaatgtcgccagtctgcttgtggcctctgcactaaaagggctctcattccagctctgcgagcaccgacaagatcgtaaacatagtctccgaccatcgcacactgttgagcttccaagtttaattctttcgctgcaagccataaggctttcggatccggcttcacaggccctgcgtctctgcaaaaaactttatcggggagaggaaagttgattttttttgctgccagacgaatggaatctccgcaatttcgagaaacaactacccacgggatactcttttgattaagccattctacaaaatccatagcatattgaacaggtgtagcctgttctgctccgttcatctccagctcgtaaatatcatgccaaagttcgctcttttctttctctgaaaacatggccatcccttcaaggagaggaactggacgaccttgaaaatattttgatcgtatctctgaaaaatcaagctttgtatctgctaagactccatcccaatcaagaataaatcctgcacattggacaggatgccaatgtggaggttgaattttattcatgatctttagcctcctcatagggcattagcctctttatctttatagcaataagaaaaaagggacgcaagaaaaaccttgcgtccctcacaacctccccgcaatgccgtgccatggttgtcttgacccggtcctaatatcttgaggtctgtcgtgccttagctttgatgacggtttcccgtcttctttgccggctcgaacttccgaccccactaagatcgagtgttggctcaagactaagtgcatgatcacgtacaccgcagggtcgtttttacttttcctatgcatattatagcataaatataggcgcttctcacctcaaagccagatgcctacaggtctgcctctttcaatttctttttaaagatccaataatagaaagtggccacaaatagggcgccccctacaatattgcctagagtaactggaacaagattatgtatatatcctccgatactcacaaattggagctgtgcatcagaaagccccgccatttggatcatttctggagatttttttaataggagccccatggccataaagtacatgtttgctacagagtgttcaaagccagatgcgacaaaggccattatgggaaaaaagatcgcccatattttacctgtaatatctgtagctgccatactcagccatacagcaagaactacaagccagttacataaaataccccgaacaaaggcctgtccaaagggaagccccatcttccccgccgcaatggaaagggttttagctccgataggaccattccagagagctgtaaaatagagcaagtaagcaacgagagtggcccctataaggtttgctatatacacccaaaaccacgccctcatgatatttttcattggagtacatcctaccagagcgcctaagggcatcatgcagttaccggtaaaaagctctccgccagctataaccactaatataagaccgacactaaatactacccctgccaagaacttccccaatcctcctggaacatcgtatgtaaccgataccataagccatccaccaaaagcaatataggctccggcgagaatgccgagcaaaagcatctgagaaattgaccatgatacttttgtctgcgatgcagtacatgctgttttagccagttcaaaaggcgttttatagtccatacaaaaatccctcctcaaaagatctcttattccgtcgtttgattgagggctttcagattttcgctgaaatattcctgaagccagcgagctatctttggtttttgaacttccccgggatcctctaatactcgagccaactcactactatcaaaggtaaattcttcttcgttaatacgatggtgatagatgagtcgaacctctggatgagcaacgagaagagataccagagaggcaggaatattccccaacggcggacgatcgatatgatcataccgaaaagaagcccagaccctggtcccttttccaggttctgactgtacctccatctctccttcacaaagttctgccaactgttttagaaaggggagaccaaatcctacccgacgcgttgtgcgactcgtgaaaaaaggatctgccaccatttgcaaaacatccgcactcatgcctttcccgttatctcgaacttcgaaataaaaccaccccccacaacgatcttctgtcaatagtatctccactatggacgctccagcgttcatactattctcggctatatccagaagatgttgggaaaaatcttccaacaacgaaaattcctccctgtctagtccagcggaagaaaagttccggcacgaagaacggaaaggacctcttcatcaagaacttctgcgtctgtatatctatcatggggcccaattttttgaagggcatcttcataataagaacgaatgttgagagagccgagaaggacaaaaaagctctctttatcctcttcaaggaaacgatcggtaagaagaccaaaaagaatggtcgccgaggagaaccagttaaaaagctctctgctcagggtccatgcatcctcgaaaagaatggagaaattgaaatcttcctcttcttcctcgctcatctcttccgggtctggctccggaatatagccaaggatataaaaagggatgttaggaccaactttaaacgcatcccataatgctttgtaagaagcacggtttgcaccagatagcataaacgtagata

SEQ ID NO: 2046 - DNA, 23129 bp, synthetic construct
  misc_feature 1..23129: note = Synthetic
  source 1..23129: mol_type = other DNA
tatttcttaattgttaccccttcacgttcagcagcagcaagtgcattggcatcttctttaactgtaaatccgaggattaatgctcctgatgcagatgctaacattacatcagcctcagaaatatcaccgacacctacgtgaataatctttgtcgtaatttctttagattcaagttgtgcaatagcctgagcaacagcctcagcagaaccgtgagtattagccttaataatcaagttcaattgaggaatatcatcatcacccgcagcagcttctcttctgatgtgagccggtaacatgttttctaaacgtttgtcgcgttctttctctttacgtttttcaacgatagccttcatttctttttcgtttttaactacttcaaatctgtcaccagcttgaggaacttcggttaagcctaaaatttcaacaggggttgaaggttccgccttttgaattctctcaccgctatcggataacaacgctcttacacgtccgcaagctgtacctactacaacacagttgcctactcttaaagtaccgttttgaacaagcaatgttgcaacaggacctttacctttatccaagtttgcttcaattacaacaccagaagcttcagcctttggatttgcttttaaatcttgtacatcagccacaagaagaatatattctaacaattcatcaatacctgttccttgtaaagctgaaacttttaccgtaattgtatcaccgccccattcttcaggaacaagtccgtgttctgttaactgttgcaaaattctatcaggattagctcccggtttatcaatcttgttaactgcaacgataatcggaacttctgccgcttttgcgtgattaattgcttcaattgtctgtggcataataccgtcatctgctgcgacaactaggattgcaatatctgtagctttggcaccacgagcacgcatttcagtaaatgcttcgtgaccaggagtatctacaaacacaattttcttttctttgttgttatcaaggtaaacagtgtatgcaccgattgactgggtgataccaccgacttcggttgcaacaattttgtgttttgaagctctaatgctgtctaacaatgttgtttttccatggtcaacgtgccccataatactaacaaccggtgcacgtttcttaagaagtttcttgtcgacttcggttaaagccttcttttcttcctctttttccatttcttcttcaatatatgcatctaagtcttcgtctaaaacttcaagattatattctgcacaaatctttttaataacatcaacatcaatcaattggttaactgttgccataataccgttcatcattaagaacttaacaatttcagccggtgtatgttgaattttttcagaaagttcactgattgtcattgcttgggttacaacaattgattttacttctttaacttcttcgtctttgtgagaacgttttttatgcttttgagccgcagctttctctaaagaaatacgttcttgttcttctttcttattaaattctttgtcctttttcttagaattatcaccacgtcttttagcaggacctttggattcgtagatatcctgagaaattatatgacgttgaataggctttttaacatcaggtctttcaggacgtttaactttgttttcagtgttttcacctcttgcaggtttttctccgcgttgcccgaatggttttcttggtctttcaccagatttgaattggttcggtttatcagtagttttttgtgttccttccggacgttgacgtacaatgtttggtcccggaagaggacgaggtgctcgtcttactatttccaaacgacttttaggtttaacaatttctactcttggacgcttaacttcagtactgttactttcaggtttttgttcgtttttaacctcttctttgttatcagaaacttcaggtttttctaccttttcaacttcttttgatttttttacgataaaagctttcggcttttgaggtttaactactttatcgccgtttgcaataaattctttaatctttttcacctgatcaagagttaaggtgctggaatgagtttttccaacgatagagattttttctaattttgcaattagctccttgttggatatattcagttctttagccaattcattaattcttattgtattataactcatttattattttccctttcagctcctctgatacaggagttcttaaaattttttgcaatttattttttttgaaagccttttcaatacaagatttattataacaaagatatgcagatctgccaaatacggctgaatcaccgttaatgacaagggtattggcaatatgttcttttgttattttaatcagattatctcgatttttgatttctccgcagccaatacattttctatctgtcataaaccatcctgcattctgttattcaacttgagccagtttttccaactttaatttttggtcgtactccataagaagtttaatcaattcatccaattccccatctatgactgtccaaacatttaagttgtgattaagtctatggtctgtcaatctgccttgagggaagttgtatgttcggatacgttcactcctgtcaccggaaccgacttgagaacgtcttaaatcggtgatttcctgcatttgtttttgaacttccatatcataaagttttgctttaagaatttggagtgcgcgttccttgttctgtaattgagaacgttcttctgtacagaaaatcataatccctgttggtttgtggaatacacgagcagcagtttcaactttgttaacgttttgaccgccggcaccaccagaacgagctgttgtaatttcaacatcgttcatatttaggttaacttcaacgtcatcaacttcaggcataacagcaactgttgcagttgaagtatgcactctgccttgagattctgttgcaggtactctttgtactctgtgaacacctgattcgtatttaagttgagaatatacggcatcaccttttattgaaataataacttctgaaacaccaccggcttcacaatcagttttgctcaaaatttgagtttgccacccctttttatcggcataacgaaggtacattctcatcaaatcacctgcgaaaatgtttgcttcgtcaccgccggcaccaccacggatttcaagcataatatctttgtcatccatcggatctcgcggtaataaaagaactttcattctttcttcaaattcaggaattttagcctcattagcttccatatcagcttttagaaatgctttcatttcttcatcagattctgaatgtaacatttctttggcttccgcaattgcatcggttgtctttttccattcgtaataaagattaacggtttcttccattgatttgcgttgttttgataaatctctaaagcgattgtaatcttgaataacggctggatcagagagtgtttcgcctaattcattgtactttttctctatttgtaaaattttgtctaacatatctttcatacttagagagtatcaggaacatgtttttttttcaacaaaatgctaagttttatacacaaaagaacataaaaaaaacaggaagtgattttcattccccccctgttaagatttacactagccgaaatataaatagcatgtatattataccacctttttaggtaaattacaaactttgataagaaatgttaataataggctttgcaaatatgctttgggatattacttaacattttattgacattagaatacggctccgattactattaagttaattgaatagaggaaacgaggtgaatatcctcggctgtagccgcaaccgtaaaagccggaatgctcaagataaaacatattccacgtgctgtatggaagtgttttcttagtcgtcctcttgtaagcatagaggattttttatttgtcacttccaacaatacaacaaaatattgcaaaagccggtacgtgtccgcacggagcgccgcttggggcgtgtccgatttgtaacggtatgagcggaggaggacaaaagaaggctgatttttctgcaaagcccggtgagatgagctggaacgaatgcgccgcaataggagcatttttaaaggctcaaaaaaatgcccgattagcaaggcaacaagacgcggaaaattttgccaaacaagcaatagcgtttcaaaacagtttggccaagatgtctgaaaaaatcgctcaattaaactctgtggtgactcaaaaatttccaccaatagttgcaaaaccgcttaattttgctttagggacaattattggaggaagtattaattttataaaaaatcttcctgcaaacattcaaggctttatccaaaatgttggacaaaagtttgcagatatttcagataaagtgtctgctgtactcggagaaattaaaactgcaattgagaaaaaaatatcagaacctattcaaaactttaaaaagaaattgaaatcgttattttctattttcggagcagataataccgataacgatgacaaacaaattgatgaagagaaaaaagcgtttaagcttaagacgtttatacacgaactttaccaaaaacttaaaaaagatgaagaaaaagaattatttaaggattagcaattatgagtattacgttatttaacgatggtgaaataaggcgcagacagcgtaatcttaccggagttcaaaaaaagaataatacacaaaccagagaaggagtaattgtcaataattttataaaagatactccggatatggttgaatttagtgaatataatttaaacgatacaaaagaatcattaataatttcagataaaacgaagcttccacatcaattaaaagaaaacttgacaactcctgaaaaaagtttatttcctattagtggcatagcaacaggggtgatgggagttatcgcaggtgcctcttggtttgttaagcgaaatgctcaaataacaaataaaattgctaaagaaaaatggattacttcttttacaagaaatattgcaatcaatgaggaaactgttcaggcaattgttcagatgattcagaacccaaatcagaggacaataaaagccggactcggggtgttaactcttacggctacggcatttatgggaaaaacgttttttgacggctttaaggaagtttgggtgaagaaaaaagaagctgatattcaaaaaaatcttcaagaacagttgattggaattgaaacccaatcatttagcggaaaaaatcaaattataagaaatacattatcagaaaaaacaaaaatgttttcaaaatatttatcagcacaggaaagttctccgcagcctttcggaatgtttaagtccgcaaaagaattgacattccgtggaactaacgaaaatgcaaagaaaaaagaaaatactatcggttattggttgctaggtggcgcaaccgttgcttcaataatcggacttgcactttattctcttaaaaatttacaggcaagtaataaagaaatttctcattatataaaaaatacaaaagaagaattggaacgaatagctgcttctgataaggataaaaatcttgttaaaacatatttggaagatatgttacaagcaataaatgctccgcgagaagatgttattaaggttgtaaatcgaacttcttgggatgaaactgagaaaaaagcgtttataaataaagttgcacaaaaaattgaaacatctacggtaaaagttaatccgcatattgcaggtgatggaactccaaaaccgtcattttcttcatttgttgatgattatcgtgcatttttctttaactttttaatagaaccggacaatgcacaatttcaacagctttttgtcgggacaaccgcacttgcggcaataagttacggtggcaaattgcttggagatgccgtaaaagaagttcaggtgaaaaaatataacgctcaaactgaagtagaactccaaaaaagactggtatctactgaattaagaaactttaaatctaaaaaagatgcagcgattcaaccgcttgtagatgagttttacaaacaagttgacgaaggcaaatctaaagaacagttaaaaactatggctgaaaacattttattagaaatcaaaaatggaccaccatacgtatattcataaggtatttcatatgatacaaccaattttaaattttaatcctaaccaacaaaatgcacaaattatacctcaagctactcatcctgtcggaactgcggttgtaatgccaaatgggcagcgaaattattgtgtttttgaccaaaataaagtagattgttttgtaaagcagaaagaaaaagcgttgccatacttgaatgatattctattacattctcaaaatgagaggcaaataacagaaacattatatatccttgacagaatgcttgaaaacggtacaaaaggaattgataaaatgtatccgacactttcaaggttgaatgatactcaatctccaaacattcaaacttatttagccggaatatatagaaaaactcaagttcctgatgcatttggaccgttagtaaagatgttaatccaaaattctatccatccaaaccctacagctccatttgacccgaatgaagaaattggcggagctattttaagctacttgtcagacagatttagaaataaatctcaacaataaagatttattcaaacagtgcactaattttatccacaatttcttgcggatcaatttcgttagtaacattgttgatattctgagcattctggtataacttagccgcttcaatcttatcgccggtaatagttatagctcttgccaaattgaattgagcaagtgcataattcggattacaagcaatagatttcttaaacaactcaatagctttttgaactctgcctaaatcatcaagataaattaccccgagattattatatgcaatgtcataattttcgtcatattcgatagctaattcgtattctttaattgcctcgtctaaatcaccgttgccccaatacaaaaaaccaaggttgcaatgtattttggcatttttaggttgcaaatccaatgcatttctataaacagtcaaagcattattaaaatcttctttgtcataaaatgcgctacctaagttgatataaatatcaatatcctcaggggtttgtaaataagcgctttgataagatgtaatcgctgcgtccaaatctttcttagactcctgataaacaaaaccgagtgtttgatttataacactagtccattctcttttagggttaagagtaaccgcggtttgaaaatgtgaaatagccccgtcaatatctcctttgacaaacaatatgtttgcaaggtttgaatgaacatcaggcatgttcggcataattttaaccaatttttgataaacttcaacggcattgtcataatccccaagttcttcataagcagatgccaaatgtctataggcttgaacatttaaagaatcaagccatattgccattttatattcggtaatagcatcctcaaaacgccctaaagaacagtatatatccccgagcaatccatataaaggaacaaaccccggagccttatcaatcgcatttatataaacctgtatagcttcatcaaccccttttgagttaacaagccaaattccttttaaccaagttggtacaaatcttaaataagatattgcctgaataacattcttaattgctcttttgtcaaaaggcaatgttaagagcgacaaaatgtattcaaatttagatttacaccacattctaggtgattttatagaggaaacaccatacaaattagatagcaaaaagtgagcacaagaatttctcataggactatgtttgatagccgcttgtgcgtttaatatagcctctaaaaatcttgctttcttcgtataagtttcagcgagcaggtaatacgctttagctaatttgggatctttttcgatagcagtatcaaaataattgatagctttgtctaaatcacctttataaaaatgagcttgcccaatcttaaaataaatttcggcagaatcaatatatgtttctaaagctctttggtattctgtaatagcctcgtcaatgtactggcatgagttatatatatccaaatgccatgccagatataaatctcccaatctcaaatgcaaatctgcattagtcggatcatcttgcaaacctatttgacacaactcaatagcgcatttaacgttaccggtcttatactctttattaatctttttctctaattgtttcgtgttattcataattaatcgtttacttcttgacattattgcaaataatgttccatacttatcattgtaaataatttatgtttaaaaagcaagttatttaaatagatgatatttttaggggtaaaggagcataaatgaaagataagaaaatttatttcgtagatgttacaaacagagatggggttcaaacgtcaagattgggcttggctaaacttcaaaaaacaattattaatcttatgcttgacgagatggggataactcaatcagagtttggttttcctacaacaaaacacgaaataaattatctaaacggcaatcttgagctagttcaccgaaacgtaatttccaaaacgaaactttcaggttggatgagagctatggcagaagatgttgaactttcatttaaaaatgttccgcatttgaaaaattgtaacctttcacaatcaacttccgaacaaatgattaacggaaaatatcagggtaaaaaatcgtttgacgatattttaggaatgactgctgatgcggtaaaatgtgcagtatctaaaggtgctgaaattattggggttaatgcagaagatgcctcaagaagtgatattgattttcttataaaatttgcaaaagtagctcaaaaaaatggtgcaatgcgttttaggtattgcgatacattaggttttgaagatccaaaaacttcctatgatagagtttataaaatagcaagagaaacaggcatgccgatagaacttcattttcataatgatttaggtatggctgttggttgttctattatgggggcaaaaggtgcgattgacgcaggtgttgatgcttatattaatactgcaattaacggaatgggagaaagagcaggtaatgcagatttagtatcttgcttgttggcaattcttaagtccgcagggttcaaaaatgaataccatattgacccgaatatagatttaagcaaagcatggcagcttgctaaatatacttcatacgcctttggggtgccaatcccgataaatcaaccggcagttggcgataacgcttttgcacacgaatctggaattcacgctgacggcgcgcttaaagacagaagaaattatgaattatatgattacgaagaacttggacgtggtgaacctgaaattattgaaaccggtagaatgattacaacaggcgaatacggtggaattaaggggtttagaaacgtatatgataaccttgaacttgagtttaaagatgaacatgaagcaagaaatattcttgaacttgcacgttatgcaaacgttcatacccaaaagcctttaacatcaagcgaattaagatttatatattactatcctgatattgcagctcaaataatgactgtttctccatactatgaaccacaaggcgcaattaaagaaagagttgaggctaaattattaaccaaacctcatagaataatttagagaggttttattttagaatgtcgtgggtaattcattttcgccaaacaacaaacttagaaaggttaattttatgacaaacctaaaaattacgataagtataataatattgttcttgatgatttggttttgtgggggcggaataacacgcagccaaaccgaaacaaatttgatgagcaatatattgttgataatttgtttcatagtaattttggcttattgggttttatattttttgagaaaaaagtagccgaagggtatacaattcaatcaaaatacactattatttctcaaggtacgataggtgcaatcaacatacatatatgatattctatgttcaagggagatcttatgggtaaaaaagtttttgcatttgatatgggaaaagcaagtattggatattgcgcaagagaagattttgaaatcaaagaagcaaattctattattatagataaagatcattctgatattagctcgattagggatcgaagaagagttaaaaagactataattgctcataaagcacgcgaacagttttttgttaatctttggaaatcttgtaatttaacacctattgatacaaaggatgataactttaaaaaagaattcgcaaataaaaaagattctacaatttacacatcatgcttattgagaattgcactactacagaataaaaagttagaacagtggcaaatattcaaagcactatataatgcaattcaacgaagaggttacgatgcaaatttagcttggaaatcagctcaaacgaatgatgataaagaaaatattgagttgacacaaaaatatactcaagaaaatggtattgaactaattaaaaacgaaaaatataaatacccatgctattatgatgcgaaaagacttgggctttgggacgaaaactttccgaacagatttaatcaagcaatcaatctggataatgttataaaagttagaacaacaacttatgttgctccaagacaacttgttgaaaaagaattaaaacagttatggataaatgcacaaattcaaattccagaattaaataaatattcagtggaagaatttttatatggagaatacaaagaagcttacggttcttatgtaaacccagaatttaagaaatatatgggaacagcacatgattggcaaggggttttggggcagaaaattccaagatttgataatagaattattgcaaagtgcaagttacttcctaaaagaaatgtatgtaaagccaatacgattgaaaatgttacatttgttttattaatgaaacttaaaaacctcagaattacaaataatcttggtgaaaaaataatactaagcccagaagaaattaaacacatttatgaaaactggttatcaaaagttgagcaaaatgtaataaaaatgcaagaaaaatgcaaaaaagaaaataaaacaccagacaaagaagacaaaaaattagatacaactataactaaaaaagaaatagaaaacgtaattaatcaagttatttcagataaaattgagccgatgaaagccaatatttctggacgttcatctttttgtaaaagagcctgtcaaattatgaacaagttcattttgggaggatatttatacccacaagaaatggatataactgaatttatcgattcagaaaattctccaaatggaataaccaagcaagaaattcaggtaatgctatcaagaattggggattggaataatttatatattccggacaataggggcgaaaacattaatgactctgaaaaaatcagaacaaatactgacttaataattgggagtatcaccaaccctgtaattcggaacaggcttcaaattttcagagatttgttattatctttagaaaaagattatggaaaaccggatgaagttatttttgaatttgttagagaaggtgctgataattcactgtttggaaaagctaaagctcaagctgcagaaactaacatgaaagcaatggaaaaacaaaatcaacaattagttaaagagttaaaaaattatgatgcttatagttcaataaattttgaaaaacttaaactcttaaaaatgcaatgtgggcaatgtgcatattccggtcaaaaaatcggtatcagcgattttgacaaatgtgaaattgatcatatttatccaagaacaatgggcggaaatgatgcattgtataacaaagtattgtgttatcgagttgaaaaccaaaagaaacaaggaagaataccttatgaatggttatcttctgacaaagaaaaatgggcaaattatgtatttagattaaacgaaattaagaaaagtttaggcaaaaagaagtttgaattactaaccagtaagccggaagattgtgaaaagcttattgatagttataacgggcttgcggaaaccgctcatattgctaaggtagctcaacagatagcagccgtttgtttcagttggggattacaaattgaaggtgagaaacgacatatttatgtaaataatggttcttcaactcatgcaataagacatcgttatggattgaattctttattaggaaatgatatcaagaaaaacagagataacgataagcaccacgcattagatgctatttgtatcagtttttcaagagattttaagtatgatgaagaatctaaaaaagatataattaaaggtttcacaagagaaatggtaaaaaaagttattgatgaaattatgccagttccttatactaataaaaaaccttttaaaggaaatacaagacctcttgaaactatatatggcttaagagcatataatgggaaatcttatattacacaaagagttccacttgaatcaattgaaccaaaagaaaagaaagtcagaactataattgatgaagttataaaaaatgatcttttggaaaaactaaatcagaaaatagattctaaagagtggataagtatgctgcaaaattatattcatcctaaaaagaaaacaatagttaaaaaagtaatgattgttgtttccgaagcttccattgaaaaagattccaatggagttgaacgaattggagagttctgtgattttggcaccaaaggaaccaaacatcagtttaaacattccaaagggcacaaaggacaaattctatatttcgatgaaaagggtttagtaaaagttatgcctatatattctaatattcgaactcaagatattaaagataaattaatgacaatgggatgtaaattgtataataaaggtgaaatattttattccggttgtttagttgaaatagaaaagccatttgttgcaacggtatattacaaagaaacagatgctgacggaaaagaaaagacaatatccgtcaaacaagaagtgccctatggaatttttaaaataagaacaattatgggggatgggaagataaaacttgaaaacaattgtggtttagaaattttatcgagtgcaaaggttcttgtcccactaaatatgaaaaaatataaaaattgattttactaaaatcatcattacatatatggtatgagttaccatattctacacttgacaacacctaattgctacctatctattgatagaggtctgctgttttgcaaacaagaagacggcgacacccacatgatagcgttgcaagatttaaaagctattattgctattacacatggaatatctttttctaacaactgtctagcaaaactcttagaaaataatgttgttatattacattgcgacaatcactatcaacctgtaggatggagtttaccattagaaagaattgtgcggaagaaagttttttataatcaaatagcaagaaacgaagattttgaaactctgttatggaaatatattttaaaatgcaaggttttaaatcaagccaataatttaaacttaattggagtttctgaacataatttattcaaacttataaatcgcccattaatgagtgaagctaatatcgccaaacaatattgggaactctattttgcccacataggcaacccgcaaaaaagagaacaccaatgggctgaaacatttgaaaacggatgcctaaattatggttacgcaattataaaaacattaatttataggtcaattataattcacggaatgatagctagtcttggaattcatcatattgggaaatataaaagtactccactagtttacgatctaatggaaccatatagagcatttattgattattatttttatgaattttccaaaaaaaataaaaatgaatatgaaaataaaaacttcaacgcttggagtaaatttgttgcaaattgtattaaaaactatagattaaaaataaatgatattagttacaaaatagttgacactattgatatttatattgaaaaaataagcgatgcttatattaaatttgattgcagtaatgtgttcttacctaaaattgaagaacaatatctatacatagataaacataggaacagagaatatgaggagtaaatatcgcatgggatggttaattgtatgttttgacttaccggtatgtgaaaaagatgaggcaaaacaagcaaacagatttcgaaaagcattattggatcaggggtacttcatgctccaaaattccatatatgttcgctcttgcgtaacatacgataaaacagagcagcatgttcgaaatttaaaaatgatagccccattaacaggaacaatatcagcgttttacataacagatagacaatggagtttatcggtaaatatacaaaggataaattatagaaagtctaaataccaaaagagtgcaggagaaaacgcagaaaagcagatgacattctggtaattccatgttaaaatgtcattgaaggtattaagttttaaggatttagagaatgaatcaatacgtacattgcagaggtcttaattattctcttttcaattatgattggacaattagcttaaagtattttacagatttattatatcatattttatttaatttgtatatcctattataacatactttaaactaattgtaaaattaaggcaatttttaagctctaaaatactttatataaatacaggggatgtattgaaaaggggaaaatatgaataaaattcaagcgttaaaaaatggggcgtcttatttattacaaaaagtacctaaaggggaaataagtgcaagttcactcggatggattagacctgataagacaattaagttttcaacgaccaaagctgcttataattatgccaaaaacgcagtagttaaagctttaaatttagcaaatccatatgaaaagtctgttgtagtaaatggaaaaacaatcttaagtgaaacaaacggaacaagaaaccgctgttcaattcctttaagctcaaaaggtacttttatacacggacatcctgatacctacggtaagggcaaagctttttctttttccgcactagattatcaggcttttatggaaaatgataagttaactggcgcaatagtttataatagtgtcggtgaagtctctgcaatgcgtaaaacgagccaaaaaggtttggtcggaaaattaataacaaaatttgttccagatgaaacatatcaacaaataaaaacatgttcaagaataggaagtgcaaatgccgcttacaatacaaaaatattggctgacacgaagggagccgtaaaattaaagctaaacaaactctctatacagctaaaaaaggctataataaaaggagatacacaaaaagcaactcaacttgaaaaagaatggtctgagttatacaacaaggaagttgaaaaagctacacacagtgaaagtatagccctttctatacataaattctggcaaaattatgcaaacagactcgggattgaatacgcttctaattttagtaattttgtgaaaaatcgaaaaaatgggggacgttaaagcacaataaaacaaatatttgattaaaacaagattacgattatattactttataaacctgttttattatcaaaattcaaataattaattaagttaaatattgaatttaactgagaaacaacattttcaaaagtcgctttatctgtataggatttatccaccggaaattcaaaaaaatctgcatttgttgatacatataaagttacactacttttatcaaaaaaacaacttacccccgatgtaccaaatacatcttttatattttttaatttttccataaagcctgttgttaaaatataccttgcttcaacttgatcatcagaatatacttgaaaaattttattaaactctatatcttcaagatttattttttgacgatttacagccatacatggcatacttgaaaccaatagattgttattgaaatttttatcaatattagtttttataataagaccatgaaaatcgctaccaacgctactattaccacttgaatgtattaatcttgtttcacaaattataacttttttaccattataaaaaccaacgaaaacgtcatcatttttttgcgacttagcactaggaaatagtcctgattttttaacctcatctattccaataaacttagcttctgacacattgaactcgccaaacaaattaagaattaatggtaaaaatcttgacttaactttttcatccaatctattatatatcttatatgtaattaaacaacaaagaataattcccccaaaagaacataaaaacgctaaccctatgacatcggaatttacgctacacatcaaaaaaaatagaacaacaagaattggaaccccattttttattactttcacataaggagcagcttttttctttttctctagcctttctatttctagctttttagtgtaaggaataattttttccgaatataacttatcaaatttttcttgcaaatctttttcattcatcatctgactaccttataaaaaaatcccagatgaactgggatttaaaatttgggcaggggtggattcgaaccaccgtaggctcgcaccgacagatttacagtctgttccctttagccactcgggcacctacccatataaaattttcagaattgcctttgacgggatttgaacccgtggcctctcccttaccaagggagtgcgctacccctgcgccacaaaggcttgttgccacaagggctttcctcttaaaatgaccaaccactttatcgaggtaaaaagccggcaataggaatcgaacctacaacctacggtttacaaaaccgttgctctaccgttgagctatgccggctgacaagatttattgtattaagaaaaaaactaaaagtcaagaactttttccaaatttgatataatatatttatacaagcttgcaaataaggacaaaaacacaatgtacagatatattgcaccggtaattttactaacaatttcgaatgtattcatgacttttgcgtggtatgggcacttgaaacacaaaagtgctgcactgtggagtgtcatactcataagttgggggatagcattttttgagtactgttttcaagtgcctgcaaacagaatcgggcatgaggtatatgatgccgctcatttaaaaaccattcaagaaattataacactaattgttttcagctttttttctgtcttttacttaaaagagcagtttaaatggaactatcttgttggttttgcattgataattcttgcagcattttttattttcaaaaaatggtgattatttttcgtaaacaagcataacaaatgggtcaacctctttcttatcgactaatttaaggttgtaatcgcaaattctaatgatatcaactaaactttttatagttaataagtcgtttaatgacgttgaattatagctttgtgaattttcaacaagctctttgaacttttgattgtcataagatacaaatttaggagatgcaactattataaatttttgtccttttggcattctgttcaatacaaaactcattaaaagcaaagtattgttaggtaatttgttctctaagaaatatggtttcaaaatttcttttcgttctggaattaacatcccactgaattcttgttcatgcgcaagcatggtttctgacttgtaagcaaaatcttgtaaagtacttaaaataacaaaatttttatcaagatacttgtctaaaatttcttttctattccatataacaacaaaatctccattgtgtgtatttgctgaattaatcgctaaagcaattggtttgtatcctgaacgaggatatttatatgcactattgggattgaataacaggtatgttaaattgagtacaataaaaagagtggggagaatgatattaagagattttttctttggtataaacgaaaacccgtacgccacaagagttaaaaatgccggcattgcaacagacatgtatcttggcaaaattttaaaattagtaaatttaaatgcaaaaatttctgccagaataaaaatagttgcaggtgctataattaatagattttccttctttccctttatcgcaaagcacattccggcaatagctataaaaattggtattacaataaaaaatagttttgaaagagcaaaagtcgaaaagaaactaagcatataatgttcaggattatttgataaaccctctaaaacaggagtaaacagatcttgaagcccaacaaataaacttgaccaatcacaataaaagccgtttattaatgttgtgtattttgaagaatttgcagataaaaataaaaaagtcggtaaacataaaattccgagagaaatcgctgaaattccaagtggtttaaacgtagattttttcaagtacaagtaaaatactaaagttgcaaacaaagcaattacatatataaaagcaatcgtataagtatggattatagaaaaactgaccgcaacaagcatgatataattccatttattggaattattgttttttattttcaagagtaatagtacagacaatgttgttagtaaaattaacaacgaatacattctgacttcttgtgagtaatatataaaaaagctatttattgcaaataaagttggacataaaattttagcagtttgattttttaattctttcccaataaaaaatgcaacaaatactgataaaattccacaaaatgctgagaaagcacgaagagcaatatcggaaaaactaaaaattttgcaccaccaatgtaataatacttgataaaaaggcaaatgaacatctgtttgtagcgtgtaaaagattgtcgaaattgcatttggttgcgcagcttgtttaaaagaaacaagttcgtcataagatagtccactcggtttgtctaaaaacagcaatcggaatacaattcctacagtaaacactgcaaacaatatccaaaagtttttatttttcataatccctaaacctaataaatttcttacatctaatgcagctatgactaaacggtaatggagcggaagacgggactcgaacccgcgacgtcaaccttgggaaggttgcattctaccactgaattacttccgcgcatgctacttcattatgttacaccaaaaagattatttagacaaatttattaactaaagcaaaattttgcaaaaatttcatgcccgtactcacttaatatagcctccggatggaattgaacaccatatataggataatatttatgccttaatcccatgacgatatcaccttcacatttggcagttacaataagtgcccctttaatgctttcaggttgcaccgtcaaagaatgataccttgtagccttaaacccctgtggtaaaccttttaacaaaaagctattttcgttataaaaaatccttgtagtttttccatggcaaggctctttcaatttcacaacctttgccccgaaaaattctgcaatacactggtgtccaagacaaatacctaatatttttttagatttataaaaagctcttaacacatccattgttacaccggaatcagaaggattacctgccccgggggataaaataattcttgagaattgcattgtttttagctcatctaccgttatttcgtcatttttatagacttttggaaaaactcccaattcttctaaatattgaacaatgttatacgtaaacgaatcataattatcaattaaaatcacaataaaccttctttattcctcgaactgaatttatgcaataaacagaatccgcattttttaaatcatctatttttaaaattctttcttcgcaaaccttagagtctaacaaattttgtcttaatactccgtttaacaaaccacaagacaatgccggagtataaaactttctatctttttctattaaaatatttgttctggcaccttctgttaattctcctttttcattaaaaaataactcatcatacaattcgtccgaggcaatttttttatatgagtcaataaaataaggtcgataagtagttttgtgataaatcaaaggatttttagaattaatttttattggagaaattttaaccttattaacacaacttttttctaattttttatattcaacattaaaacttccatcatgatggagcaaaattctcatcatcccatctttttccggagaaatagaagaaagtgtttcattgtatttaaaacctagtttatctgccgatttttttaatcgctccaaatgtttgtcccctaaaaacattttgccgttttcgacttttattgtttctatcagagaataatccgtttctaaaaactttgttttagtaactgtttcttcccattcatcctgaatatcagaatcccagacaactgcaccgccaactcgatatctgtaccctgcttctttagcttttttttgcaaaattctaatcgggacactaaaaaccatctcatccggggtaataaatcctatagccccacagtaaacatcgcgcacacctgtttcaaccctatcaatgatacgcatagtactaactttaggcgctccggtaattgagccacatggaaaaattgaagttattatatctctaaatcttatatcatctcttagatccgctgaaatttccgatgtcatttggtgcagagttttatgtgtttcaatctcaaataatttatcgactttaacagagccgattttggcgatttgtcctaaatcatttcttagcaaatcgacaatcataacattttctgccctatttttaatatcattttttaaaaattctacattcgccttatcttctacataatcgcgtccgcgcgcaattgttcctttcataggtttggttaaaatatgattcccatttaatgtaaaaaataattcgggagaaaatgacaaaactgtatcatattcatttgagaaaaaagcattatacggagttttttgtttatgcaaaagatattcatacaaatcaagtgcatttccccgaaaatcaactttccagtcataagtataatttacttcgtaagtattaccgtttctgatttcattttttattgaagttaatgctttggaatattcttcaaaagttattgaaggtttaagtgataattcataaaaatgagtgtttttaggttgataatatttaaatgactcaaacacttcaaaatacagtaacggactatcttgagtataagttttatccacaaaaagattttttgcctcgtatcttatataaccaactatatagtaccttttacggagctcttcaatattatttaatgcctcgaaaaaactttcataatcaaaagcgacaagtctatctaccggatttttaaaaattttattttgatatattatcataaccaaaattctacaccagcatggctttcggttgcaaggttatgaaaaatatggtaaactgccactatgaatttttggactcaagaaaaaatacaagaagcattaccgaacgctaaactaattaattttccgcccgaatggacagggaaaggacttgttatctggcatgataatattgaagataacgttattaccctaattcgccgccaaggtgaaacaagaggagtcgtgccaaacattattccgaattaccttaaccaaatttctgcaataatgacaacaaatgcagaagagtttctccaatataacaaaccgataattgaaataaaagggaacacgagtgatgcaattatttctatggcaagatatatccgaaagcattataaaggaacagttgcagccgtaacgggaagtgccggaaaaacaacaacaacacgaattttatacaatcttttatcctcaaaatacaaaacaagtgcaaacatcaataaattcaacactacttggggattatcttggaacatgtcatgttttgatatagatgctgattactgggtcattgaaacatctcttggcggtggaatgagcagaaattcagcaataacaaaacctcattatgcaataatcaccaacatagctccagtacacttaaaagatggaatgacaattgcaaatgttgcagaagaaaaagctaaaattttcaactctatgcaacgagactcaatcgcaattctctggaaagaagctgaatgctttgacattttgtataatgctgcaaaatacaaagggctaaaaattataacatttggcgaaagcgtaaattgcgacattcaggtaatttccgcagctcaaaactactttattgttaacggacaaatttgctcacttggagaaaaagtctttgcaaaacatgttttattggatatggcagcaactcttgctgtcgccataaatgagggaatgagtattgacgaatgtatgacagttttaaaagaattcacgccaatagaaggtcgtggagccctaactgacataaaacttgaaaacgatatttctatccatttaattgatgaagcttataacgcaaatccactttcaatgaaagtagctattgaaagtttttacaagctttatgccgacaaaaacaaagttcttattctcggagatatggcagaatgtggggataaaacctctacttaccacagaaatatagcaacaaccataagaacaagttcgcctcaaaaaataattctttgtgggaaagaaataaaagcgttatatgacgaaattaaagatgaatacaatacaatttattttgagaacgttacagagttaaattctaatataatttcgttactaaacaacaacgactacgttttaataaaatcttcaaattcaagcggattacacaaaacaacaaaactattaaaaaaagccggattataaaatccggcttttaagttatttataaatcttatccaatttctgatatttttttgccaaatcgccatactgtgggcaataattgaaattatcaagattgttttttataaactcaacggcttctcttgctgctgccggatttttgtctttttctaatgaaatatatctttcagaagcatcaatagcagaatctaaaattgaacaattttctaattttttataaatatttgtttcatttttgcgttcagaaataagaactcgacaatgtttatttctttcaacaataaacttgtttcttttcgctatatttttattagcatattgttcttttgcatattcaacatcttcgcaca

SEQ ID NO: 2047 - DNA, 23111 bp, synthetic construct
  misc_feature 1..23111: note = Synthetic
  source 1..23111: mol_type = other DNA
gtagaaataggtttccagcctgctttttcataatagcccatcatacttttaggcacggttgttccaccattatatacagcccattccgaaacttcaggtttcataaccgtcaaggttctttttccatactgaacaattttttcaataccatcttcaacaatttttgacttaaaaatagattttaataaactcataacattttccctttcttttgtttctttttcccttacaccaatataaaaacatttgaaagctaatatttgctccgccccgccacaccataccataccataccataaaggaattatagcaagggtttcagacacttctaattcaacttaacattttgtaatatcgttgagtttgtgaaaaaactcccaaactactcagcccaatgtaagtcactgcatcgcctgagatttaaaataacatcgttcaatatctgcaaaataaacagattccggctcgtaggccggaatgacgtcttggtaaacctaccaaagagtttcgtcattctgaaaagattaaaaatcaagcaatttttaattgcgtagattttatcttattcagaatctgttatcataaaccccaccccgaaatcaaagatttcgaccctcagccatactgcacacataaaattatgctgtcggcatagcatgctattccgacacttaaactcccccacgcacaaaatgttacgaaatgtaaaaagtatataaaatataaataaattttaggcaatttttcaagataaaattactttatatatatgtaagggaaatgaagaaaaagaaaaaactcaagggggaatataaaatgggaaaaaattatgaaatggttacattgaacgcatacttaaacaacttggaagataaaaacgtaatttcactaaatgacaaatcaatcgaacttgctgtagaaaagtatttaatcagccaaaaacgtgccgaatcaaatgctaaaactcttgaagcattgttagcatagaaaaaagatataagggattaggacatcggttctaatcccttttgatttactgatttgtaaattttagtaatatgtgtgaagtttgattatttttgagtataattattttatggctgagagtaaaaaaatacttgcgataaattttggcggaatcggagacgaaatattttttcttcctactttaatttcgctaaaaaaagagtttccgaactctgaaataacattggcacttgaaccccgtagcaaaagtgtcaaggatttaacctcaataatcgacaatttgttgctcattgatgttaagggcaaaaataaatatttagaaatgttgaaacttttgttcgccgcaagatgtggaaaatacgacattgtagtatcttcaggcgggaacaaattgataagtattttattatttttgacgggaataaaagtccgttgcggatacaacactgggaaattaagtgaacttttgcttactcacgccgttccgttaaacaaaaaacaatatgcctgcaagatgtaccacgatttaattcgcaatttgaccgacattaacacggaactacccgaaatcgacatcgaaagacgtgaaaaatatgccaattcggtacttattcaccccggagtgagcaaattaagcattcaaaaaggttgcataaaaactattacccctgagatttgggctcaaacgattgatttactcgttgcggaaggtaaaaaagtccttcttgtcggtggtcctgacgataaagaatgcgttgagaaaatcttacaaaacgtaagaactcaaaatttcacaaacctgtacggaacaacaaaaaatttaaaagatttggctgaattgatttcttctgcggaaaagtttttatgctcggattcggcaccgctacacgttgccgtggcattacacactcaaacttatgtaatcttcggaccgacagatgttgaagcacttattccaaaatgcgaaaacatagtacctatattggcgactgatgattgcccgttaaaaccgtgcttatgggcaagacgtcaaactacctgcaaagaattaaaatgtttaaatattaccccgacacaaattgttaaaaaagtttgcaaaaacgattaagttatgtaacaaaatgcgtattttgtgcaaaaacctccccaaaaaatactttatatagatgtgatatgtagtgaagtataggtatttttcatggcatttagtccaatagcaacatacgcatttgtaggtacaaattacaacaaagtcgcaagcggtgactggacacgctatcctgtgcttggcggacagtgtgtaaatgcacttcaagcaaccgttgaaacagcagcaaaacatagcacaaaagccgctcatgttgcagatgaagcaacctcaattttttcaaacttggcaaaatctgacaaagtatttaacggattatctaaaaccgtcaaatttgtcaaaaataatattaacccgttgattgtcgcatctggagcaacaaaggttattcttgctaaaaaagaagaccgagaaaaaactttattctcggaaggtgcaatgattttgggcatgttcgcaggtgaaggttggatgaagaaaaaccttgacaaagttgttttgagcaaacttcctattgataaaaaatgggcaccgatagttaaaggtatattgtttgttacagggtctataactgcatcaacaattggtcaaaaaatcggggaagctgtttttgctaaaatcgataagagtaggcacaaaaatgcagaagtacgacaaatgttccagctcgacccaaagacaaatacttaccaactgaaagaaatcaaagcataaatttgcaatttcccttttgattacgttataatttcatcaaaagaggtgaaattatggctgaaataaaaattacaaaaatgcaaggttgcggaaacgatttcgtaatcttagattattctgaatatcaaaagacaggattgccaatgaacgaattggcgcaaagactttgcgacagacactttggaattggggctgacggaatgattattcctgatttgtcaaagaattatgacactgatatagcgtggtatttctacaattctgacgggtcaatcgctcaaatgtgcggaaacggaatgagatgttttgcgaaatacgtttacgacaaaaaattggtcgataaaaaatgtttcagcgttcaaactttggcgggaataatcagaccggaaatacaagaagacggcacagtcagagtggacatgggaattcccgaacttgaacacgctaaaatcccgttcaaaggagaaacaaccgttactgcgaaagacaaaacctttgaaatcacaccggtatcaatgggaaatccgcactgtgtaatcttttctgacgaagacccgatgtatttggcagaaaattacggacctgttatggaaaaacacccgtatttccctgaaaaaactaacacggaatttgtcaaaatcctttcccaaaacgaaattgaaatgcgagtttacgaacgtggttgcggaataaccctagcctgcggaacaggtgcatgtgcatgtattgtggcaggcgttttaaataacttaacagaggagaaagtcaaagttaatcttctcggaggtgttgtaaacgttgaatggtgtagaaattcgggacttcataataatcatatttttctcatcggacctgccgaatacagttttgtcgcaaattacatgttgtaaaatttaattttttcatgatagtataaggatataaactgaaaaatagtacaaaaggagaattataaatgaaaaattatgaattaatggttatattcaaacctaatttagatgcagaagaagttgataaagcaatcgaaaaacttgaatcaacagtaaacgaatttggcggaagtgttgtttctacagaaaaaagcggcagaaaaaaattggcttatgatatccaaaacttcagagacgggttcttctcaactttagttttggctcttcctgctgacaaagttgccgaattcaaaagacaattaagattgactgacagcattttgagaacaatgtttgttgaaacaaaagcaaaagcttcagtatagtaaagtaattaaggaaaaataaatgacattagcaaaagcagtggtaacaggtatagtttacaaaactccgaaaacaggttttacatcaaacaatgttgctgtttcgtcttttgtattgaacatcggaactcaagatgaaatcttggtaagagtaatttctaaaagaaattctttagaatctgtagttcaaggactttctaaaaaccaaaaagttttggttgaaggtcgtttacaaaacggaatcagcaaaatggatgacggaacagaaaaaagagtttttgaaattgaagcctctactattgaattaatgggcggaagttcaccgtcttcagacagttcttcatctgacggcgatattatcacctttggagatatggacggtgcagaagctaacacagacgtgttaatggacgatgaggaagttccgttctaaggaaaataaattttagtaaaaagtaactacaaggctagaaaggcaaaataaaaatggcaagacaagacgataaaaagaaacgtaaaaattgcagtctttgtgcagataaagttgaagctatcgattacaaagacgcagcaaaattgagaagatacttaacagaagcaggaaaaattattcctagaagaattaccggcaactgtgcagaacaccaaagaatgattgcaagagcaatcaaaaaagcaagagaagcagcaattatcagctacacttttgactaatttggttaataattgtgagtcgaaatttcgacacaactttgaacaaaccttgttgaatttatcagcaaggtttgttttttattctctgtttttaatctgttattagatgaaaaaattaaattaaaaaaatattgcaacatatcttcacaaactagcaatttaagtgtacaaaaaacctttaataacatgtaactaaaggggaattaaagatgggaatattttttgtaacaattcaaattatcgcaatcggtgcattatccaaaaatttactcttttaatgcaaacgcagaccttgaaacagtcaacagggtttcattcggaatataaaaatcttttatgccgtaattcgcattaacaaacagaaattccaaagtttcgccatcttgaaaatccagcaaactgaacggaattttaagatcaagagtttcaccgtaagtcgcttcaatagcttttgtgtgctccaaaacccacatatctccaggtattgacttaatcaaccggataagttgcaaagagtcgtttttaatcgcaatttgaagctcattatggaatttttccattgaaacaggagaaatattttcggttttatttatcaatcttacaggtgacaaatcctgtttcggattagaagtcctgaaataaacatacatctgatatgttcgtttcaataattcggaattttctttgatatacttgttcatgttgaatttcaaatagaaattattttcatcattaccgaaacgaattttatcgaataactttgattccctaagcacaggaccgtcaggaatttcaatataccccgcattattccattcatcatcagcagatacaacaggtttgccgtcaatgttcggagtaatcaacgctctcgggtattttgaaggctttgtaacggacaaattaaccaaaggttcgtctaaaaatgaaggaatgtctaattctaaatatctgtaaacgtttcttaaatgagttcggaacagaaaatcaaaaatattatcacgtcccgaatcgttcggttcgccataccaccaataccagtcactgccttcacaaatcaataattctcgttgagcagccaacaaattcggattttgcggttcacgttttgaatattgaacaaagtcatctcgaacatgtttcaaatatgcccacgccaaatcttttactggttcatcaatccaaaatttgaaatttctgttaatccaagaccctgactcaatcttatttaacggcttatcctcttttgctttgtccaaataatcagaaatcaaaaccgtttcaagtgtttcgtcttcggtaatcaaagaatacagaatttgcaagaaagaatcactgttttgcggataattttcccaacagttttccccatctaaggcaatcgtcaacaaatgttctttgtcaggagatgacaaaattttactttgtataatcttaatcctgtcgtacaaatcattagcagttgcttcagggttgtggttttgatattcaaaactaatcagactgggaattgtagattccctgaaaatcatctttatatctgatttttcagtattcactttatatgattttaacaaatgataaggctcgctgatataacctttaaaatcgtgttcaaattcaaaatgaatggaatttgccaaaataccttcgtcggaaatcgtccactttacgcctaaactactgaacatatcaagcgttttaggactaacacaatgttctgaaggccaaatgccctgcggacgtttcccaaaaacttcttcaattctgtccattgccattcgtgtttgaagttccgcatctgcctgaatattcatctcaggaacgtcaccgtttggcatcggatttttcttgacgtttttaaaatccaacaatatgggcaaaatcgggtgaaaatacggacttgtcgtaacttcgattttgccttttttaatcaaactttttatgctcggcacaatttttctgataagttcacgttgaatttcaagaatatcaattctatcttccaaagtgtaatttttgccttttttaacaagttttttcaacttcggatattttgaataaaacgaataatcaatccaagctaaattaaacaatgccattaaatcggaatattcctgatttgatagcacggagatatcatttccacctgtttcttgaacaattttgtataacctgtgatactccgcattcggaagaatcattgtttgataattcgcatcaaaaaagtttgttatgatgaaaagtttatcctcgtcattaagttgattttcaggctttaaagtcaatcttgaatgaatatcgtgtgctccgttttccgcataatttataattgcatcaaccaaaaccggaacaaaattgaaattaagcttcaatttgtcaaactttttagcccacaaaaccattcccaaataatcttttacggcatgtaaccttacccaaggcatcaaaaaatcaccgttttcattcatttgataaacaggctggtgcatgtgccaataaaacgctattgataattttttggactgactcatcatacctaactctatccttaattccattgtaacatttaaatatttataaacaagcaggcaaaaattacgcaatatatcagattttcaagactgcataaaccgcatactgcataagtgtaacagttggtaacaagaataatctaaaattttatgtttctgctatactattagtagttaaaacgggttgtagatttaccctaaggaacaaaccttaaacggctgaaaggatagagtagtatatgaagaaacttatgacttttttaatggtattattatgcggaatgcagagtgcaaacgcaatgaatattgatgcgtttatggataaacatattgcaccaatttccgatgctgtagcgaatttgatattttttccgatatcaattttcggttcaaaagttcctttaatcatattttggattttatttgccggaatatttttcacaatatattacaaaggtattgcaatttggggctttaaacatgccattgacatcgttgcaaaacctgccgaaaaatcagaagacgacagttgtggtgaagtttcctctttccaagccttggcaaccgcgttgtcaggtactatcggcatcggtagtattgcaggtgttgcgatttcaatttctatcggcggtcctggggcggcattttggatttttgtcggtgcaattcttggtatgtcaataaaattcgttgaagcaactttggcggtaaaatacagaagatttaacatggacggtacgatttcgggcggtccgatgcattacattgctcacggtttaaccagaaaaaatatgcgttggcttggtcaaccgctttccgtaatcttcgcaatcctttgtatcggtggcggtattacgggcggtaatatgattcaaattaaccaaaccgctcaccaacttatcttcattacaggcggacaacacagtatttttcacggttatgcgtgggtaatcgggcttgttgtagcggttcttatcggacttgttgttgttggcggtattaaaagtatcgcaaaagttacaactgttcttacccctacaatgtgcttattatacattatttcaggacttatcgtaatcggagcaaatattactcatatccctgctgcatttatggaaatcgttacggaagcgttccaccctacagcagttgcaggcggtatatttggtacaattattatcggattaagacgttctgttcagtcaaatgaagcgggaacaggggctgcggctattgtttatgcaacctctcaaactaaagaacacgtttctcaaggttttgtagccttgttagaaaccttcttaacaggtgtactttgcttattcacttcatttgccattgttattacaaacgttcttaaaacaagtgctgtcggacatatttcaggtattgaacttgcctctaatgcattccaatcagttatttcattcttcccgattatcttgtctgcaatcgcagttttattcgcagtttctaccttgatttcttgggcttattacggacagaaggcttggacattccttcttggtgaaggcaaaaaacgtgttcttaccttcaaccttatttattgcttgtttatcgtaatcggttctgcaatgaacgttaaatcaatcattgatattacggatgctatgatgattgcaatgtgcgtaccaaatattattgctctatacatcttggctcctgaaattaaaaaagatttgaaaaactattgccaaagatataaaatcggaaaacttgttaacagaaaatggattgctgaatctgaaagtgcagcagttccagtgaaagaaattatagtttctgaagaagcaattaaagaaggcattatcaaagacgaagaaaaaagcataggagaagatatatggcagaccaaataatagtaacagtttcaggcgttgataaagtaggtattgttgccaaagtgacgggtgtattggctgaatatgaggttaatatcgaggatatcaaacaaactcttatgcaaggtcattttgtaatgtttatgctttgcgatattgaaaaatcaaaatattcttttaaagaaatcaaagaagcattaacagaaagtggaaaagattttggcatggaaatctgggttcaaaaaaaagaaattattgataatatgcacaaaatttaagtagtttattttaacgaggcggagccacaggctccgccttttttgcatgcttttgaaagttttatattatccgataggggaatttggatatagccgaagtgtataatagaatttcatttatctttttcgtttaatacatatataaattgaaaatctttttcatacttccagctattcttaaaatttttgagccataagtcacttatcggctcatttttttatttttccaccaccaaagactggaatataaaagacacttaaattgatgctcttgagggagtttccaaaataaataaaaaaaagagaaagagaagaaattttgtaagatttttacataaatgttcagaaagatagttgaggaattgacctgtaatagagaaaatttataaaatattagtgaaaagaacgggattttgtgatatattaaagatgttcgatgcgggcatagttcagtggtagaatgtctccttcccaaggagaagatcgcgagttcgagtctcgttgcccgctaatctttgcattatgggtagcatatacaagggagcgatatggggaaaaaagtttttgcatttgatatgggaaaaacaagtattggtttttgcgtaagagaagcacttgagataaaagaagcaaactcaataattatagacaaagaacattctgatattagttcaatcagagaaagaagaagggttaagaaaaatttagaagcacataaagcaagggaagcattttttattaatctttggaaatcttgcggattaattccacttgatacaaaagatgaaaattttaaaaaagagtttgcaactaaacatgaagatgttatctatacttcatgtttattgagaattgctcttttgcaaaataaaaaattggaacaatggcaaattttcaaggctttatataatgcaatacaaagacgtggctatgatacaaatttagcgtggaaatcagctcaaagcgatgatgataaagaaaatcaagaattagtaaaaaaatacacacaagaaaacggtattgagatgattcaaaatgaggaatataaatatccttgttattatgatgcaaaaagacttggactttggaacgaaaccactcccaaagtatgtaaaagaacattaaacaatgaaaacctaataaaaattagaacaacaacttacgttgctccaagacagttgattgaaaaggaattatgtaacttgtggaaaaatgcacaggctcaaattcctgaattaaataaatacacagtagaagaatttttgtatggagaatataaagaaccttatggctcttttgttaatccgaaatttaagcagtatatgggaacaaaccatgattggcaaggagttcttgggcaaaaaattccaagatttgataatagaattattgcaaaatgcaagttgttacccaaaagaaatgtttgcaaagccaatactattgaaaatgtaagtcttgttttactgatgaaattaaagaacttacgattaacaatattagacggaagtaaaagaatattagcccctgctgaaattaaacacatttatgaaaactggttgtcaaaagttgaacaaaatgtaataaaaatgcaagaaaaatgcaaaaaagaaaataaaacaccagacaaagaagacaaaaaattagatacaaccataactaaaaaagaaatagaaaacgtaataaatcaagttatttcagataaaattgagccactgaaagccaatatttctgggcgttctgccttttgcaaaagagcctgccaaattataaataaatttattcttggcggatatttatatcctaacgaaatggatataaccgaatttatagatagtgaaaatagaccaaatggaataacaaaagctgaaattcaaaacatgttatctaaaattggagattggaacaatttgtttattcctgataatagaggtgaaaccatagacaactctgaaaatatccgagtaaaaacagatttgatgattggaggtataactaaccctatagtaagaaatcgccttcaaatttttagagatttactattatctttagaaagagattatggaaaaccagatgaagtaatttttgaatttgtaagagaaggagctgataattctctatttggcaaagcaaaagctcaggctgccgaaaccaatatgagagaaatggaaaagcgaaatcaacaattaattgaagaattaaaaaattatgacgcatacagttctaaaaattttgaaaaacttaaactactaaaaatccaatgtggacaatgtgcctattccggagagaaaattggaatcggtgattttaacaaatgtgaaattgaccacatttatccgagagcaatgggcggaaacgatgctttgtataataaagttctatgttatagagttgaaaatcagaaaaaacaagaccgcacaccttacgaatggttatcctcgaataaagaacaatgggcaaactatgtatttcgcctaaacaaaattaagcaaagtcttggaaaaaagaaatttgaactattaacaagtaaacctgaagattgtgccaaacttattgacagttataacggacttgcagaaactgcatatatcgctagagttgctcaacaaataaccgctttttgtttcggttgggggttacaagttgaaggagaaaaacgtcatatatttgtaaataatggatcttcaactcatgccatacgccgtcgttatggattaaattctcttttaggtaatgatataaagaaaaatagagataacgataaacaccatgcattagatgcaatttgtataagtttttcaagagattttaaatatgacgaaaaatctaaggttgatgtgattgacgggtttacaaaagaaatggtcaaaaaagttcttgacgaaattataccttatccatacacaaataaaaagccttttaaaggaaatataagacctcttgaaactatttatggcctaagaacttatggtaacaattcttatatcacacaaagaattcctttagaatctattgaacaaaaagacaagaaaattaaaacaattattgatgaagctataaaaaatgatttacttgaaaaattaactcaaaaaatggattctaaggattggataaaaatgttgcaaaattatgttcatccaacaaagaaaacaaaagtcaaaaaagttatggttgtcgtttccgaaggcaaaatcgaaaaagattctaatggtaaagaacgcatcggggaattttgtgatttcggaacaaaaggtacgaatcatcagttcaagcattcaaaagggcataaaggtcaaattctgtatttcaatgaaaaaggttcagtaaaagtaatgccaatatatgcaaatatcaaaacacaagatgtaaaggacaaattacttgcacttggatgcaaattgtacaataaaggagaaatgttctattctggttgtttgattgaagtagaaaagccattcaatgcaactgtttattacaaagaaactgacgagaacggaaaagataaaacaatttcagttaaacaggaagttcctgcaggaatttttaagttaagaacaattatgagtaacggagcaataaaacttgagaataattgtgggatggaaatattgtctagtgcaaaagttcttgtggaagcaaatatgaaaaaatacaaaaattgattttgtaaaaatcttcattatatgtaggatatgagttatcatatcctacatttgacaacccctaattgttatctatcagttgatagaggtcttttgttttgcaaattagataatggcgattctcgaatgattgcactacaagatttgaaggcaattatagttgttactcatggcgtttctttttctaataattgtttggcaaaacttttagaaaataatgtagtaattttgcactgtgacaatcactttcagccaacaggttggagtttaccgctagaacgaattgttagaacaaaagttttttataatcaaatttcaagaaacaatgattttgaaatcaagttatggaaactcattttaaaatgtaaagttttaaatcaagcaaacaatttagaactaattggagattctgaacataatttatttaaacttataaaccgacctctcatgagtgaagcaaacattgcaagacagtattgggaacattatttttctgatataggtaatccacaaaaaagagaacatcaatgggctgaaacatttgaaaacggatgtttgaattacggttatgcaataataaatactttaatttatcgctctattatcattcatggactgattgcaagtttgggtattcaccacttgggtaaatacaaaagcacaccacttgtttatgaccttatggaaccatatagaccattcgttgactattatttttataaattttctcaagaatatgaagaagaatatgaccgtaagaatttcaaagcctggagtcgatatatcgctaattgtattaagaattatagacttaaaataaatgatacgagctataaaattgttgatacaatagacatttacattgaaaaaataacagatgcttatattaaatttgactgtagtaatatctttttgcccaaaattgaagaacaatacttgtacatagataaacaaaggaacagagagtatgaggagtaaatatcgtatgggttggttgatagtatgttttgatttaccagtttgtgaaaaagaagaaatgcgacaagcaactcgttttagaaaatctttgctagaccaaggatattttatgttacaaaattctatttatgttcgttcttgtgtaacctatgacaaaaccgaacaacacataaaaaacttaaagatgattgcaccattaaccggaactattacagcattttatataacagatagacaatggagcctatcggttaatatacaacaagtcaattacaaaacatcaaaatataaaaaaattgcaggcgaaaacatagagaaacaaatgacattttggtaatttcatgctaaaatgccatgtgttagtattagattttaggatttagagaatgaatcaatacgtacatagcagaggtcttaactattctcttttcaattatgattggactattagtttaaagtattttacaggttcattatatcatcttttatttaatttgtatatcctattataacatattttaaactaatagtaaatcaaaactggtcgaataagattatataaaattcgttcattataacatattttaaactaatagtaaatcaaaacgcgagatgcatgccaattattgagttatattataacatattttaaactaatagtaaatcaaaactcctgcatgtaaagcgaagttttatagaattataacatattttaaactaatagtaaatcaaaacatcattttgtcatgctcctattaaattataattataacatattttaaactaatagtaaatcaaaaccattctctttaacgatacaatcggtaacaccattataacatattttaaactaatagtaaatcaaaactgtgtgggaatattacaataaaaaaccaatattataacatattttaaactaatagtaaatcaaaactgtaggcataacatcagcttttttaatactattataacatattttaaactaataattcaaaacaaatggcatggctgggaagagattattctgattacaacataattttattaattcatacaccaatcgcccaaaccttgaagggtttgggcgattggtgtattgtcgataattcgaccaaattttgattaacgttttgagaattggaatctcttacgagctctttttctaccgtatttcttacgttctttaacacgagggtctcttgttaacaagccttctagttttagaacatttttgtattctgcatttgatttaaccaatgctcttgaaataccgtgtctgatagcaccacattgtgatactacaccgccacctacagccttaactcttacgtcatatctgtcttgagtttctgtcaatacaagcggtctatatactaacatttcgattgcaggtctgtttccgatgtaatctgttaattttttaccgttaacaaaaattctacctgaaccttttaccaattttacaactgcgatagaggtttttctacggcctgttgctttgatttcagtatctgccattatttagcctccttttctaatacgattggtttttgtgcagcatgcggatgttctgctcctgcatatactttcaatttgttgaattgttctgcacccaatgtattatgttgtaacatacctcttacagcgtgttcaataacgattcttggatctttttccatcaattctttgaagcttgctgatttcaagccacccggatatccggtgtggtgtaagtaaattttatcagtttcttttttacctgtaactttcactttcgctgcgttgataacaattacgaaatcaccggtatcaacgtttggagtgtattcaggtttgtttttacctctcaaaatgtttgcaactctaactgccaagcgacccaatgtttcgccgtcagcatcaattacataccattttctttcaacttctagaggttttgctgaatatgttttcattgcatttctccgtttattatctttaatacattactttcatcaatgttaatccgtacggactaactgtcattcccgcttttgtgcggtctttggcttccaaaaccattttcatgtgttcagagtccaaattgtgtccctctatttcaagaagggtaccgactatagttctgaccatattgtacaaaaacctgtttcctacaatatctatcgtcaccttgtcgccgacttttgaaactttcgcttcatacaaaatacagattttgctcgggttaagcgttccggcactcttgaaactcgaaaaatcatgttcacccagcaagtaattcaaagacttttgcattctatcaacatcagttttgaattttactctcatcaaatcgccgtcaaacgcatttttacatcttcgatttataaactcaaatctgtaatatcgtttttttgcggatttctgagcgtgaaagtcatcttcaactattctcaagtccgtaacagatatgtcgtcaggtaaaatttcatttatcgaataaagaaactttgaagcaacaatcgtttcatcagtatcaaaatgaactacctgaccaagagagttaactcctttatctgttctaccggaaaaaactgtttttatcagtcggtttttattatttgaggttttacctcttatcaaagtactgagtgctttttcaagttctccctgcacagtcggaaaatctgattgtattccgttttcaaattgaatttgactacctgaataattcttccctatgtactgaacctgaaaggcgtatcgcatggattacaccaactgaatcaatgccatttcagaagcatcaccacgtcttggtggcaagtgatagattcttgtgtatccaccatttttagcagaatattgtttgccgataataacgaacaattttctcaaaacggtttgtgatgccaattttttgtctgcttgtggagcatcaaatacttcacctgaagtcaagtccataaatttacctgtttctttgttgtaaatatattttgctgcttgacgaattgagtgaaggtcccctttttttgcaagagtgataattttttcagcgtatggtttcaatgcttttgcacgagccatagttgttgtaatttcaccgtgtacaaaaagttcagtcgctaaagaacgcaacaaagcctttctttggtcttgtgctcttccaagcgtatgttttttacacatatgtctcatttttctgtatcctttacttagttaattgtatttcctataattaaccggaattaaccgattaaatcttcttccacagggcttggagcaaggtctaaaccgaagtggtgcaatctttcgataacttcatctgatgactttttaccgaaattcttgatatttaataaatcatgttctgattttttcaacaattccgccatagaattgatacttgctcttttcaagcaattatatgctcttactgacaattcaagttcttcgattgtcattgtaggagtatcttcaacttctgcttcttcaacttcagcttcttgcggtgcgataggagcaactgcaggttgacctgtaattgaagcgatttgcataaagtgttcaataagtaaatttgatgcttggctcaaggcgttttgaacgtctatagaaccgtttgaccaaatttcaagagtcaatttgtcgaaatctaatgcgtcaccaacacgagcactttctacattgtagctaacttgcttgattggcatgaaagttgcatcaatcggcaatacatcgattgtagcatcttttgcatctcttggaacatcatttggaacgtaaccttttcctgtgtcaacgataacgtcagcatggaatgaaccgccgtcagcaacagtacaaattaaccaatcagggttaacaactttaacacctgcaggaagttgaatgtcacttgccaaaaccggtcccggtctgtcaacgtcaattctcaagtgttgtgattctttagaatctgttttaactaccaaacctttaaggttaagcataacgtcaataacgtcttctaaaacacccggaattgctgtatattcgtgagtaataccttcgattcttgcacttgtaacagccgttccttcaagactggataacagtactcttctcaaagagtttccgactgtagttccgaatcctctttccaacggctcaataacgaactttccgtactgcgaaccgtcagaacttgttgttgtattaacacatttaatttttaattccattcttttattctcctagttataatctgcttaattgttagttttataagttaatgcttattacttacaatttctatttagaataatattcaattacaagttgttccttgatttcagaatctaattcttctctttccggaattctgtcgaatgtaatttttagtgcttctttatcgattgtcatccatgccggagcacaagccatatcaatcataccgattacatcgttcaaatattttgaactttttgatttaacggtgattacatcgcctgctttaaccaaataagaaggaatatcaactttattaccgtttacaagaacgtgaccgtggttaacgatttgtcttgtttgtttacgagtgataccaaagcctgctctgaacaatacgttatccaatcttgattcaagaagttgaagcaaaatagtaccggtaacgccttttcttcttgcagcttcgttataatatcttacgaattgtttttcacttaccatgtaagtcattctgattttttgtttttcagctaagtgaattgcatattcagaaagtttttttctaacagcaccgtgttgacctgaagctgtttgacgcatagaagttgttaactttctatttgacaaatctttaacttttttatttctgaataatttattcattggtcctgtatatcttgacattttataatttctccttttcttgtgcggggcatctatggtttgcgttttggactataaacacaagcccccgcctaaactacattaattagattgttttgtataaactgcactcaagcaattaattatacacgtcttttcttaggaggacggcagccgttgtgaggaattggagtaacgtctttaataagagtgatttccaaacctgcagcttgaatagctctgatagctgtttctctgcctgaacccggccctttgatgtgaacttcaacttttttcatgccttggtcgattgactttttagcaaccatttcagctgctgattgtgctgcgaacggagtaccttttctagcacctttaaaacctgaagcacctgctgttgcccaagcaatagcattaccttgtgtatcagtagaagttactattgtattattgaaagttgattgaatatgtacaactccctgcaatacatttttcttttcttttttctttgttttttgtggtcttgccatttttttatcctttatctttttactttttatatttcttttcccgcctgtgcaatcaaagattgctacgttcatttcactttcgcttaatcaacaacggcggcatcgtagggttgcaccctgtgcgtattgctcatcgcaatccgataccggctcacaccggcttacgcattactttttcttagaaaccggtcctgttttcttaccacgttgagttcttgcgttagtcttagttctttgacctctgcaaggaagtttacgtttgtgacgcatacctctgaaagaaccaatttcttgtaaacgtttaatgttcatagaaatttcacgtctcaagtcaccttcaatgtggtaattagacaattcgtttcttaattttttaatatcatcatctgttaaatcgtctgttcttaaatccggagagatacctgttgcagccaaaatatttttagctctagttggtcctataccgaaaatgtaagttaatgctacttccattcttttgttacgaggtaaatctacccctactaatcttgccatttttttctcctttacttgttgttagatttttttggatatgaggcttaaatacttcctcaccattgactgattgtgtccgtcaattcgacatttgtttgttttcctttacacttacaagggaaaattaaccttgtctttgtttgtgtttagggttttcacaaataactgcgactctgccttttcttttaataactttgcatttgtcacacattggttttactgatgttcttactttcattttcttttcctttatatgtttgtttgtaacgtgagattttactttaatctgaaggtaatacgaccttttgttaagtcataaggtgtcatctcaaccttcactctgtcacccggtaaaattctgataaagttttttctgatttttcccgagatatgtgccaatatttcatgatcgttttcaagcttgaccctgaacattgcattcggcatagattctacaatcgtgccttctaattctattacgtcttttgccatagtttcctcatttttcggcttgtaaatcagcccacaatacatgagcttatgctatttatcatacttgcaaaatatttgtttgcaagcgatgattttgtctttcttaacagtaatacacatgttttcgggttgtttgtttatttaaactaacaaaacttcaataaataagcagacttggcggaacttcaatcatttaaacgattttctatattttgtaaatttttattaagagaatttaatgtgtgcaatttttattaaacaatcattcaagaatattaaacccaaggaaataaattaagcctgcaaatttcttgcaagaagaacaaaatcgtgataaaatttgaactatgacaggaagtgtagaggttgtaacaataaaacgaatgactcccgaagacattgacggagttatgcagattgaagccagtgcatacggcgaccatcattggtcaagagcatcatttctgagcgaaatcagtaacgaattggctcattattatgcactaaaaacagctgacggttttttggcaggttacgcaggttgttggcacattttggaagaggctcacattacaaccatcgcaattcatcctgattacagacggcgaaatttcggacaagccttactcacgaaaataattgatgattgctacaaagatttaataaaatacataactttagaagtccgagtcagcaatactcctgcaataaatttgtacacaaaatacggcttttcttcatttggaacacgcaaaggctactatcaggacaacaacgaagatgccttaattatgtggactaaaaacatattttttgacgaatttaaaaacgactatgaacaaacaaaaacagtattaaaggagcaaattacaataaatgaatgacgaagtcttaatacctcaaatgacgagagttgacaaatataaaagacacaagattaagattccgttttcaaatcttgtttttatcggtacggcaattatactgtttatttgctcaacatttgttaacataaacattaaacactacatattaccgacagaaattttctcaagtgcaaatctgacatcagacgattttatttacagtttttgcttaattccgcaaattcccgtagtgatgttcgttgcatctgttttaggcaggggaatgacctcaacaagcctgtttttgtatattttgttaggattatgcggacttccgatttttgcactcggcggtggaatacattatatcggacagtttggatttggttatatattaggatatttgccagccgttgcgattgcttgcaaatttttgcaagaaaaatacagtttccctaacatgataaaagcggcagtttgcggagttttgacaattcatataatcggaatactttatatgatagttgttgcattgttcagacacgcaggcggagcgtttatcggcggttggattggttctcaaagcggattaaaaattatttatgacatcttgagttcatttatcttaatcctcatcggaaagtatttaaacgagggcttaagttacatttcccattaaccttgctaacatacgtttaatatgctacaatgaaccttgaagacggagtaagagtatgaattttttaaaatatattatggatttaccgattttaatcgttctaatcgtttttatttcctctacaatatattgttattcaaaatatgctcaaactggcaaaaatttgaatatattaatagattttatgagcaaattcaaacgcaacgacttgaatttccggttcaaagaaattgacaactggatgatgagtaacccttatttttcaaccgcatggctggaatttagaaacactttggtattttcggaatctgttgcattaaaagcggacggaaaagatgttgcgtataaagacatttcaacaacagttcaaaatgttcagacaacctctgacccgttgtactttttcaatgaagagtctttggtaacatcaaaatttaacttcaaaatggtacaaacaatgccaacaattttgacaggtttcggtccgctattcacctttttaaatattgcaatcgctttcgggaaaattgatttttcatcacaagaaaaaactatcgcctcagtttcaagctttatggtaagcatgcaaacagcagcacttgtttccgtatttgcagtaggttcgtctttgatttatttgatgattgaaagatatatgtacaacaaaatgtgcaaaactccgttgaataaaatccaagagattatgggcggcttgtttgcgagcgtttcggctgaaaaattcttatacgaactgttaagagaatcaaaaattcaaaacaattcaacaggtaacttggtttcggcaattccgaacgaatttaaaacagcgttcaatgcaagtatggcaacaaaccttgttccgtaccttgaaaaccttatcttcgggttaaatcaattaaataaacaactgaaagaaacaatgacggtaaaagaaaataaagatgttgttgatgaattattttaaaggaaaagaatgtcaataaaatttctaaaaaagaataatgcgaacggctcggaagaaaatatcttttgggtaacaatggctgaccttttgctaggtttag

SEQ ID NO: 2048 - DNA, 23084 bp, synthetic construct
  misc_feature 1..23084: note = Synthetic
  source 1..23084: mol_type = other DNA
atagtcgtttgatggtgtcatgcaatatgacatattttttcgagtatcatctaatgaaaatttttttaatctctcttttagttcttcattatttaaaaaagataaatttttgttaaacatttcaaatcctttttagagtttatgcaaaaatgtccccaaacaagtggttttatttaaaaatagcatgttttttaagaaatgtaaagttttagcaataaacgcggcaaactaaatactttagtttgccgcgtttacataataatttacaaatcttattgcttataaaatagcagcttttgctctcttgatagaattatctttaccaataatagctaaagttgcaaccatatcagcaccgcaagttctacctgttacagcacctctgattgcccacatagtaaatttaggtttgtaacctttttcttctttgaatttaccgcggaattcttccaatttgtggtgtaagttttcttctgtccattcccagttagaagcttcttcaacaaaagtttttaaaacatcttgagaaagttctgtagataaaacttcatctttaactttttgttcaacttcaactttatcgccgccaaagaaataagaaaccgcgtctgtaatatcagaaagaagaaccaatggctcacgagtgatttcaatcattctgttgaattgttcatctgttaattctgttaaatcatattttgttaaatattttttaagctttgcttttaattcatccattggtaacatttttatgtagtggctgttcatccatttcaatttgtcgtattcgaaaattgagttagaagatgaaatttcaccgattctgaaatcttctgcgatttggtcaacagtctttatttcttctccgtcagaaggtgaccaacccaataaagcaacgaagtttacaagagcttcagtcaaataaccttgttcaacgaaatctgaaacagctgttgcgccgtgtctttttgaaagtttgcttctatcaggtgcaagaatcatacctaaatggccaaatcttggaacttcaaagcctaaagcttcgaaaatcaagatttgtttgtatgtattagaaatatggtcttcgcctcttattacgtgtgaaattttcattaaagcatcgtcaattacaacagcgtagttgtaagtaggcgcaccatttgatttcataattacaaagtcaccgattaagtttgtatccatgtgtaatttaccctttacaaggtcatcaaattctaaaatagaagactcatggaaagctttttgcgcttttgcaacattaaatctgattgcaggttttctgccttctgctcttaatttagctttttcttcttctgttaaattttcacattttttagaataaacgtaagcttttttgttagctgttgcttcttctttttctgcttctaactcttccggtgtgcagaaacattcgtaagcaaagccttcatctaaaagtttttgtatatattttgggtagatatcaaatctttgagattgtgtataaggaccgtaagcaccacctacatcaggaccttcatcccagtttaaacccaaagctttcaagctgtcaaaaatattgtcaacataagcttggcttgttctttctgcgtctgtatcttcgattcttaaaacaaaagtacccttattttttttagcaaataagtagttaaataaagctgttctagctgtaccaacgtgcaagttgccacttggtgacggagctattcttactctaacatctgacataattatatccttccttttttctgcctatattattccacaaacagaattgaaataaaagttttcacaagttgttaaaaaacgtatttaattttcgtgctaaaatgtacttatgaaatataagtggctgaacaaaaagaataacgaagagttgatattgttttttaacggttggggaatggatgaaagtgttgtttcgcacttaaatcctgaaaacttcgacgttattatgatttatgattataacaatcttgagtttgattggagtgtaatcgaaggttatgcaaaaaaatatcttgttgcttggtcaatgggagttatgtgtgcgactttgtttgacattgattatattagcaaaactgcagtcaatggtacacttaaacctatagacaatgaatttggaattccgacaagaatttatgatttgacaataaaaggttttagtccaaaaggcagagaaaaatttatcaataatatgttttctaatccagaagatttaccgaatgttttaagagaatttgaaaaccaaaaatcagaactttcagctctaaagaattatcaagcaaatatggattttaagtataatcgtgttataataagcgatttagacaaaattattcctacaaaaaatcaagaagctttttggaaaaaagaagcgaatctaaaaagcggtcattgtccgttcaaattgttcagcaagtggagtgaacttttatgaacaaggatttgattcaaaaaagatttgctaaaaatctcgatacttacaatgacaacgcaaaaattcaaaagaaaatggctgaaagacttttgtcgtttttagataggaaagattttaatgatattttggaaatcggttgtggaacaggatttttgacacaacttgtgaatgaaaaatttagttttaaaacttataccgcaaacgatattgttgaatcttgcgaaaaatatgtgaaagaaattaacccaaaaattaattttattcctgcggatattgaaaaagctgttgaaaacagtgataaaaagtatgatttaataatttctaatgcggtttttcaatgggttgaaaacttggaaagttttataaaactgcttatttcaaaacttaatgatgatggagttttactgttttcaacctttggacctgaaaattttagagaggtgaattttgtattgggcaaaactttgccttactattcggcaaatgagttgcaggaaattataaacggttataaaagtgtcgttgagcaagaaatgcacgttatggcatttaaaacaccaaaagatatcttaaaacacataaaatcaacaggtgttaatgcattagagatggtttcttggacaaaaacggatatgcaaaagtttgaaaacggatataataatttttgctcaggtattccaacgcttacgtatcatccgatttatgtaaagatagaaaataaatagattatgttaaaacgcttgaattaaaaatacttttataccgttatcaaggcgttcgattcttttaacatatctgtaatcagttgggcttgttaatattaagactacagcaggagctttacctgttagttttgaataatatagggcttgtccgattgattctgcccactttttggcaaaatcaaattcgatagcataatctttggtcatgcaatcaacccttgtcatatcccataaaataacttccttgcgcccaaaatcaggagtacaccactcattctcataatatatttctacttggtttggtttcatcttttgggtttcataaagctttttagggacataacttaagccaaaataataaattcctgttgccataagcaaaaaggttataacaaaatggatagttttattttggtatttcttacgcgccattatttaactttatttcccaacattttatgaaaaagtccaaccaatttatctacaatatcatcatttgaaaaataacgtctgtatttggtcaaagccatggtatcaaaacccaacacctcacctttttttaataaatagaattggtcgttgtcaaaataagaaatgtaatcttgcaataaaaccatatccggatattcttttgtagcttcttcaaaacctttcgctatatctgggtgattataggcattcggataatgataaaattttgcgccaaaattcggattattattctctacttttgaaattaacatcgtgtttttatacctttatttacctaaatcaatctttcttatatctcttgctgtttcaataggatattgttgatgaattggtccggcaaatgttccggttttttcgttataatttttgccaacttgaagtttatacttgtgttgctttggggttaatccgaagtcgtccatacaatttgcggttaaccagcccatacttagtccaaacattgcaccaccaaaagtagcgactagaaaagctgcaggattaacaacaccttcaacaaaggcaattgctaaaccagcaagagcaccaattccagttccacctgttaaaattcttgaaacttcaatttcacttaaacttcttctcttagaagttttttgtttttttataactacatcaaacttttcagcattttcttttattgatttattagcaagaacatcttctctgcttaaaacctctctaccccatgccggacggtaaaaagtcatttttttaggcataattaacccattaaaacttgtattttggctttggatattttgtactttcatatttttccctttctataaagccaactcttctttgttaatcaatattattttactacttctaatgtttcatagtcattcaagtatggcaaatgttcttctgttattaactctccgggaagtagaatagaaatccccggaggacattctgcaacaacctctgctgaaatccttccaattgcttctgattttgaaatggtttctttttcagcataaaaagcctctcttaaactcatcttgatttgaggttcaagaagtggcatgtgtttgcggttttccaaataataaatatcttgataatgtgttgatgcaattttttctaaagcgtctgctaaatatttgaaatcagaacgtttattgccaatgttgcataaaatcaaaacgccaatgtcggaagctgattcaacttcaattccaaaatcaatttctaaaattgactccaatctttttcctgaaagtccgtcaattctgataaatacttttgttacatcagttttatagccaaaatcgcctttaagttggtgtaaatttggaatcgcatcaagtcttgttctcaaatattttgcatttttaacagctctatccaaaagtttttgaccggcttttgactgtaaattagctctagctgcgtcaagacttgccaatagcattaaagaagggcttgttgtgtgcaaaagtttcaaagctttttctactgccgcatcatcaagacaagagtctttagatatatgaagcattgagctttgactcatacttccaccggttttatgcaaagaatgaacaactgcgtctgcacctagtttaagtgccgtttcaggaagatgtttattaaaattccacagacagccgtgagcttcgtctacaataagcggaattccatattttttgcaaactgcgcttattgatttaatatcagaaacaacgccttcataagtcggatttgtaatccaaaccatagaaacatcatcgttgtttttgattaattcttcaattttttgtgcatcaatatttccccaaactgaccaatcgtcaattttgttcgggcaaacccaaataggttctgcgcctgaaataatcaatcctgttaagattgagcggtggcaatttctgttgacaatgattttttgtcctttttttgttaaagccattgccaaagccaagtttcccgcagtagaaccgtttaacaagaagaaagtttttcttgcgccaaaagcttgtgctgccaactcttgagcttctttaatcggtcctgtagcaggatgaagtgttccaagattatcgaattcatcagtggtatcaacatttaaagctttgtcaccaataagttttctaaaatccttaaaaatagcttttccttttgtatgtccaggaatatgaaattgataagtcggattgtcataagcatttttaagcgcatcaacaatcggcgctttgatttttattacttctttttcttttatctcactttttatattttttaaatcttttaccactaatttttccctttgattgatattgacacttaatacataatacctgaaaaattttatttttgctaaacaaagagaaaaatgttaatttttatgacatttaattttttataaaacttctgctggttctgtcacagaaacgccagaagttacaaaccgtaaattctgcaatacctgataatcatcattaaaaggattttctttcagatttcccaaaataaaatatgttgaaccggagccggacattatagaattcggtaatttttcttttatcatttgcaattctttataatcatcaaaaatcgcatattctaaatcgttatataaaaattcttgcaaattagaatgattttgtattgcttcaatcattttttccgtcatattgttttgcggcttaactttctttaacgcatattttgtataagcttcttttgctgaaatcccgagatttttaggtttaatcaatgtaacgggaaagttggcttcacaatcaatttttttgataacttcgcctcttgaagttgccaaaagagttccaccttctaagcaaacattcaaatccgatcccaaacttgagcaaagttcatgcaaatcttctctgcagaaagggtgattaaatatttcatttaagccgtaaagcgtgccggctgcgtctgtacttccgcctgcaagtcccgcagctatcgggatatttttttctataaaaatattaacctgtgccgaaatgccacttttttccaaaaataattttgcagctttgtaaactaaattcttttcattataaggtatttcttcacttgtaccagataaagtaatacttgtagcttcagatttttgcgcatcaattgtaagataatcacacaaactaactgtttgcataatacttttgatattatgaaaaccatcctcacgtttgtttactatttctaaagtcaagttgatttttgcaggacaagaaacttttatcataattaaaaatgccttacctttggattaagaagcatatttgcaagcttgtcagcaccttcaaactccctttttctaagttttgcactagctctttctttatcatattctacaaaatgatgttcaaatagacactcaccattatttactattattgttaaatagcaagatttaggttctggtgtaaacggacgtccaatacttcctgcatttactacggttttctttttagaagtttggaaaccgcaaggcaaatgtgtgtgaccgcataatacaacgtcagcacctacatttacgagcattttttcaacttcttctattggtgtatcaggcaaaatgtcttcattattttttcttggagaaccatgaaccaataaaaatttaactccgccttctgtaatttctaattgaataggaagattcttcaaaaaacttttttctatgggatttaaaagctctgcatcattttttaaagcctctgccataaccggagctttttcttttaattttgcataaagcccgtccgaataatccgcaatcatcaaatctgtattaccttgaataagttcaaatttaggattatctttacgagccataaaatattcaaccgtgccgttcggatcaggtcccgccattgcataatcgccaagcacaaagattttatcacattgttgtttttctatgtcactcataacagcttctaaagcttccatgttgccgtgaatatcggaaataactgctattttcatttttagctccttttgatagttttattttagcatgagctattttaattttacagagaaaaaatgggcgaagaaaattttcttcgcccgttttttataaaaatttcttataacaattcttttaaatagtttggcaatgcaaatcttgcattatgataatctttgttataaatcttacaagtttttgtaattgcttcgcctcttctttcatcccaataagaaagcggttcaacttcttctgaacaaaatgcccaagcccaatatccaccagggtatgttggaatgtttgatgtaaatgttgaacaaattgggaatacttttttaagaagattatacatttttttgatttcttctttgtttacaaaaggtgattctgattgagcgcacataattccaccttttttcatagaattcttaacgtttgtataaaattcttccgtaaacaaaccttccccaggccccattgggtctgtagagtcaattagcacaatatcaaacatgtcttttttgtctttaatatattcaatagcgtcttctacaagaatttcgcattttgggttatcaagttcgcaagcaattgttggaaggtattttttgcaagcttcaattaccaatccatcaatttcgcacaaaacaactttttcaacggtatcatgttttagaacttctctaacagttccaccgtcaccacctccgattacaagaactgttttaggtgctttgtggtgcatcattggaatatgagcaatcatttcgtggtaatgaaattcatcaccttcggttgtcatcattaaatcatcaagagtaagaattttacccaatgttgaatctgaatcaataatttctactttttgaaaaggtgactgttcagaaaaaagaacttctttttgtttaattgctataccaaaacctgatggtgtaatttctttgtagaattgtgtcatagtttaatattccccgctaatatatgtatatgcaggtggaaaacttcctgtcctgcctcttttcctgtgttaataaccgttctataagattttagacctgcctttttagcagcttccttaactgtcatcattaatttgcccaataaaacttcatcatcaagctcgtttaatgattcaacgtgttttcttggaacaacaagcaagtgagtatctgctttagggttaatgtctttaaaaacaacggcatattcgttttcgagaacgaattctgtattaaaatccccgttaattattttacaaaaaatacaatcgctcataagccactccttttgttttatggtaattcaaaagaagatggtttgcaataagttaaggcgttctcttataaatagaagtcatcaatattttgattgtagtaacaagaaactacaagtaacatttaggttcttgtccaaccacacctgcataaagctcaacatattgttttgcagggcttgagtcaatttttgtaaacaaaacttcttcaatttggaaaaatcctacatcacctgtcatttcaacagtaattttgataggtttcttttctccgtgttgaattcttattctatcaatagcatttgcagaatatttatgaatgtcaccgacttttggcgttgtattcattgcaagaggtattctcgcacggccttttgtcatgtcacatccgtctgcaataagaataattcccgcttctgtagaatgaatttttcgagatgccatgtgaccgataatcgcttcaattacaagtgaacgaataacaacacgtctgtgtaaatcgtttggcaaaatgtgcatcaaagctctttcaacaagcggttttgctaaaattacagacatttcttcgtgaccttgacgtcctatcatcatgcctaaatcgtgcattaaacctgctaaaattacggcacacatactatcttcaaaagttccgatttcttctttttcaagcgatgttttgattccacattcgtgaagaatgtttaacattttgatagagttcgctgcaacctgtcgcatgtgaacaggtccgtggtcattgtaacccaaacgtttgattgaaacattgttagcataatcctgcatttcttgaagctctccgtcttcaaacaggtaatgtgcaagttccaaacatagagggtgactttgtagtcttttaagaatcttagattctactgatatttcttttactgatttcatagctctatttatattctagcacatgtttttagtaaaataaactacttgaaaaaatgatttaaatttatcttatgcaaacaaattgtgatattttaggcatgaattgtttttattgtgcaaatatgttatgttaaaatagggagttatgtaatatggtgaaaaaaatttttgcgtttgatatgggaaagtctagtattggttattgtgctagagaaggtttgaaagttttagaattaggttctttaatcattgacaaagaccatgctgaaatcgtttcaaacagagatagaagaagagtgtttaaaactttaaatgcacataaagcaagagaaaagttttttaatgatttgtggaaatcttgtaacctagaaccattagaaaaagaagataaactttttaaaaaagaatttggtaaaaaggatgaagaaactatatataattcaaccttgctaagaattgcattattgcaaaatatagaattggaagaatggcaaatttataaagctttacattctgctattcaaagaagagggtatgatacaagcttagcatgggcaaatgcgaatactgatgatgaaaaagaaaacaaaaaaagaactttagaatatactacgaataaggagaatgatgaattaataagtcaagaggaatataagtacccttgttactatgatgcaaaaagattaggtttatgggaagaagaaaatcctaagacgttgaaaacttatgttgacgtatataacaatgataaaattagaactgcagggattgttgcacctagaaatatggttgagaaagaattaaaacaactttatatcaatgcacaaaaacagttgccagaattaaataaatattctgcggattattttctatatggagttagtgaaaaagcttatgcaacatatttagatagtgattataaaaaatatcgtggcacaaattgggaatgggagaatggtggtgttttaggacaaaaaattccaaggtttgataatagaattatagcaaagtgtaaattgttaccaaaacgaaatgtttgtaaggcagaaactgtagaaaatgtttctttagtgctattgatgaaattaaaaaatctccgttttacggatgttttgggcgaaaaatcgatgctttcagcagaggcaataaaacagatttatgaaaattggcaaaagaaagcgaccaaaaatgatggttctataaaactggataccacaataacaaaacaagaaatagaaaaagttataggcgaaaaaatattagaaaaatttgagccaatgaaagcaaaactttccggtcgctctagtttttgtcgtagagcttgcaaaataatgtgtaaaataatattagaaggaattgaaaaccctgcaacaatggacgttggagaatttattgataacattgatgtaaaaaatggaatcacggaaaaagaaatacggactatgttgtcaaaaattggtacttgggataatttatatattcctgataatcgttatgaaatggcagaaatttcaagtgatgaaagagaaaagacagatattttaatcggtaatataacgaacgcaattgttagaaacagattacaaatatttagagataaaattcttgagcttaaatataaacatggcactcctgatgaagttatttttgaatttgtaagagatgataattccctatttggagctaaaaaaactcaagaatacataagcaatattaataaaaatcagaaagaaaatgaagaaatagcgcaacagttaaaagatgcaaattgcttcagttctaaaaatcttgaaaaattaaaattactacaaaagcaaggaggacattgtatttattccggtagaccaattgcaataagtaatttagaagagtgtgaaattgatcatatttatccacgttcaagaggtggaaatgatgcattgtcaaataaggttttgtgttacgcgatagaaaaccaaaacaaaaaagaacaaactccatacgaatggttgcataataatgaacactcgtggaatgagtttgtaaaaagagttacaaataagcaggaagcattaggtaaaataaaagttaaactattgataagcaagcctgaagatagtgaaaaattgataaaaagttataatggcttagcggaaaccgctcaaatagcacgagtagcacaagatataacggctttcgtttttggttggggtttgcaattagagggtgaaaaacgcagaatatttgtaaacaatggtgctacaacatcagcgattagaaaaacatatagattaaataaactattaggcaatgatgttaagaaaaatcgtcaaaatgataaacaccacgcattagatgcgatatgtataagcttttcaaggggttataagtataatgcaacaaccaaacgggatgaaatagaaggtttagatatccatgacaatgaatttagagacttggttaaaagtagcattgatagtttattgccatatccatattctaatgataaaccgtttaaggggaatataaaaccacttgaaacaatctatggatatcgaaaacttggagaaaaaacatatataacacaaagagtcgatattacttctattgaacaaaaagataaaaaaattaaatctatcattgatgaaattataaaaaatgatttgttggcaaaattagaagataaaatgacatcaaaagagtgggctaatatgttatcgaagtatgttcacccaaccaaaaagacaagggttaaaaaagttttattggttgtgtctgaagggattacaaattttgatgaaaatggtagagctagaatcggagaatttgttgattttggaaccaaaggtactaaacatcaatttaaacattcaaaaggccataaaggacaaattctttattacaacgaaaaaaatgcaataaaagttatgccaatttatgcaaaccaaaaactaggtgaggttaaagacaaattggaacaaatgaattgcaaattatataaaaaaggcatgatgttttattcaggttgtttaattaaagtagataaagaatttgaaggaacagcatattatacgattgcagatgagaacggaaaagaaaaacaaactcctaagaaagaaattttaccggctgggatttataaattgagaactttaaaaagtgatggaagagtacaacttgaatcttctgttggaatagaaatttggacaaatgctaaaaatctagttgatacagatttcaaaaaattgacaaaataaaaattgtcattacatgcatgatatgagttatcatattttgcatatcacaacaccaaatgttaaactgtattcagacaaaggatttttttgctgtcgatttgatgacgaatctgaaaacagattaccaatagatgatattagagctattattattgctactcatcaagtatctttttcgaatagttgtcttgcaaaattattagaaaatgatattatcattttgcattgtactaattcttataaacctattggctggacggttagtttagatagggttgttagaacaaaagctttttataatcaaattctgcaaaataaagaatttgaaaataaactatggaaacaaatattaaaggcaaaagttttaaaccaagcagataatttaaaattaattggtcaaaataatgataatattctccgattaataaataaaccacttatgaatgaagcaaatatcgcaaaacagtattggggaatgtactttgataccttagaagttccgcagaaaagagaacataaaaacgcagagagttttgaaaatatttgtttgaattatggttatgcggtttttcaaagtttgttgtatcgttcaattttaatacacggcttacttccaaatctaggtattcatcatgaagagaaatataatagcactcccctagtgtatgacttagtagagccatttagagcttttgttgatttttatttgtataaatttaaagttaatgaagggggaagttttaaaaagaaagatttaaaagcttggaataaatattttgctttttgcataaaaaattacaggttgaaagcaaaagactacagttataaaatcattgattatattgatatttatatagaagaaattgtaaattcttatatcagatttaatgttgaaaaagtagttttgcctaatcttaaagagcaatatttacatattgataaacataggaatagagaatatgaggagtaaatatcgtatggggtggctttttgtttgttttgatctgcctgtaggtgaaaaagaggaaatgcgacaagcaaatgcatttagaaaatcattgctaaaaatgggatattttatgctccaaaattcaatttatgtccgctcttgtgttacttacgacaaaacagaacagcatatcaaaaatgtaaaactaattgcaccaacaacaggaagtgtaaatgtgttttatcttactgatagacaatggagcctgtcggtttgtattgaaaaagttgattataaaatatcaaaatacaaaaagaagataggtgaagatggtgcaaaacaaatgacattctggtaattttttgttagaatgttattatagatattctatttttaaaggatttagagaatgagatctttttcgtactgtcgtagaggaaacgtctattccctggtcaattctgactggactcttaacttaaaatattttacaattttattatatcatgattatttaaggttgtatatcctattataacatattttaaattaagagtaaatcaaaacgaatgaacaaacacgtaatcaatttcaaattataacatattttaaattaagagtaaatcaaaacgggattgcgacaatgttgttctttttggcattataacatattttaaattaagagtaaatcaaaacggaacaactgctattgcttgtaagcgtttgattataacatattttaaattaagagtaaatcaaaacggggaattacaaagctcttacactcatatattataacatattttaaattaagagtaaatcaaaacgcgaatgctgattattattgctaaaataattataacatattttaaattaagagtaaatcaaaactgtactgctggcgtatcttcccatattgtattataacatattttaaattaagagtaaatcaaaacaaggtcgccaccttgtaaaacaacctctgcattataacatattttaaattaagagtaaatcaaaacacttcttcttatcgtgtaatgcgtatcaaaattataacatattttaaattaagagtaaatcaaaacatacacttgtctaggtgtgcaattaagaccattataatatattttaaattattagtcgtaatatattttaaaacttcttattcttgttgtaaaattaaacaatggcaaattttgattttttaaagaagatagattctaatttatatgaaataattatggaagccgaaaagctttatgcgtcggagttttttgaacaatgcatggggcaaactcgaagatttggggaacaaatgtgtaaagctattttagcagacaagcgtcaatatgacggcagttttgatgaaatgcttgcaaccttaaaagaccaagcaacttcgattcctgaaaaagaatttatcgacgatttgtatttcttaaaaaaacaaggcaatatttccgttcactcatcaacagtaaaacgtgatggaataacagcgttagaatgtttacaaagagcgtttgaagcaagtttaaattatgcagttttttataaaaaaggcaataaaacaattctaaaaaagcaatatgatgtagaacttttagttacgggtaaaccgggtttaaatgaaaaatacgaagctcaaaaacaaaagacgaaaaaatcaaattctacaaaatcaacgacaaaaagtgcaccgaaacagtcttatacaatgaaaccttcaaaaccgaaaaaacaaggtagtataaccccgttttggatttttgtaggtgttgcatcaattgtttctctagtgatgttaatctttatggcagttattgcttaattcaaaattctttaatctagtttgtacatcttccataatcttacgattaatagaaagcaaatctccgattattgcaataatcgtcatttgaactgcagatattaaaagaatagcaactaatattaaagattggatatgaccgtttccgtttccaaaaataaaaaagtataaaaatctgagtgcgataataacgcctaaaaaggccaacatgcctgctattgttataaaaaatctgaatgggcgataaacaataaacattcttattgttgttttcattgatttaaaaatataatcaaatatatttttaactaatttagactctcgaagctgttcgtttaccctaatttgaacagaaacaacttttaaacctttggcattagcttgtaacaaagtttccattgtataagtataattatcaaatacgttaatcttaatagcagcgtctttagaaaatgctcgaaacccgctcggcgcatcttctacttgagtagaagacagaagccttagaacaaacgaacctaatttttgaaaaatcttttttgtcggtgagaattctcttattgaaaaaatatctcttgcgccgattacgatatcagcttttttctccaaaatcggtttaaccagtttagtaatatcgtctgcacaatactgattatcagcgtctgtattaactataatatccgcacctaaattcaaagcttcttgcaaaccgcttctaaacgcgttagcaagtcctttgttcggtttgatattaaaaacttttgcgccccatttttcagcaatttctgctgaattatcagtagaaccgtcattaattacaaggacttgaatctcactaattccttcaaccgttttgggtaatgcttccagtgtggtcaaaagcgttttttcttcgttaaaacaaggtatttgaataataagctttgtcatgtaaaatattatatataaagaaagagggagtggcaagatttgttgttttttgtactacttgtaggatgtattttaaggctgagtttcataaataagccagaaggcttatggaacgatgaatacgtaagttggtatgtcgctaatactccattccgagaaggtttttggcaagaagttttaaaacaatgtcacatgcctttatattatttgtacctaaaaccatttacacatttttctgatatagttttacgtttaacatcagttgttccaagtcttttggcaattgttgttatgtaccttttaggaaaagaatactctaaaaaactcggtttaatttgtgcaacaattacatccgttctttcatttttaatttattacgcacaagaagtcagattctattcgcttcttttcttgttttcggcattggctctgcttgcaaccataaaattaatcaaaaatacaagcaagaaaaacgttatattttattgtatttcaatgatattaattcttttaacgcatgttttgggcgggatttttgttttatttaatactctttatgtggtttataaaaagaaatgtttttctaaaaaaatattattatatgtattaagttgtgcggttttcctacttccgttcggattaaatattttaaaaatgcttccgtcttctcaatggtggggacatttttcttacacaaacattttgtttttgtttagtgattacttatcacctattcttacaaataatataaacgcaccaacggttttcttttataataaatctttggctttttggatggttttaccattagtcgttgctttttatccgatttgtattggtattaaaaaagcaaaaggattgagtcttgttgcagttttaacagtgcttacaatgtctgctttagcattaagtggcaaaattgtttttatcacaaaatattcaatcgaaatattgccaatacttatttttgttttagctttaggtttggaaaacttaaaaaaagttggcaacattcttttggcactctttgtcttaatccatttgagcgcatttttcacgcctaattatgttataaaaatcaaacgtacagaaggcaataggattcctgctgaaataatcaaagcaagaaatcctaaaaatattatttttacgtattatgaaccaaataggttttcaagatatgtagatttaaaagaaaaaaatatttattacataagtaaaattaacagatttgaatatcaagaacaacctgaaagaattttagaaaatgttaaagctggtgaaacagtttctgttgtttttttggatagcgtaagtttttttgatgaagatttcgtaaacaagcaaaaaaataattccaaaattcctgaaatgtttttaactttctcacatatcaaaaattcactggttgcagaactgaataatgattttacggattttaaggttgataaactcggagcttggacagtaattactgcaaaacgcaaataaacccctacatgttatcaaaatttcctgcaagaactcttagagctttgtcttctgctttttgagctctatctaatgctgattgcaaacctgaattatcaaatgttttttgaatatttgctgctgcctgagacggaatatatcttctttggttttcatttgttttatcactagggattttacattcagaagatggaatataagtataattatctacgccatttttctttgttttatgaggaattacattttttgaagaaggaatgtatgtataattatcaactttttcatcttcagaataaacttgaggaatcgcattgctgtttgcttctcttcctcttgttgccatcatttgaccttgagggttaatttgttgaacttgcggttgtttaccatattgtttgattctttgagtttcatataatcttctgtttaaatcttctgccaaaaattgtttttgttcttttttagctgtttcatcttcttcatgtttcattgaatcataagatttaccgaaaattgttgttgaagcttttttgatacctgcatccaaaacgcccattgaaatcagaccccaaataactaaacgcattggaactccgcctacatttctgaagaagccttttaaactacgacctatattggcaacaacattgctacctttgtatcctttaaatgtttccaaatccattgtaacaaattgagcaagttttcttattccttttgtgaaaatattttggtttggaacttttaatttattttttacttcttgttttgcaatattatatttttctttattcgcaaatccaccagcgcttgctttttcattgaaatcttttaaagcatttctgaattcttctacctgtttctttgtcatgccagcatattgcgcaccacataatgaatgcatcatctttaatgcaagtgggaatgttaatacccaagatgttgattctattacaccaccaacagctgtaccgattttttggtcattatcagcctttttaacattacatcctacttctacaagagcaggagcaataaataacaaagctccaagtttaccaccaccgaatgttatgcctctgtgaaacatttgcattgctttagacataaaacgacctgttgctgttttagtaccttcttttgataaactgtgcaacttgttataaacttcatcacaaccaactgttctttcaaaaggttttgttaaaggtcccatccattttgaataatttccggcgccgattttaacttttccactaactcttttagcagcgtcttcaactgttttaatatgcttgccaaacatatcatcttttatttcattaagctgttttacgtttaatcccatttcttttaggatttctttttttgttgcagcaacagctccatcacctaatgtttgaatttttttaatttcttcaggcgaacgtcctaaacgatttaaaagtacttgtactactgctttttcttctggaatttctgaaacttttgcaacgttaaaagcagacttaagcattttcttttctgcggaagtcaaaccaatatcttttaattgtggacaacctaattcgccaagttttgaatttgaagatttaaaaaatgacataaaacccggctcttttttatcttgtcctaacatcaatgtatcagcaattttaataaaatcttgaacaacctcttgtttttgattaaacatttgagatttaaccatactccattcaggcatagaaggtgtatcacgcattgctcttaagattgcactattttgaacaacttttccaccttttttcttaagtgaagaaatgccgcctaaaacggtttgaacaggtttattttgaataagtttagaattttctatgctgtcaccaagatttgcagcctttttaactaagctgtcttcatattttccgccacaagcttttgcatacgcgtcaattccaacgccaataccaagccaagtagctaaagttaaaataggatgttcgatatacggagtcatcattcccatcgcatccgcgtctttaactgtttccttaaaacttttgtgcatcaggctattttccggcacataatagtaactcggaatttttacaggctgttgttgctgattagcttgttgttgcctgtattgcatattattatattgattaacatttggattaatctgtgtcacaataataaacctttataaaccttactatttatataaagtcattctctaaaaaaaaattgcctaaaaaaacatgatttttaggcaatttttaacttttgtaacattttatctttttatcacactttccaatgtatcaatcgcgcgtttcgccaataattcatttttaagcttcttattttttctttctcctttcggaagttcaatcgttggcaaaataccccaatttgaattaatcggctgtggtggaagatatcttaacgaattatcccttgaagatatatgctctaaatgcgctttgtccgtaatataaaatgttattgctccaagcatcgtttcacgcggcaatacaagctgtgcttctcctaaaagtttttttgccatattaatcccggcaagcatacctgttgcaatagattctgtatatccttccgttcctgttatttgtcccgcaaaatacaacccttcgcgcgcttttgtttctaacgtaggattaagcacttgtgaactattgataaaagtattcctgtgcataacgccgtaacgcacaatattcgcgttttctaaccccggaatagaatgtacaagttctttttgtgctccccatttcaagtttgtctgaaaaccaacaagattaaataaagtttttgcagaattatcttgtcttaattgtacaactgcatagttttctatacctgttcttttatctacaagtccgactggtttcattggaccaaatctgagcgtatcaactccgcgagaagctaatacttcaacaggaaggcaagactcaaaatactttgaattcttatcaacttgatgttgttcaattcgaggagcattcacaagtatattatagaagttttcatactcttctttattcatcgggcaatttatataagaggcttctcctttatcatatcttgaagcccaaaaagctttgtcaaagttaattgattcaacttcaacaattggtgcaattgcatcaaaaaaatgtaaatgttcactcttagtaaaattttgaattgcatcagcaaatttgtcacttgtaagagggcctgatgcaataattacatttccttcaggaatttctgtaatttcttctctaattaattctatatttgggtcatttttgattttttcagttacggcttttgcaaaatcttctcttgcaattgctaaagcatttcctgccggaacagcattttcataagcaattttcaaaagctctgaacctaaaaattccatttcttttttcaaaagtccgctagcgttagaaatatcggcagaaccaagactgttagagcatacgaattctgcacaatcttcggttacatgcgcaccggtagttttatttggacgcatttcatataattttactttaattccttttttagaaagctgtagtgcagcttccgagcccgctaatccggcaccaattattttaacttcttgcatataaatccttatttgttgcactccgaacaaaattattatacagggaagaaaccaataagtgaagcataaatggtaactgcactatccggaggaggggatggaaaattaagtagaactcttacaaagcttagtttttcgggtgagagatctgcccttaggagttcttagaatcgtagtgtgtaaatttttgcaccaaaaacaggtgggaaccgctcacgcttttcccaccctactgcctatcagaaagaaaaagggtgcgctcacgagcgcacccttttaaatataatgttttaaaacaattttccactttccattttcaattatccatttaatcaatatcttccaacctgatttctaccgtgttctttcgcgtaatacaaacctttatccgcccattcaattaaatcttgtggagtttgggcattttcagggaaagttgcaacaccaaggcttattgttacaggtgctgtatctacaggtgtcaaatgaaacggtttttctgcaattgctttacaaattctgtttgcgtgattcattgcttcttctgcagaagtgttaggaagtataatactcatttcttcaccaccatatctgcaaacataatcagttgttcttgagttctttttaagaatttgtgcaacttgtcttaaaaccgcatcgcctgcttggtgaccgtatgtgtcattaaacttcttaaagaaatcaatatccgcgataatcaatgaaaaagattgattgtatcttcttgcgatatccatttgctttcttaaagtatcttgaaaatatctgtgattataaagttctgttaaaccatctattgtagctaatttgtattgatattcaaaatctctggctttcattaaatatttagctaggaatgataatgcaaaagctgccattattgccaatgtcggtaatacaacaggaatccacaagttatataattccatcgcataaaaagaaataaataaatatgctattgcaaataatgaagttgataaaaacgcaaacaatgtagaagttgaaagcattacaatagcaccaaccaaagctataacacctgcaataatcaacacatttgttattgttgaagttttatgaataaaattatcgtctaacatattattaaagaatgttgcgtgaacttctactcccgggtaaacat

SEQ ID NO: 2049 - DNA, 23069 bp, synthetic construct
  misc_feature 1..23069: note = Synthetic
  source 1..23069: mol_type = other DNA
cagtaaccaatttgcagttccacctattgctgctcttggaaacgcttctgacaaatggcttgctgctgcaacatcataagcaaaaaggcttaatgttggtgaataatttgccatttttgcatgatatttagcatttaaagcctttttctttgctcttagttgttttaattgcggattgtttgccttaacattctctttcattgcaacaacatcaattgtgctatcgtcataaacaaacaacaacgaatttggttgaatataaatatctttcagatttgcttcttgcgcttttatcaaagttttcaaaccttcttctactacatttgcatctctcaaagatgctttgtaatcacgcattgcatctgcataagcaacttctgcatgtaagcgttctgattttgaaattataccttctttttctaataatttggcatcttttaagtgttgtgcgataccgtcagcaacttgttttctaacttcaacaacatctcttgccattcttaaaccgtaatagcgttttacaagttctaaagtaagttcatcttgaacctctttatatttttcatttgaaacctctaatttagctcttgctgcagcgtggtttgataataatttaccaccagtaaaaatattccaaacaacagcaccaccagctgtaaacacatttttatcttgaattggtgttgttatacttgcaggaattacaggtattgtagaacctgttggggaagtcaatgtcaaatcgtggttaaaatgaatataagtggcattcaagccaacttttggagaaaattgtcctaaggcagaacgcttttcgtacttcatttgtttaattaattcgttataagcctttaatttgttattattttcaagcattaactcatacgcttgctcaaaagttaaatcaatatgttgaattccgccttttttaacctctgcactaaacgcaggttgcattaaaaacattccagctataaaaaataaacttaaaatctttttcattacactccaaccaatcgtaaaaatctttccataatttcatcttgcttttcaaacaaattgtcattctctaatgaacattcaatataactatttataattccatcaaaaattacagccaaaagataagcatcattatcttccattggttttaaatccttgataattccagcacaatagttgtaagcctttgccattggatgttcttttctacgagaaattcctcttaaaaacaactggttattttgcatataacccttaatagtagttttattcttttcaaaatatttaatcttatactcaacaaccatttttaatttttgtacaggatttgtttcaacatcgcaatattcttgcatttcagcagaggcattgtcaattatatactttagccaagccatgaacaagccctcttttgatgcaaaatatccgtaaatagtgccaactccaatactcaaatcttttgaaattctatcaatctgagttttttcataacccaaagttttgaaatactcgcttgcagtatccaatattaattttttcttaaattcatctactttttggttcatattaatcatattagaatattattccaagtcagaatgaaattctagattaaaattttaattctttacaaatttaaataattaaatattttaagaataccgcaatgcgttcactctcgtgcacttatgtaatatgacatgacaaagtgacggcgaagcctttggcttcgccgtcacttaaaacaaattatttttcaaagactacattgctttaacacattcaaataacaatgatttgaatttacctttaacagcgtttgcagcttcaataacttcttggtgagaaagaacttcacctgtaataccagctgctgcgtttgaaatacagctaatacctaaaaccttcatgccacaataatttgcagtcatcgcttctggaacagtcgacataccaactgcgtctgcacctaacaattcaaccatttttgtttctgatggagtttcgtagttaggacctgtaagagccatataaacaccttttttcaagttaatatctaactttttagctgctgtcatagcgatttcttgcaagtcttttttataaacttctgtcatatcagggaatcttggtcctaattcttcatcgttaggtccaattaatggatttacgtgcataaagttgatatgatctgtaattaacatcaagtctgaagcgttgaatgttctattaataccaccagcagcgttcgttactattaaagtttttacacctaattttttgaacacttttacagggtatacaaccttttgaattgggtgtccttcataatagtggaaacgaccttgcatcattacaacttttttaccagcaacagtcgcaaaaactaattgtcctttatgaccttttactgttgatgcctcaaaaccaggaatatccttgtatgacaatgcgatatcacaaaaatcatctgcaaaatcgcctaaacccgaacccaatacaattgcaatttcaggtgcaaaattgtttgttttttcgttgatataatcaactgtttcttttaattgcatctattaaaatctcctaaataaataataaacactatcctcgttagattaaccaacaagtctattatcatcggcttctgacgctttaaccataattgcgtgttctaccggattttcttttttataagagttatcaaagttgttgtattcatcaaaaccaaaagcatcttctcttgcttttcttgcttggttttcatctactaattttttagccaattcagcaatttcatatactaattggtatctattttctgtattttcgtttaaatcccatgcaactctaataatttgatccattttaaaacctcatatttctttcgtttttaattttataatagaaaaaatttttaatcaagaacaagtttttactcacataattaaatccactaaaagcattactatctatatgttttagcccatataagttaagccatttttatcaaatactagccattcagctagtgtaatactagacggttggttaattacaaaataatagaaagtgtaatttaatagaattgtaataagcaaaggagagttaaaaatgtcattaccccaaactaaaactatatccgtagttatcattgaagacttcaaacttacaagagtaggtctaagatgcgctctaaacgcaaatccagacattgaggttgttggtgaatgtgaagacgcatttgaaggtttagaaactataaaaaagactaacccagatgtcgttctaatggacttaggtctaccgaaaatgaacggtatcgaggcgactattaaagttaaagaatttaatcctaaaattaaagttattgcactaacttctcacgacagggaagaagaagtgcttgccgcactaagctctggtgcaactgcatattgtctgaaagacattgacccgactaaacttgctgatgttgttagagatgttgcaaaaggtgtttgctggcttgacccagaagttgcacaaatggctttaaactcatttccaaaagttgaaagcactagaattttatctaactcaatgtcacaagaaggacgagttccactaactgaacgtgaatacgaagtgctaaaacaccttgttatgggtaaaagcaacactgaaattgctaaagaattaattgtttctgttcacacagcaaaagctcacgtttgttctattcttcaaaaaatgtgtgtaagtgaccgtgttcaagctgcagttaaagcggttaaagaaggattagtataattctcgataatctattggcatatattatttgttatttcttctatgtacgaaaaaaacgggcgatgattttatcatcgcccgttactttttaaaaccttattttctttctctttttctcgttgttctctctcgcttatgttgaatgttgaattgttgttgaatattgaatgagtgtattttatttattaacagatacggtgtgtgttttattatatctacaaaaagtcaattagtcgatatagcaagctaaaacatcttgaccttgagctttcatttttttcaaggctcttaattcagtttgtctgatacattcttttgttacgccataaatgttgccaatttcttctaaagttctttttgccatattgcctaagccataacgcatttttacaacttcttgttcacgttcttttaatgtagaaacaaccatttcaatatcgttttttaagccttcatattctactgctgagtgtacgcttgctttgtcatctgctaaaatatcagccaatgaagtttctttgccgttatcattttcaaaaccgccttctaatgaaactgattttgaatatgcagctaagtatgtatcaattttgtctgctgaaatattcattttttctgctacatcttgagttctaacttggcagttgtattctctttccatttcagatttgattttagagaattttgataatgtttcttgaatgtatacaggaatcttcatgcagtgaccttgttcagaaattgctttaaacattgattgtttaatccaccagcttgcataagttgaaaatttgtagcctaatttgtaattaaatttttctgctgcaatcattaagcctaaattgccttcttgaattaagtcaattaaaggtaagctagacatgtgaattgctttttttgcaattgtaataactaattttaagtttgcttgaactaattgttttttagcttctttatcaccatcttgagctctttttgcaacagctttttcttctaatggtgataatgatttgatagaagctaattctctaacatataatgacaatgttgtgtcattatcgctagctaaaacttctgattttgcaggatttgtaaaactttttttcatttcaacaggacaatttttcataagcatctctcctcattctaatattcaactctcattttattctcttggttttaatttttattttatttataacgacgattttcaaaaaatcaacatttttgcatgacaaagtaagctattaaaacataatttttaacagacgaactaaactgcacgaatcttattcgtactttctctttcttgtggtggtaattaataaaactaaaaacagacttttaaaattttcttatgcaagacctctaaacttgcaaaacgaagtatatgatttgtatatctttagtatatcagatttatataaaaatttcaacccttttatgaagtaatgttaagataactttatttttttcttgatttacttaacatttgtttacaatttaaaatgtttgtctttttagtgaaaaccaaactataattagaatacaagttcttttgctataaaaatcaaactaaacattaagttaaaaaagtactaagtaaataatatatacatgtttaatttataatcagattatggatactttagcacaatttatacaaagaaaacgtgaagctttaggcttaactccacttggtttgtcaaacaagtgcaacgtgccaactgttatcatagaggaaattgaagctggtagagaattattcctatccgtcacaatccgacaaaacctagcaaaaggacttaaatgctcacctgaagaaatcaaaattctggaaaaagattttgttacagaagaagttccaatggaggttatggacgttttaaaacaacgcatcttaaatggagaaacagaattgttctgccctaaatgtgaatctccacttgttgttcgcattgaaaaaatgtatgacattgaagataatcttgagcttgtacctagaggctactgctctaagtgtgtttttcaaatcaaatagcctcaaattcagttataatcatgcaaaaacatgttacaattaattaacatttaatcaaattttggcaatttttatatttagagagctttatcataacatcaaagggaataagtattcacataatataaggagaaaattaaatgtttacaggtgttcaatcttacggttcattctatcgcccaagagaaatgggtgaaactccggctgatatggcaaaagcacaacaataccaaaagcaaaaatcaacacctcacgaatatcgtggtcgtgaaatgggcgaaaaaccatgggaagttccatcaagagaacaacaacaagcaaattatgataaagcaacagcaggttacgcatcagcacctactcgtggaacatcaagcagaccaagagaaatgggtgaaacccctgaagatgtagcaagaaataatcaacctaaagatagcagacaaagagaaatgactgaacaagaaaaaagattggatatgtacgcataatcataaatatttaataaaaatggcgaccgataaaatcggtcgccatttttatttacaaggcgtcgcaaagaatttgcgacgcctcatcttagtttcttatcattttagaaacagctattgtcatttgctgccattgctactaatgataccagaccacccgcaccgactagcgcataaactattcttgaccaaactgtcatatcacccattaagcgggcaaccaaatcaaagttaaatacaccaatcaagccccaattcaaagcaccaataataactaataagaaacttacaagttttacgtatctcatatctttcctttcttttcatatatattttaaaagtatttcatgtgttttttattcgcagaattatttatttttaagactttttatactacttttgtgtataatttatttatgaaatttttaagaacaatcaataaaaccaaatactttttattatttttaatttttgggttaggtctgtttacctatccgatgttcttaagcggttttgataaattagcgggtgattatggtgattcaagacttattgtatatcttttagaacactatttctattggtttcaaaacatagagccacacacacaactatggaatgtcccaatgctctatccacatgcaaacactcttgcttattctgatatattcttaggaatggcgattttttatgttccgttaagatttttaattaacgacccgtttttagttacacaaattatatatataatgtcttgcgcacttaatttcgttgcattttacttaattttaaataaaatcataaaatttaaagaccttgcaagtgcttgtggtgcatttgtttttgcattttctttaacacgttcagtacaagttaatcacctccaattaatactccaattcttctcaattttcgcattattctttttatttaaagtaaatttaaacaactcaaaatttgtgaattataaatattatataattgcaggggctttattgagtttgcaattttggacagcaatttatttcggatatttcacttgtttaggcctgttcttaggttgcactatttgtttgtgttttaaaaactcaagagaagtattagtcaattatttcaaaaatttttatggagaaatcatttttggcttgattgtatttttcatcttaaccttgccacttttaattcattaccacatggtcggaagttcttttgacaaagaaacattaatagcattacttgctgaatttcctcattggattagtagtttcagctttgtcgattttcctattgtacataactttatacctgccaattcagataaaatgcttggttgcggaattttaacaacgatttttgcattcgttggaatttataaattaaaaaattatcgatggcaaatattttcgtttattgcactaatagttgtttgctttagcgtaaaagaaatttatctgttccttactcatattttagtagggcttggcgctcttagaatgagctctagagtagtatttattttgttaccacttattgcgttaggttttggctatcttattgaaacttggaaatggaacaaacttgttttaatgggtgtaattttgttatttttggcagaacaaataccaacgaatgccagatttgacttgagcaaaactgagcattacaaaagaattaatggatatcaaatttcaggaagatgtgaaagtttttacttttattatcgaaataaaacaaatggagaatttaatacagactatgaaattgatgcaatgtggcttggacttttaaatggaataagaacatataatggttatagcggttacatgccagaaacatttgatttgagaggattagaccctcaatgtttgataattgctaaataaaattgctaattttaggacttgaaaaagagaaaaaatagattataatagaaatacaactaaattttcatggggacgtactggattttgacaggatgcttgatgggaataggttgcgagtccgagcgctgttctcggttatcaacgagcaaaacaaattaagtgctaacaacaatgttgtagtagctgatttctctagagcacaagctctagctgcgtagattaagttccgcagttcagccttctgagtagtccagcttgccgatttctcagaagccaccatgcaagacgcagtgcggtgatgattgtaaccgtatcaagctaacaatcaaggtgcggaacactttaaaatcctttgattaagttatcgggtttgacttttcctgacttagttgagtaaataaagcctacactcgtagagatttatttttatccattttggacgcgggttcgactcccaccgtctccaccaaaatacagaatatacttgttatattctgtattttggtttaatggtaatgaagagaaacgccttttgcgggttgcgtgagcgagctgatactttctaaaatgtttatttaccaagtcggtagaacttttataaaatcttcctttattttaatttgttatattcttcatcagtcacaggttctagccattcgtttgaagtttctataccttcaacctctactgcgatatgtgagaaccagctatcaggtgctgctccatgccaatgtttaacgttagccggaatgtttacaacatcacctacttttaattcttgtggttctttgccccattcttggtaatatcctctaccgccaacaactatcaacatttgtcctccgcctgattttgcgtggtgaatatgccaattatttctgcattttggctcaaaagttacgttatacattttaacttgttgttctgaaagtgatgcaatataactcttaccaataaaatattttgcataagctgtattttcattgccaataggaaacataattgtttgagcgtatttttctttttcactcattgcagttttgttatcttctgtccatacttcttttgcaaggttaaatgttgcccatgcttttggccaacccatataaaatgcacagtgagtaatgattccagcaatttctgtttttgtaacaccatgatttttagcattttgtaaatgatattttaaagaattatccgtaataccttgtgacatcaaagaaacaaccgtaataattgaacgagtttttaaatcaatatccttgttattccaattttctccaaataaaacatcatcgttgaaatgtgcaaattctggtgcgaattcacccaattgtgtacgacctgctgtttgaactattttttccataggtttaacctcctttttattcgtttttgcaaaagcaacaccatttgctaaaaacactaaaattaacaatatcgtgtaaaactttttcttcataatattcaacctcatcttataatatttacattttaacaaatgagagtaactctcaggcaatagggtttaatatttttttacaatttattaaaactattttttatatttttcatatcttttgcactacaaatgtaaaccaaaaatcaacagcacaagaacaaaaagcagttcttaacacgcttgcttagaaattaaaatttgcaaaagaagagttctcattgtatagagaactctttttttgttttatgaattttttaaattgcgcccttttttgtcgtagtaaaaaatataattttattgtataatagattaaaatatagaaagggatattatgagcaaaaaagtttttgcgtttgatttaggaaaagcaagcgttggatattgcgtgagagaaggttttgatatacgtaaagttggttcgattattattgaaaaggatcatgcagaaattacaactaatcgagatagacgtcgagttaaaaagactcttgaggcacataaagcaagagagcaatttttcaagaaattgtggcaaaatgcaggtttagaaactttagataaagaagacgaacgttttaaaaaagaatttggaaacaaaaaagataaaaatatttatacatcttgtcttttaagaattgcactattgcagaacaaaaaactagaacaatggcaaatttataaagcattatttaatgcatttcaacgcagaggctatgatgccaatttagcatgggctaatgcaaaaactgacgatgataaaaagaatgctgaatacatggcaaaatatacaaaagaaaataatgttgaactaataaataatgatgatttcaaatttccttgttactatgacgcaaaaagattaggtttgtggagtgaagaaaatccaagtgaattaaaaacaactattccgctaactggttctaaaaaagttagaacaaacggacttgttgcacctagagaacttgttgaaaaagaattaaaacaactttggcttaatgctcaaaagcaattaccacaattacaaaatatagatgccgaatatttcttgtatggagattatagacaagcatacggttcttacgttgttaaagaatttagaaaattcagaggtacaaaaaatgattggcaaggggtattaggtcaaaaaattccaagatttgacaatagaattatcgcaaaatgtaaacttctacctaaaagaaacgtttgtaaagcaaataccttagaaaatgtgtctttagttttattaatgaaacttaagaacttacgattgacagataatatgggcgaaaaattcttattatcaccaatagatatcaagaaaatttatgaaaattggttaattaaagcaaaaattgatacaaacgaagaaaaacttgataccacaataacaaaaaaagaaattgaaacagtattaaatcgaaaaatcaaagataaaattgatccaatgaaagcaaacatttctggacgttctagtttttgccgtagagcctgcaaaattatgacaaagattatattgtcttgcgaattatatccacaaaacgttgacatcacagaatttgtagataaaccaaatacacaaaatccgattacaattgaagaaattaacacaatgatttcaaaaattggagattggaacaatttatatattcctgataatagagatgaaatggcagaaaactcttcagataacagagaacaaactgacactttaatcgggaatataaccaatccaattgttagaaatcgtttgcaaatttttagagatttaattttaaatttaaaacaagaatatggaactccaaatgaagtaatttttgaattcgttagagatggagcggacaattcattgtttggtgctaaaaaggcaaatgatacactaaaagtaatgaaagaaaatgaaaaagataatgaacaaattgtgtcagaattaaaagatgcaaatgctctaagttcagaaaatattttaaaacttaaacttttgaaaaaacaaggcttaaaatgtatttattctggaaaatctattgcgatatctaattttgacgcatgcgaaattgaccatatttatccacgttctatgggtggaaatgatgctttatacaacaaagttctatgttattcaatggaaaatcaaaagaaagcaggcagaactccttatgaatggttacacaaagatgaaaaaacttggttcgatttcgttaatagacttgaagcaataaaagatacattaggaaaaaagaaatatgaattattaacaagtaaacctgaagactgtaaaattttaattgatagttataacgggcttgcagaaactgcccaaattgcaagaattgcacagcaaattacagccttagtttttaattggggattacaagttgaaggagaaaatcgtcatatatttgtcaataatggttcttcaaccgcatctataagaagaacttacaagttaaacaaattgttgggagatgatgtaaagaaaaatcgtgataatgacaaacatcatgccctagatgcaatatgtatcagtttttcaagagattataaatataataaagaaaagaaagttgatgaaattgaagggttaaatccagaaattattaaagaggttataaataaccttatgccatatccatacgcaaatgataaaacttttaaaggaaatataaaaccattagaaagtatttacggaaaacgagtaaaaaatggcaatacatatcttacaaaaagagcggatataacctcacttgaaccaaaagaaaagaaaataaataatattttagatgatgatataagaaaagatttgttaaatcatataaataacaaacctacaaatcaagaatggaatgaattattagcaaattatacacaccctaaaaagaaaactcatgttaaaaaagttttaatgattgaagcaaaaggtcaaatagaacttgataaaaacgaacgagaaagaatgggtgaatatgtagactttgggactaaaagtgtaaaaaatcaatttaagcattcaaaaggacataaaggtcaaatcctgtattttgacccaaaaaatgcagtaaaagttatgcctatttatgctaataaaaagacacaagatgttaaagataaacttattgacatgggttgcaaactttacaacaagggagaaatgttctactccggttgtcttgttgaaataccagaagactttgaagcaaatgtatattcattgattgtggatgaaaacggcaaagaaaaaaaagtttcatcaaaatcaattgtttcaaaaggaatattcaaattaagaacaataatgtcaaatggaggtattctaattgaaaataattctggaattgagatattaacaagcataaataatttggtttatttacatttcagaaaatataaaaatgaaaaatagccagttggctattctaattccaaataaaactggtattatagagtatatgagttaccacatactccatttaacgacaccaaatataaaactttattgtgaaaaaggatttttattttgcaaatatgatgatgagagcgaaaataaacttcctattacagatattcgaacaataattgttgcgactcatcaagtgtcttttacaaattcttgccttgctaggctaatggaaaatgatattgtaattttacattgcaataatcacttcaagccaataggttggagtttaggactagatagagttgttcgaacaaaggcatttttaaaccaaattgaacaaaatgaaatatttgataatacactttggaaaacaattctttttcaaaaaatgcaaaatcaagcaaactgcttaaatttaattggagtaaaagaacatagccttgaaaaactaataaatcgccctctagttagcgaaggtaatgtagcaaaacaatattggcaagaatattttaaaattttagaagttgatactatcagagaacataaaaacgcagaaacttttgaaaattcttgcttaaattatggttatgcagttatttctactctaatttatcgctcggttttaattcatggattgtgtccaaatttaggaatacaccatagagaaaaatatggttcgacgccttttatttatgatttagttgagccatttagggcatttgtagatttttatttatacaaatttaaggttaatagaggtggcgactttaaaaataaaaaacataaatcatggtgtgaatatttagcattctgccttaaaaattatagattaaaagcaaaaggcttaagttacaaaatcattgactatatagaaatttatgttgaagatattacaaatgcatttataaaatattcaatagaaaaattaacacttccaaatatcaaagaacagtacttatatattgataaacacaaaaatagagaatatgaagagcaagtatagaatgggttggttatttgtatgttttgatttgccagttgttgaaaaagaagaaatgcgacttgcaaacagatttagaaaagatttattagatttaggatactttatgcttcaaaattcaatttatgttcgttcatgtgtaacctatgaaaaacaagaacaatttataaaagcagttaaacaaatagcaccttcgacaggaagtataaatgttatatacataacggatgctcaatggagtaattctgtatgcatacaaaaatcagattataatcggtctaaatacaaaacagaaatgggcgaaattacagaaaaacagatgacgttctggtaatttcatgataaaattatagatgtcatatagtatgttatttatttttgaaagggttagagaatgaatttattcgtacatagtagaggaatcaattattctctgttcaattctgattggactcttaacttaaagtatattatgcaattagtatatcataaatatataaatttgtatatcctattataacatactttaaattaagagtaaatcaaaactcgttcgttgtagatttcaaaaaaaaaatcattataacatactttaaattaagagtaaatcaaaacttattcctgcattgaaagaagatattacaattataacatactttaaattaagagtaaatcaaaacacagtatctagcttttcgctaaatttaaccattataacatactttaaattaagagtaaatcaaaacgttacaaagcaatatagcggtagagataaaattataacatactttaaattaagagtaaatcaaaacactgccgttatccttattcaaatatatgttattataacatactttaaattaagagtaaatcaaaacggaggttttacattaaacttaaatacaatgattataacatactttaaattaagagtaaatcaaaacagaaaaggtcaattattcaaattttgcaacattataacatactttaaattaagagtaaatcaaaactatgatgtgtcctgctctgtgtcgtcgtcattataacatactttaaattaagagtaaatcaaaacgccttacactcaacacaataaccacaggggattataacatactttaaattaagagtaaatcaaaacgcttttgagtattgataccctgcaaaacctattataacatactttaaattaagagtaaatcaaaacagcaaagcgcagtagccttttaggttgtagattataacatactttaaattaagagtaaatcaaaacgccaaacctcctgacacgttacacaattaaattataacatactttaaattaagagtaaatcaaaacacgaatatctctaataacactcggtgcgtgtattataacatactttgcaagtaaaataaaaagctgagccaccacgctcagctttataattaaaatctctcaactatctttactatctcacttaatgttcgttacttacagccatcttctacacatatccactaccaactgcaagcacgttttttggtttgttttctatttaaccgcaaccaatttttgttgaattccttgttctgcgttcaacattcttgcattagccattgccattgaacgacgttttttagcgcctcttaaaataaattctacgctattatcaatattacaatttggagtttcaattctttttaacatatacatatccctttcatttggtttgattaaatttgatttatcttattggttttatccacatattttttatcgaccgactcaaatcaaaactttagacttttgaacaatttgtttacattttgttacatagtttgcttgtaacattaatatatattcaaatgacaatacgctttgtgtgagttattattaagtcatggataacaaattaattacgaaaaatataatcaattttgataatgatcttggggcagcacttttaaaaacgattttattggctaaaaataatgtgcctatgtctcacaagagaactgcggataactacgttattatcaagagaatgtattcttctcatgctgttaaggctacaatttctttatcagaatacgatttattaaaaagatatgattttgaacctcttgaatgtactactattcaaaaagcaaacgaagaaattgaatttttgaaaaaatggtcttttgctaacaatttagatttaagaaaagacgcagatatgattattgtaatcagagcaaaagaacttaaaaacattaccgcaagtgcttattcaaatgtcccgagcgaaatgtacaacggctacaaagctatcgacaaatattttgaagaaatcactaaattttataggtaaaacattttatgaaaaaaactgaatttattaatgccaaaagaattgttataaaacttggcactaacgttttgagaaatgacgacggggaagcctctttacctcgcctttattcttatatagaagatatttcagcccttgtaaaagcgggtaaggaagtcattttagtaacctccggtgctgttggtttgggcagaaaaaaaatcaatgtagaaaaatctgatgatatcgttttaaaacaagcatgcgctgcaattggacaatcaaaattaatgtctatttatgaaaatggttttgatgcttatggtataaatactgctcaagtccttttgattgaagacgattttgcacaaaggaaaaggtacttaaatcttagaaacacattaaataaattgctagaattgggtacagttcctgtaattaatcaaaacgatacagtttcaacttttgaattagaaactttatataaagatgcccaagtttgtttttcagacaatgataaactttctgcacttgttgcgagtgaattagatgcagatttattaattattttatctgatgtaaatggtctttatgactgtaatccaaaagataatccaaatgcaaaaataattacagaagtaaaagaagttacagatgaaattatggatatggcatgtggtgtttctgactgcggtagaggcggaatgaaaacaaaacttgaggctgcaagacttgttactcgttttggtggaaaagttttgattgcaaacggaaaaattccgaatgttattaaagaaattttttcaaataaagaaattggcacaagatttttgccaacagaagaaagtctttctggcaaaaaacgttggattggttatgcaacaaacattattggaaaattggttgtaaacgaaggggctaaaaaagccgttcttgaaaaagaatcaagcctacttccaatcggcgtattaaatgttgttaatgaatttaaaaaaggcgaagttgtgtcaattatcgacgaaaaaggtaatgaatttgctcgtggtattgcaaattacagctcagatgcttgcaaaatgattttaggttgccactctgacgacattttgaaaattttaggatacaaaaattacgacgcaattattacacgtgataatattacaacattataggtaaattatgaattttgaagatatcgcaaaacaagcaaaaaacgctagccttgaaatggcggaattaacaactgaagttaaaaataaagctcttttaaaaattgcagatgcgcttgaagaaaataaatcacaaatttttgaagctaataaaactgacttggaacaagctaaggatagcgtttcaccttctgtttttaatcgtttaaagttagatgaaaataaaatgcgtgatatgattcaagggattagagatgttgtaaaacttgaagatccaattggcaaaactcttttagctcgtcaacttgatgaaagtttaaatttgtataaggtttcatgtcctattggggttattggaattatatttgaagcaagacctgatgttattgctcaaatatcttcacttgcaataaaatcttcaaatgcagtgattttaaagggtggtaaagagtctataaatacaaataaaacaattttgggcataattaatagcgttttagatagtataaaagaatttccaaaaaatgctttgtcacaagtatttacgcacgatgatgttgctcaaatgcttaaatgtgacgcatctattgatttaatcattccacgtggtgggaataaattggtaaaatttataaaagaaaatacaaaaattcctgtattgggtcacgctgacggaatttgccatatttttacagatgaaagcgcagattttgaaatggcaaaaaaagttataattgatgctaaaactcaatatccaagcgcttgtaatgcagttgaaaccttgctaattcacaaaaactttaacaagaaagatgaattattaaaagaacttgaaaatgcagaaataacgcttatttcaaaccctgacacttgggcatttgagcatggtgacaaaacccttgcttacaaagtagttacaaatattgatgaagcaataaatcacattaatacttatgggtctggacatactgactgtattattactaaaaatgagcaaaatgcacaaaaatttatgcaaaaagttgattctgctggagtttatcaaaatgtttcaactcgttttgcagacgggtttagatacggtttcggtgcagaagttggtatttctacaaacaaaacacacgcaagaggacctgttggcttagagggtttaactatttataaatataaacttatcggtaacggtcatattgtaaaagactacgttgacggtacaaaacattttaaccataaggatttataaatgaaaatcggagttgtaggtttaggattaattggtggttctatttttaaggctctagaggctctaaattatgatgttattggggtttctgattctcaaaatggtttacaagagaacatttcaaatgattttaataatttaaaagattgtgaaatggtttttgttgctactccaatgaataaaacgcttgatgtacttcaaaagttagaggaatatttgcctgaaagtacaattgttgcagatacttgctcattaaaggaatttgtttcaaacaaaaattataaatacaattttattccaactcacccaatggcaggaactgagtttaaagggtttgaacattcttttaaggaactgtttgaaggtgcaaaatggattgtttgtaatcgtggattagcccaagaaaaaaataatagtttagcagagttaatttttgtaattgagcaaatgggggcagaggttgtttttgctgatgcaaaagaacatgacgaagcggttgcaatgatatctcacatgccaatggtggttgcgcaagcattgtttaaaacaactgcagacaataaacttgccttaaaacttgcctctagcggttttagagatatgacaaggcttgctctttcaaatgaagaaatggctgttgatatggtgaatatgaatcataagaatattgaacaagctattttaaaattttattcttctgttggtgatttaataggcaaaaattacgtaaaagaaattgaaaaaataaaaatacaacgtcaaaaaatgtatgacaaaaatggcaaaaataatttataatttcctattaaaaaatgtaaacaaatttttcaactaaagcaatttttaatattcagctaatttacatacactgaaaagctatagaaattataaggagaaaaaatgaatattaccccgaatgtggcacagcctaactttacggcattaaaacccgtaccaaagttagctaaaaaaatgggtggtgaagcactagaaaaagcaatgcctgaattagaaaaaatggctcaagatgtagatattgaaattattccgaaaaaaggtttctttagtaaattacagaatctgaatttctttgtaaccaatgttggagaacaagtaggaaggtggtttagcctatctattgatcctaaaggttatttagaaggaaatgacccaacacattataaacaagtcgatgcatttacaaaagaaaatatcttagaatcagctcaaaaagcaaaagatttgaacaaaaaaggtttaaaggttgaacgaaaaactattgctatgatgccagctgatgctgtaattcttgcaaaagccatgaaagataagcaagcaaaagctgaagaaaaggctaatgcaaacgcaaacgaacaagctaaaaattaataaatacaaaaaagaggttaatattgacctctttttgatattaaaatctaaaatctctttcgccgtttgctattttttcaacattttcttttgtttgtttttttacgttttcactttcaagagtttctaattccttttgaattaatttgtccccaacagtctttgtctctggacttgcgtaatcttctaaatattcctttaaggtcataattgcgtttggatgacagaagttttgtatttgttttgatttacaaatatccataaacctttcgcctgtacgaccttcacggtaacacgctgtacaaaaacttggaaggtagcctatttctataagccatttcattacttcatctaaagttcttgtatctgtaacatcaaattgagaagaatcttcttctgtataatcgttttcatcatatccaccaactgatgtttttgaaccacctgaaatttgagaaatacctaaatgcaaaactctttctctaacttcttttgattctcttgttgaaacaatcattcctgtataaggtactgcaattctaatacaagctacaattttacagaatgtatcgtcgttaattccgtttttaaaagcacttgggtcaatatcgttagcttttctaattcttggaacactaattgtatgcggaccaacgccattgacagcttctagatgttctgcgtgcattaatagccctgcaaattcatatttataagttgaaagcccaaataacacacctaaacctacgtcgtcaattccgcctttcatagctctatccattgcctctgtatgataagcataattgtgttttggacctgttgggtgtaaacgttcatagcgttctttattataagtttcttggaataaaatatatgttccaatacctgcttcttttaatttacgataattttcaacagttgtagccgcaatatttacgtttgcacgacgaattgcgccgtttttatgttttacgctataaattgtttttaaactttctaaaatgtactcgatggggttatttacagggtcttcgcctgtttcaattgccaatcttttatgacccatatcttgaagtgcgataacttctctttcaatttcttcttgagtcatttttttacgaggaatatccttgttctttgcgtgataagggcaatatacacaaccatttatgcaatagtttgaaagataaagcggtgcaaataaaacaattctgtttccgtaaaaatcttttttaatttgttctgccaatttgtagattttttggttaatttcttcatcttcacaagccaataaaacgcttgcgtctctatgagataaaccttttctttcttctgctttttttaagattttttcaagtaattctttattatttttattttgttctgcgtattcaatcgtagataaaatttcgccgtcatcaataaattcttcggctttaagtgattttacgttgtacatttttattcctcttaataacatgataactcaaacaaaacatctagagcaaatttctggtagtgcttgccttattgacttatttgtactaacattttgctatggctaagattattacagtacaaaaaggtacaaaggacatattgccaacagagatggatagttggcattttattgaagatgcagcaaatagagttttttctagagctggatttaaagaaattagaacaccaatatttgaagcaactgaactttttgctcgtggcgttggtgatacaacagatatagtaaacaaggaaatgtacacgtttgaaaaatcagaacgctctcttacacttcgtcctgaaaatacagcaggcgtagttcgttcttatattgaaaacggtatgcacagacttccagcacctgtaaaattatggtacaaaggtccaatgtttcgatacgaacgcccacaagctggtcgtcaaagacaattccaccaagttggtatggaaatgtttggtatagctcaaccaacagctgatgttgaagctatatctttggctgtaagttacttaaatgaaatcggattgaatgatttagacgtagaaatcaactctttgggttgtcctacttgtcgtgaagaatataaaacaaaattaaaggcggttttaaaaccatatttacaagacctttgcccagattgtcaaaagcgttatgaaaaaaatccattacgtttattagattgcaaggttgaagattgtaaagcaatttatgaaaaacctgaagtaaaagaagttataacttcagaatttatctgtccagaatgtcatgagcactttgaagcagtaaaaaaatatttagatgttttaggaattaaatattttgtaaataaacttctagtaagaggattagattactataaccgaacagtttttgaaattaaatcaaacaatttgggttcacaaaatgctgtttgtggtggtggtcgttacgatagtttagttagaaatttgggtggagaagatactccggcagttggctttgctatgggcatggaaagattaatctctctacttcctgcaaaagaagcccaaaaacttgatgcttatgttgtttctacaaatcaagaagaagctatcaaacttgttggagatatgagaaaatcaggtttgtctgttgattttgatatgacaaataaaaaattcacaaaacaacttgaaaaagcatcaaaagttgctcgttttgccataattttaggcgaagatgaaattcaaaacggcacagtttctgttaaaaatcttgcaaattctgaacaaatatcagcaaaacgagaagaacttgggagtcttattaagtaatgacaaacaagattgacgatgttattgtcgaattaataaaggatttaaaaaaggaatacccttcagatttcagcggaatatatcttttcgg

SEQ ID NO: 2050 - DNA, 23063 bp, synthetic construct
  misc_feature 1..23063: note = Synthetic
  source 1..23063: mol_type = other DNA
cgaaggcgagggtgatgatccggcagacgcgtcttacattgacggttattctattggcagcgcgggagaaattacttttaaactgagagccagaccggacggcaaaaaaagctggggttttgtaggcgtttatacagccgccggattcgatttgactgcggattctgtgttcagctatacattgggagattttcagccgccgatttatccgaattactctgtgcaggacaaaggttatcgcgttgttttcagctatggcagtgaaaaaaacggcaattacagagaattaatttacgaccccaatgagttttcggacagcagcccgtctgccgtgaatgtgccggctgagcgcgcgcatgaaaaatatttagctttgcgcgacgccgaggctttggctttgggcaataataatctgagactgaaattttacggcaaagactcgcgcgttacgatcaatgatactgtggagaggccggaggataagtttaagtttgatgtggatcatgatgatatgagtgattctacacgaataagttatctgaaatttaaggtgcgtaaaacaacagggttgagcggcaaggcggattttttcagcaaagtcagagttggcttgaaactcgaagatgttgctgacgcaaaccaagatgcgagttgtccagttgccttgaatggaggacgtatgaactatattctagaagaggatttggatgttaattattatgaaatatccgttccgcttttgtttgtggagggcattggatttgacaggcaaaatgttttgagtggagtttattttgaaagccttgaggccttggagggtttggaaatcaaggatatacagatcacggccgtcgagcaaggagacaggtcattgcctttggttcaagttgacaggacgggatttagcggttttggcgcggcgctggataataaagacgcgcaagaagccgtgatcttgcgggatttgaaaatcggcggcagagaaattctgcaaaagatcgatctggacagcagagttgaggagatttctatactggctctcaccggcacgtatgaaaatgatgatatgtttaacggcgaatttacctctacaggccaggtgatatataccctgaaagcttcagagcctattgtcaatagcaaagcaatttttggcattccggaagatgaggaacaaacggatcaataaaaattatattttcgctgtaaaaggggggcaggaatatgttaaaatagtttggagacattatgcgaaaactatataaaattttaatgattgttatggttttctttctatctgttcctgcctttgctatgcaagtgaagatttcgaccacgggagcaagtctgacttatcctgttaccttgtggttggaagatacaagcgctttagagattaaaacttattctttggctaatgctagtggcactagcataaatgagggtaattatcgcttcaagttgtactctagtaatgttgttgccgcttattctgggggaaaacatacttacaaaacggcttctatagttaatgttccatttactacaattacagttgcctttgatattcccagccacaccctcaccggctacgtcaaaaatgccagcggcggcgctatatccggcgcgacagtccatattttcgaggcggattctgccgatgatcccgcgcattactggctggcctcgacaacgactgatgggagcggcaagtatgaatttaagggcgtgtacagcgatgtgaactatcacatcaaggccgagaagagcggttactttccaatgtttgcctccaaaacaacagacggcggcgaatatagtccggtcaatatcaagggcggcgaaactgttaaatatataacgctgcgcgccgcgcaaacaattcaaggtacgattaccaatggcgatgccagcacggaagtttccgcgtttttggcggattcgagcttattaaataatgaccagtatgtttgggttagtaaatttgagggaagcaatcccagtccttatactttagatgttcctgccggcgtgccggtaataattcaggccaagcgcggtaattatatcacggccttttataaagcgggcagcagtcaatggtatgatggtaaaacagcgtcctcggtgcaaggcggagctgctggcgtgaatattactctggagcaggccggcagtatcaccggcacgttgactggcgcgggcactggactggccgaggtgatagtctttgagaaatccggcaatgaacttaaatatataaacagtgttacgagcaatgccggaactagctggacatataatttgcctgcgccggtaaacacttcccgccagttagttctcaaggctggcaaagacggacatttggacaggtatcatctgacctctgctttggggacgtatgagttgggtaaggcgacggcgttttctttaaccagcacgacagcgaagtccggcgtaaatattaccttgggaaaatctataaccatgtccggcaatatcacacgctccggcggctctggtctggtaaccgtaaatatttatgagagaagcggaacatctccggattatatctacacgtatgtcaatcaagtaactgtgaatgccggaacaacagcggctagctatacgacgccgatattagcaagcgttccgcaagtggtgcaggccatgagcgcgggacacatggacaggtattattatggcgcggacggctcgtatgaccgcgaaaaagcggccgtaataaaccaggccagtgatatttctcctgtgaatatcaagctggaacaagccggcagtatcaagggtacgatcagcggcgcaactggtcaggtaacgatcaatgtatatagcagaagcgggcagacgctggagtatataaacaacgtgatagggaatgcgggcagcgagtacactttgcccgcgcctgttagcagccgcacattggtagtgcaggcggaaaagtccggttatctcagccgctttcacaataacacgtatgaactggacaaggctgtcccgattaccttgaccagcgccgctccggagaaaaccggcgcgaacatcgcgctggaagcggcggcggtgatctccggcacgattaccaatggcgtcaatgccaaagtcaacgtattcaggaaaggctctgattatgagtatgtcaacagcgtaacggccagcgccaccggcgcgtacagtatgcagataatcagcggcattgaccaggtgatcctggcttcccgcaccggatatatcgaccgctattatcagtctggcgcagacggcgcttacaaccgcgaaaaagccacaccgcaaaagacagcttccagcggcatcaatattattttgcagccggcgttggctgtggccggcagtgtcaaggagcgcggcggcgcgagcttgagtattccgctgactgtcaacgctttcatcaaaggacgggattatgaagccggttatgttaccgccgccgctgtcaacgcatcaacgggcgcgttcagtatgcagataccggacgattctgcggggattgtcctgcaggtaacgcacaacggcaatcagcttatcggttataaagacggctcttggtttgcggacaacggcagcgttatgtcctcagccgacgccagagttttaaagagtggacagacgggtctgaatagtctgcaaatctatctggataaattttggctggtcaaaggcgcggtcagtccggacgggatccaaggcgtggttgacctgtatgagtgggactctagcggcatcaattacaataaaaacaaaggctgggtaacggccaatgccagcggcgcgtacgaaatacgcggcacaggcaatgtgaatgtgcttctgcgtgccggcacagaaaattatgtaacgatgtatctcaacaacacggccagcccggtttgggtcaataactccctggatttggtaacgagcagtgcgcagttggctttagcgcctttgactacttatacttataatccgtctttgaccttgggcggtcagattgccggcacgatctcattgtcgtcgggcggctctggcgcagtaacagtcagcgtggaagacacggcgggaaaatttttcaaagaagttacggctaatgtcgacgttaaatatacgattaaaggcgtgccggccggcagttggaaagtccgcgccgcgcggggcggcgcgttgcaaacctactatggcggagcgcacgggcgcgatgacgccgcggcggttaatttaacaacagcggggctggacaatatcgatattactttgccggccaaagctgttgtgaacgggacgatcagcggtgtcagcgacgcggagaacgtaacgatcaacgctttcgagcggacaaacggtcatctgggacgctgggtcaattcttacaccagaagcggcaatggcgattatgctttagacataccagtaggaattaacctgatgctcatggccgagagcggcggatatataaagcgtttttataaaaacggctctgccggcacttattcggacgagcaggcgacgcaggtgaatggagcggccagcggcgcgaacatcacgctggagcaggcgggcagcataaagggaactataacgagcaaaactaccagcggcgtggtaacggtgagcgctttcgagaaaaatggcgacgtgcttacttacataagcagtataaccagtaatgttggggagagcgggacatacacattgcctactccggtaaacactggccggacgctgatagtacaggcggagaaaaacgggcatattaaacgcttctatgccaatgcgtatagtttgggacaggccaatgcctttgtcttaaacagcacagcgcagaaatcagatgtaaatattgacctggagcagggcgttgctttgtcgggagcgatcactaatgccacaggtgtaaccgtgcaggtgtttgtccgcgaagccggggatactcaggacacttttttgatggatatgcggactgacgccgctaacggaaactacacattcaacgttccggtgaataaaaattattttgtccgcgccgagaaaaccggcttgttcgcgggattttaccggagcgataacgctcccgcggcgtttggcgggcaggacaggcagccgataattgtggcggccagcccggttaccggcaaaaattttagcttgtacactgctaggactattggcggcgatgtgaaataccgcggcggtgcggacatcggcaatatggtgacagtcaatgcctttgtcgccagcacaaattatacttttgtcagcgcggctacggccaatgccgccaatggttctttcaatttgtctgtgccccaaggcgtggctttggttttgcaagttaccgccaattccacgcttggttatgccagcggcacttggtttcccgaccgagaatcttccgccaactcgacgatttttaatcttgccaatgacctggccggccagcggtttattattgataaattttggtatctgaccggccagattgctttgagcggtaatccaaatcctatcggtgtgtctgtcgatgtttttgaatatactggcgggacgagcggcactaattggcgctggctggccggcgtaactatcgataatgccgccggagattttactattacgagtataaatagtgtcgaggccgtggtgcgctatgccagggacggctatgtaacaatgatttatccggacttggtaacgctgaataagatcagcgccggccataaacagactttgacgattggttctgcgccggtcaatctcggctcaaagactctcgcccgcggcggctcgatcaccggtaatatcaccgccgccggctcaggcacagttacggtcagtgtcgaggatataaacggcgaatatttcacggagattacactcaatgcggcgggtggaacgtatgaggtcaaaaatctgccggcgggccagtggctggtacgcgccgcgcaggacggcgctgtcgctgaatactatggcgagaccgcttcgacggccaacgccgcggcggtttctgtaatggcgggaaacatcactggcaatgtcgatatttacatcgctccggaatggacaatttccggcaatatatctgaaattaacagcaatccgacaaaaaacattcctaatgctttagtgcaggcttattttgttaccgaaccgaatacgtggttttgggtcgcttcggccaataccgacgccaatggcaattacacgctgcgcggcggctacagcaataaacaaaatgatccggcgcaggtttttttgcaaataggcgcggcgaattatacagaaataacaacaaacccgattgaggtggcggtcggtcaggattacgccaaggattacgttttagaaggcgcggcgtatgtgcagggtacggttgttaatgtttcggcaaataaaacagtgaccattagcgcttttgccaaagactccaattttgtctggctgggcgaggttacgatcaacggcaatgacgccgcgccggttgcttatgttttaccgatcaaagtcaatacagatttggtggtgcgtgccgcggtcagcggttatgaggatttgtggtatgacaataaagtttcttccgcggacgcgactcctgtcaggcaggctgtgggcacgactaaagacacagtaaattttaattttgccggacataaacaatggctgatttccggcgtggttacggatacggacggcaatccgctagacggtatgactgtcaatgtctttgtaaaaaattctgattatgccggaccggacggcggcagcgttttgaccggcgcagacggaaaatttagtttgcaaatcgcgccaaccggggatttggttttgcaggcggctacggccaatccgtatcttggttatccgactggcacgtattataagaaagatgcgttcggtgttatttcgtccgctgatgcggcttcgctggcctacagcgccggtgatctggagaatatagcgtttaaaattaatagattttggctcgtgagcggttcgatcacgcctaaaaatatagaagcggtcatcgatatgtatgagtatgacggcgaaaatattaactgggacaaaaacaaaggctgggttacggctaacgctaacggcgcttatgaaatacgcggcactggcaatgttactgtaaatatacgcgcggcgaccggcaattacattgccgccggcataaatcaagccacgctggcgccggaaaacacttacacgcattatttcaatttgacgctcggcgcggaaatttccggccgggtcacagccaatggctccggcacagtaacgattagcgtgcaggacataaacggcgactgggaaacttatgtgacgcgcgacggaactggtgattacacgataccgcgcgtgccggcgggcctctggctggtttacgcgcagcagaaaaattgtatggcggagtattttggcgaaaccgtttcgaccgccaacgctcgcaggatcaatctaaccgccggacaggttacggaaaatatcgatattgaaattgaccgcgaatggactatcgctggttatgtgaaaaagtctgataattctccagttcaagacgcggaagtcgatgtttggagaagtttctgggacggttatattggccgcgcgaaaactgacgctttgggctactatatagtaaccggcggctgcaacaatatagatgtttatgtccgcgtttcagccgatggctacgagaccaaatattacgatgataaatacattataaccgaggcaaatactatcaatatggttccgggtgttccgacaacagatgttaattttattttaaacgaagtttggaaagttgccggtaatgtcaaagatacgcacggcaatcctttgtccgatgccaaagtttctttgatcgatcagaccgatacccaaaatattttaggcgtgtatactactgacccgtctggcgagtatcaatttatttccgtcaatgcggtggcgtatcaattatttttgcttgtggaaaaagataattacgcgccgtcgtcttccgccgcttttaatgtggtagtgggagacagtgtggaaatttattttgaactaccgctaattgccgcgccggtgcagcctttgccggccggccagagtgttttggatactattcgttctggtcccaatcctgccgatccggaaaaagggccgatccatattgggtttattctggacagcgcggcgcgcgcccgggtaaaaatctacacgctgggcggcgaactggtgtttcaggacgatcagcgttttccgcccggctacaatgagtttgtctggagcggcgctaatctttacgaccggcgtctgcccaacggtgtgtatttggcctatgtggaaatcgacaccggccgggaaaaactgcgcaaagttttgaagatcgctattttgaggtaaaacaatgcgaaaaattttaatttggagtctgttaatcgctttgcttccggccgcggaatacttttctgaatccaccggcgcggcctttttggacaacggtctggcggcgcgttcggatgctctaggccgcgcctttgccgccgtggccgatgatctcgacgctttttattacaatcctgccggctacggtttgcaaaataaacgccgcgtcaattcgctttttgccaaaaatcgcaatattgaaaatgtttattatcttggctacggccaaaaacttggccgcggttacggcgcgctcaatatttattccagcggcatagacggcataccgctgactacttacgagtacaatgcggaatacgcgcacggcgagacggtggacagcggcgaaacttttacttacggcgcgcaggctctggtgttttcttacggcgagactttgcgctgggactggctgaccgcgccgaccgagctgggtccggcgtctctttactggggcgtcaatctcaaaatcctgcggcaaaatctttacgagaacagcgcctcgggttttggtctggatgccggactgctctacaaaaatggcccgctggcttttggctggagcgtcattgatttgctggagccgagattagtttgggatacagacagcaaaactgtcgacactgttttacgcaaacagcgtttcggcctggcttaccgtatcctgcccgcgctgctggcttctggcgagatcatattgcaggccaacgatattttgaccggttttggcgcggaatattttttgtttggcgatattttggccgcgcgcggcggcgtctacaccggcaattatgcgctgggtctgggtttgcattatgctggcttgacgctggattacgcttatctgatgccgcaggaagcgctggtcgactccacacataagatttctttgggctgcgttttttaaatgctgcaaattgtttcggtcagaacggacattcagcgccgtggtttatatgccggacaaagacaactgttgattgaatttgctctgtccaatatcgccagttccctgagcggagtcgaagggaataccggcgaggggcaggcttacgaaccggaagaattattactggccgtcaaggacgaagccaaacgcaaaggtgaagtgatctgtctgactggcggcgagccgctgctgcaaatcaacgagttattgcctttgctggagagcatgcctttgccgctttatctggaaaccaacgccacgctgccagaccgcctaccggaaatccagccgtatgtttcactttttggcctcaaatacacgccggattatcagaaagaatttttggaaagtctggcgctgctgcaaaaagaagaaacgtttgtcctgctgccaatcgccaaagacacgcagttggccgctgtggaaagtctggccaaactgctctctgtcatacgccgggatctgccggtggtcatcgagccagccgccgcggtcaaaaacgcgctggctttgcagactgtcgccctgcgttatttgcaaaatgtgcgcgtcgttccggcgttgaggatatagtgatataatggttacatggtttccaaaaagggcaaaaaggttttcgcgtttgatcttggtaaagctagcattggctactgtgttagagaaggcctagaaataaatgaagttaaatctcttataattgaagccgagcatgcggaagttgtttctcaacgcaccagacgaagaattcataaaaccattaattcccataagaaacgagaagagtttttaaataaattatggattgaggcaggattaaaaatccttgaacgaactgatgtgcgttttaaaaaagagtttccggctaaaaatgaagatgttgtttatacgtcatgtcttttgcgtatagcgttgttgcagaataaaaaaatggaagaatggcaaatctataaagctctacacggcgcaatacaacacagaggttatgatgccaaggccgattggtataacgccaaaaacaaagatgaaaaagacaatgtggaaagggcaaaaaattataccggtggtttgattaaaaatgaacgttatagctatccttgttattatgaagcttgtcgtttaggcttatggttagaaaatgagccgaacaatttgcaaaaatgtgttccgttaaatggcgcacaaaaggttagaactgccggatttgtagcgccgcgcgaattggtagagaaggaattaaaacaactctgggaaaacgcgcaaaaacaattgccgcaattacgaagatttacagcagaatattttatgtatgggccaagcggtattgcttatggcgcgtacaaaaataatgattttagtagctacaatcagatagaaggtgttttgggccaaagaatccccaaatttaacaatagaattataatgaaatgcaaacttttgccaaaacgcaatgtctgtaaagccgcaactatagaaaatatttcatttgtgttgctgatgaagttaaaaaatctacgactgactattagcaccggcgacaaaataattcttaccgcagaacaaatcaaagccatctacgaaaacaaattgccgatttggcgggaaaatcttataaaattgagaaaagataaaaaaccaaccttttctattggttcttccgatataaaaaaagtgttggctgaaaaagttgtagatgaaattgaacctttaaaagcaaatattggcggccgttccagtttttgccggacggcttgccgaataatgaataagattattttggcaggaattgacaagcccgggcaagatttggacataagcgaatttatagacgatcctaaatctcccaatccaattaccgacagagaaataaaaacgatgttagcgaaaattggcagttggcacaatctctatgtgccggacaacagaaacgagttgcaagagcaagcctctgacgcgcgagagaagacagatttgttgattggtaatattactaatccgatagtcagaaaccgtttgcagattttgcgagatttgctgctggatttaaaaaagaaatatggtgagcctgatgaaatggtttttgaatttatccggtctggaattgataactctctgctggctagcaagatcgccaaagagactgaagcatatcagaaaaaacaagaaaaatgtaatgaagaattggtacaaaaattgaaaagggtagacgcctttagcggaaagaatttggagaaattaaaacttctagaattgcaaaatggagaatgtgtttattctggtaagaaaattgggatttctgattttgacagatgcgagatcgatcatatctttccacgcagcagaggcggtaatgatgctttgtataataaggttttgtgttgtaaagaagaaaaccagattaaaaaagagcgtactccctatgaatggctgcacaccgatccagagcgctggagtatatatgtggcgagaatttctaaattgagagataagctcggcaaaaagaaattcaatttgttgatcagtacgccagaagagtgtgctaaaactatagagaaatataatgcgttggcggaaacaggccaaatcgctagagcggcgcagagcattgctgcatttgtttttagctggggtctgcagactgccggtgataatagacgaatttttgtcagcaatggagctaataccgcggcgatacgcagaacatatggcttaaataaattgctcggcgacgatgtcaagaagaaccgtgcaaacgataaacaccatgcgctcgatgcgatttgtattagtttttcacgagattacaaatatgatgcggcaaaacgaactgatgagatacaaaatgtggaacgaggtctgtttaagaaaattgttgcggaagcgataggtaatctaattccatatccttatactaatgataaaccttttaaaggaaattttgcgcctagagaaatgatttatggaaaacgagttggcacagacgggaaaatttatttggttaaacgtgatgttttagaaagtgttaaacgagatgaaaagagtattgcttatatctgggaccgagagatacgcggtgatttgctggcaaaatggcaaagttacactaatgcggaatgggcagaattgttaaaaaactatagacatcctaaaaaacaaacaatagtaaagaaagttttgtttatagaaaaagctgacgctcaagtagaatatgatacaaatggcagagaaaggattgaagagtttgtcgattttggcaataagggcgtgcatggacagtttaagcattctaaaggacaaaccggacgaattttatactatgatattcaaggtaaaataaaagtctggactatctattctaatcaaaacaaacaagaagcgaaagaaaaaatgaatcagcaaggctttaagctttaccgtaatggagagatgttttatccgggttgtttggtttatattccccaagagtttagggtaggtaaaaatgattatcagccgggaatatataaatttgttagagttgaaaatagcaaaaaaggattaattttactcgaagataacaatggattgccgatactaaccaatgttggctatttggccggagtgaatttcaggcgtataaataggacagaattagaaactattgccagaaaataatttctgggatttcacagttttccttgcgatatattaatatgagttatcatatattacatattactacacctggcgttgtgctttattgcgagaaaggttttttgttctgtaaatatactgatggtaacgaaaacaaaatccctgttgccgatttgcgctcgctaatcattgctacacatcaagtgacttttactaattcttgcttggctagattgttagagaatgatgttgtcatcctgcattgcaatgataaatatcaacccacaggctggagtgctgggctagataaggttatccgcaaagaagcgttctttaaacaaattgctagaaacaccgcgctggaatattctttatggcagaaaattctcagacaaaaaatcttaaaccaattggataatctggagttattgggttgtccagagcatgatatagataaattgttggaatgtcctgcaatcagcgagggtaatgtcgctaaaaaatattggcagaaatattttgaaacttttggtttacacattaatcgtgaacatcaggacgcggaggtttttgagaatatttgtctgaattatggctatgccgttatttctacgcttctctaccgttcgattttgacgcatggtcttttgccaaatctaggcattcagcataaagctcgttataacagcacaccattggtttatgattttgtcgaaccattccgtgcgtttgtggatttttatttgaaaaaatttgcggagaattgcgcagaagattatcaaaaacaggcattaaaaagctggaataaatatttggctggctgcttgaaaaattatcgccttaaagccagaggtttaagttataagatcattgacttttgtgatgtttatgtggaaagttttattaacgcattgttgcatgatgaggctgataaaataattttgccaaaacttaaagcgcagtatttgcatattgataagcataggaatagggaatatgaggagtaagtaccgtatgggctggctttttgtttgttttgatttgccagtagtggaaaaagaggagcttaggctggccaaccggtttcgcaaagatttgctgaagcttggatataacatgctacaaaattctatgtatgtgcggtcttgtgtcacctatgaaaaaaccgagcaatatacaaaaatcgttagcaatattgcacccgaaacaggcagcatacaagtattttacttaaccgatgcacaatggagcaattctgtgtgtatagaaaaaataaactacaaaacatcaaaatatcagcaaaaagctcacgaaaacggagaaagacaaatggctttctggtaattccgctgcatttattaattgaaaatgagtttattcgtacagcattaagcgtagaggaacaaactattttcatttcagttctgactagacccttaatttcaagtgtgtaattaactatagcacactttcttaccctgtcctattataacacacttgaaattaagggtaagtcaaaacaatttgccgattattctgataaaccgttttattataacacacttgaaattaagggtaagtcaaaacaatagcgagccaggcgcgcatcacagaccattataacacacttgaaattaagggtaagtcaaaacagcttagcttaccttaaaattttccgaaaaattataacacacttgaaattaagggtaagtcaaaaccatcaaaggctttcattttcttccaggccgattataacacacttgaaattaagggtaagtcaaaaccatatactagattagttccctcttgtgaagattataacacacttgaaattaagggtaagtcaaaacgggtgcaaaatacgcctgtttggtggaaagattataacacacttgaaattaagggtaagtcaaaacttacgcatcaggaatactaaataaaataaagattataacacacttgaaattaagggtaagtcaaaacgtatcctcggcggtatcgatcttatcccaaattataacacacttgaaattaagggtaagtcaaaaccgtcgccgataggggactgtgatgctcgcattataacacacttgaaattaagggtaagtcaaaacgcgatagctgcctaatctacatagcagccgattataacacacttgaaattaagggtaagtcaaaacacataccgctttgggaaaaacacaagaaacattataacacacttgaaattaagggtaagtcaaaactatctgctagcatgtgcgcgatagcagtatattataacacacttgaaattaagggtaagtcaaaacaaaatttcagaaatttcagatttttataaaattataacacacttgaaattaagggtaagtcaaaacgcgcattgcgcaagcctataatccataagcattataacacacttgaaattaagggtaagtcaaaacaaaaacccatgatgagcctctccgagaggcattataacacacttgaaattaagggtaagtcaaaacgttagccgcgcgaggttggctcatacgccgattataacacacttgaaattaagggtaagtcaaaacgctgatgcatatgattctgctctacacttattataacacacttgaaattaagggtaagtcaaaacataggattagcccgatgattacaagcatcgattataacacacttgaaattaagggtaagtcaaaactatcctctgcctcatcaatcttatcccaatattataacacacttgaaattaagggtaagtcaaaacttcgcaacaagtattctgaaaaatatcaaattataacacacttgaaattaagggtaagtcaaaacggttacctaattataattgttaccaagttattataacacacttgaaattaagggtaagtcaaaactttttgcgccgcgctaagcggcgaggcggaattataacacacttgaaattaagggtaagtcaaaacaggagcaatcgtataatggagcatctccatattataacacacttgaaattaagggtaagtcaaaactacagcgcccataacagccaccgtccgggtattataacacacttgaaattaagggtaagtcaaaacttgatataatcagatgtggatacatgtaccattataacacacttgaaattaagggtaagtcaaaactacgcatcaggaatactaaataaaataaaattataacacacttgaaattaagggtaagtcaaaactacggattatgcgcgttgcgccgcgccctaattataacacacttgaaattaagggtaagtcaaaacccaccagatgagcggctatgtggatttcattataacacacttgaaattaagggtaagtcaaaactggtagcatattctgctgcctttctcgtctattataacacacttgaaattaagggtaagtcaaaacatggattatgcgcgttgcgccgcgcctataattataacacacttgaaattaagggtaagtcaaaactataatctacatggcttatgcagatgagaattataacacacttgaaattaagggtaagtcaaaacgtatcagattatctagataaagagttgattattataacacacttgaaattaagggtaagtcaaaacgccggagataaggagcataaaatggcttacattataacacacttgaaattaagggtaagtcaaaacgggaagcgatagccaaataatctatatggcattataacacacttgaaattaagggtaagtcaaaactcagtatcgatcttatcccaatcgggatttattataacacacttgaaattaagggtaagtcaaaacaatatgcttgaagccaaaggatcaggcgtattataacacacttgaaattaagggtaagtcaaaacgcgcaagattctatctcggcctacaggccgattataacacacttgaaattaagggtaagtcaaaacatatacggattaagagatagataaaatctcattataacacacttgaaattaagggtaagtcaaaactagcggcggctggatacaaggagcattatattataacacacttgaaattaagggtaagtcaaaacgcttgattgtagcgtatcttcttccctttaattataacacacttgaaattaagggtaagtcaaaacgtatcctcgaaaggtggtacaaatctagtaattataacacacttgaaattaagggtaagtcaaaacggatacgtatgtcatgttgctcacctccttattataacacacttgaaattaagggtaagtcaaaactacgacattgccattccatgcgctatgtgcattataacacacttgaaattaagggtaagtcaaaacgcggacacctatgaatccgccctgcattcgattataacacacttgaaattaagggtaagtcaaaacaaaatcctgattgggataagatagatatcattataacacacttgaaattaagggtaagtcaaaacaggggaagatagccatattatatacatggcattataacacacttgaaattaagggtaagtcaaaacgggtgcatggagcgattgtataatgcaatcattataacacacttgaaattaagggtaagtcaaaactacagcgtgcgcgaaacatctttaagcgcattataacacacttgaaattaagggtaagtcaaaacttacctgcggcggcaataacttgcgcccgtattataacacacttgaaattaagggtaagtcaaaacatatcctcatctgtatcaatcttatcccaaattataacacacttgaaattaagggtaagtcaaaacatgacacagagataatcagggcgttaggattataacacacttgaaattaagggtaagtcaaaacaatatgtgtctatgcgccggtcgaataagaattataacacacttgaaattaagggtaagtcaaaactaaataagataaatgaattgatatgtaaatattataacacacttgaaattaagggtaagtcaaaaccctctgtggttacacttacacatctaacaattataacacacttgaaattaagggtaagtcaaaacagaggcagggaataatttgtatcgtctagtattataacacacttgaaattaagggtaagtcaaaacagattgataacttgagggcacacaagccctattataacacacttgaaattaagggtaagtcaaaacattacatcgacatagctattgcaggcacgaattataacacacttgaaattaagggtaagtcaaaacagatcgatgtcgatgttggtatcgatatgattataacacacttgaaattaagggtaagtcaaaaccaacgcgcaactctataagtccacacgctaattataacacacttgaaattaagggtaagtcaaaacctgccatgtgtatattttaacggcagatgattataacacacttgaaattaagggtaagtcaaaactatatgtccgcaagttatcaatcttgctagattataacacacttgaaattaagggtaagtcaaaaccgtaagccatattatgctccttgtctccaattataacacacttgaaattaagggtaagtcaaaactcggcttccggccgattctctaattattctattataacacacttgaaattaagggtaagtcaaaactgattgctaaaggggaacgtaaagcaatcaattataacacacttgaaattaagggtaagtcaaaacacgccaaagtaagcattaaatggcaggtgtattataacacacttgaaattaagggtaagtcaaaacgtcttggcgatgtgaccatacccgctggcattataacacacttgaaattaagggtaagtcaaaacacatcgacggctatgaatccagaattagtattataacacacttgaaattaagggtaagtcaaaacagaccttgatgccgaacaacaaagctccatattataacacacttgaaattaagggtaagtcaaaactgattgctaaaggggaacgtaaagcaatcaattataacacacttgaaattaagggtaagtcaaaaccggtatggctagagtaatttccgatagccatacaattgcaggcataccaaaaaaagatattgaaaaaacaggatttggataacagtttctaatgtattggcgtatgtcgtaatctgtactctattctgtgtctatggtagaaagacacgaagacataatattaaatgctgtcaatagtgctattcggtagaatttaatagactatatcaataatatagactaccaaaaaataaagttaaaactaaatcagttgtggtcgaataatttaggaagagattatttcgattattggacagtcagcgcaagcaaacaaacagccgcataaaaaaggacaaacataatcgcccaaaaccatatttttttaataatttctcgctgctcattttccggcaaaggttttttattgccgctatcgtccttgccgtacttaaaaactccgcacgcgattaaatcctctgttgataaatctgccatatctatattatatctcacctagccgcttgaattgcaacacacttgaaattgctgtaagtcaaaacccatcttgttaaataactctgacaatttttattggaaatttctgccatatattgggatattttattccattaaatagattatatccatctatgaaaaaagaaacttgtgtatattattcataatatcaccatattgttttatgttataattcccctgctttggccaaagatttaaaagatattattgcaaacagcaggagaatccattttgtcggcatcggcggctgcggtatgtcggccattgccagggtcatgctgtcgatgaactacaaagtttccggctctgacatcaaggaatccgccaataccatacgcctcaaagaactgggtgcgacagtgtttatcggccatgacgctatgcatatccgcggcgcacaggcgctcgtctacaccgcggcggtcgattttaaaaaccccgaactgcaggaagcgcaaaatctgcgtctgccggtttttgagcgtgccaaagttttgggttatttgatgtcgctgtacgccgagagcgtcgcggtggccggcacgcacggcaaaaccaccacttcggcgatgctgtcggtgatcttggcgcggctgggtctggacccgacttacatgatcggcggagaagtggccaatctcaacagcaacggcggctgcggcaagtctaaatattttgtggcggaagccgacgagtcggacagttctattcagtttcttgagccgaaaattttaattttgaataatatcgagaaagatcatcttgaccatttttctggactggaagagatcgtggatttgttccgcggctgcgtggaaagattggcgcaaaggccggagcatttgctggtgctgaatcctgagcagtggggcaataagattttgtttgaaaaaatccaaagtctgcccaatcttaaaacgctgacttttggcttgtccggcggcgtcaattatcaggcggtgaatattcgttacaaagaccacggctcggttttcacggcgttcaaagacggcgtggctctgggcgatctggagttggctatccctggcgaacacaatattttgaacgcgctggcggttctggcggtcagtctgcatcttggtttggattttcctaagattaaagaagcgctgctggcttttaccggcgcgaaacggcggttttctttgattggctcaagctgcggcgtgaaaatttatgatgattacgcgcatcacccgacggagatcagggcgactctggccgcggcgcgccgggtttttccgcgcagccggattttctgcgtgtttcagccgcaccgctattcgcgcactatgcattttctcaatgattttgctgagagtttcggcgacgccgaccgcgtgtttgtgaccggagtatacgccgcgagcgagaagcctattgccggcgtggacgcgcggtctatcgtggccaaaatgaacgcgccggaaaaagcttgttttgtggagaaaaaagaggacgtggccgatattgcgctgcgcgaactggacaaaggcgatgttttttttacgcttggcgccggcgatatttacgctgtcggcaaagaaattctcaatcgtctgcgcagtagagcgccggcccgtaaaaatgcaaaagaaattatccgtatcgcttaaaaatttttccgcattgcgcatcggcggacaggcggacatagtttattttccggaaacccttgctgaattaacggagcttttggacgagcaaccagcccggccagtggtcggcggctgcaccaatgttttttttggcgatttgccggaattgatttgcgttaaatatttgaatcagattaacgaaacagccggcggtattgaggcggaatgcggcgcgctgctggaaaaactttttgattttgcggccggtgtgccggcgactgtcggcggcggcgtgatcatgaatttcggcgctttcggttttgaacttaaagattttctgcgctcggcgcgggtctggcaagacggcgcggttaaaattttgccggctgcggaattgcggctgggctaccgctccgcggattttgccggaattgtgctgtccgccgtgtttgtgaaaaagcagttggagaaaaaaaacgaatatcttaaactgcgtcaggaaaaaatgccgtggggacagccgaatatcggctcgatttttaaaaatcccgccggcctgtccgctggcaagttaatagaagacgccggttgcaaaggctataaatataaagatttgcaagtctcggaaaagcacgccaatattgtggtgaataacggcgcggcttccgcgcgggatatgttggacttgatcgggcaggttcggcaagctgtgcgggagcggacaaatatattattagagatagaagcgcggtatcttggccaaaccgaaaacggagttcgccgatgaagactaaattaatcggtgtgttaatgggcggcgtaagttctgagcgcgggatttccctgcgttccggcaaaaatgtcgccgccgctttggtttccaaaggatacagagtacaggaaatagatattgtctctcaagattgccaggcgcagttgagaaatattgatgtggcttacaatatactgcatggcgcttttggcgaggacggcggcgtgcagaagattctggaggagctgcaaatcccttacaccggctccggcatcagcgcctcgcaaaattgcctgcacaaggtcaaaacgaaaaggattttagaaaaaaacagtctgctgacgccgcgctatcagacgctcaatactctgtctgaagtgaattttttagcgccctgcgtggtcaaggccgtttctgaaggttcgagcattggcgtgtcgattgtaaaaaatcaaaatgaactgctgcctgtggtggaaaaagcgctgtctgtttaccgagagatttttattgaagaatttatttccggcgctgaagttactgtcggcgtgctgccggtaaacggcgcgctgaccgctctgccaattttggagttgcggccaaaaaatgaattttacgattttgcggccaaatacacgccgggcggcacagaatttattttgccggcggagctgccgccggaagttgcggccaaaactcaagagctggccagacaagcttatctggccttgaactgcgctggcgcggcgcgcgtggattttgtggtgcgggagcggcaaaccccgtatattttggagatcaatactaatccgggcatgaccgctcagtccgatttgccagccgcggccaaagcgtacggcctggaatttcccgaattggtagaaatgattttattgtccgccgctgcaggaaaatactgacatggccagaaaaattttagcgctgctggttttacttgttttgtgtttcagcgcgggcttaggtttttggtatttatctttttccgaaacaacggtgttagagcagactacgcatgttgaggagtttggcgtttcgagc

SEQ ID NO: 2051 - DNA, 23003 bp, synthetic construct
  misc_feature 1..23003: note = Synthetic
  source 1..23003: mol_type = other DNA
ttcaacctttgatatttcatcatcatctcttattcctgcggtatcaatcagggtgacaggtataccaaaatcgagagtttcttttaaaatatctcttgttgttcccgcaatatccgtaactattgctcggtcgaggtttaaaagagtattaaaaagagatgattttccgacattcggttttcccacaatagcaacagaaaccccctgtcttagtacattagaagtgtttgctgttgataatattttatcaatttcttttattgatttttcaaattctgagattaaataatcgtattcaggttcttttacatcttccggaaaatcaattcctgcaactattcttgacaatacttcaaatatatcttttcttatttccgatattttttgtccgagtactcccgacaggtttttagcggaagtcattacaaattcttttgtttttgaatgtattaaatcggcaacggcttctgcctgtgataaatccatttttttattaaggaaagctctctttgtaaattcaccgcgttctgcatgtcttgcaccgtttgccaacacaagttcaagaatttttttcacaatattcactccgccgtgacagtgaatttctataacatcttcccccgtataactttttgggtttttaaaaggcagaataagtacttcgtcaacttttttatccccgtccagtatccagcaaagcgtgataatatttggactaaattctttttttgaacatatttttgatactatttcaaaacttttatctcccgaaatacgaataacacctaccccgcctgtggcgataggagttgaaattgctgcaattgtatcaaattcctgtaaaatgttcataaaataattatataacaaatgtaaacaagaacctcttttaaaataacaaaaaaatacatgttccgtttttatattaccgagtactctatatattggtaataaaatggtatctataagaaatacaacatgcaaaattgtcgacagatcaatatctttgttaaaaatcagagaagtttctgttcctgaaggggcggttagttttgattatgtttttgtgcctgaaagtaccaaatatactgagctttttacctttaaagatgccaataatctgcgtttagttcagcaaaagaataaagtggacaggttcacaaaagaaaaagaagtccaaaaaagagtgtatgaatacacaaaaagagacagctcaaaaagtaaaattaccgatataaatcagacaacaatctcgccaaatggtgaagaaaaacacgaaacatggagattttattacccgaaagataaaagtacagccagattttcaagaaaatctgaagaaaaaaatgttgataactatcttcactctgacggggtaattgtcgataaaaacgggcttaaaataagaccgatttctacggcagaatatgttgataaaagaaaagatattgatgataaccattttgtagacagtccgtggacaatgaaacaaactattacaacaaaagaaagatgtgcgactgattccgttcaggaatgtactgttgttggcatttacggagataaaggattaactttaaatcaccttaatccgcatcgtcctgaaaacagaaattttaataagatagaaaaagcgctgcttgaccaactggagcagcagggaaagaatgcaaaagcctttgttttgggttcttgtgagagtgattttgaaagcgataaacaataccttaatattatcgatttacttgcaacaagaggagttaaatattcaagatttaaaacaggtgatagtgttctttacgggcctatgcattttgatacaaaaataacttcagaaaattctaaaaaatataaattcggaactgcatcgccttatgaatgggagttaggtcagcatataatttatgataacggggaacttcagatagcaaatgttgttatagattcagaactcaaaaaaggaaatacagacccggaaagtcttattaagaaaagtttttacagaatttacagataatctatatcataactttttttggctttagtccgtcctgagttacttctgaaatagcaataagttgattatctttaacaagtatcacaatcccgtctttttcagatattcggttataaatattcataccgtgagtaatgcgtttatattcaatatcatttaattcctgttttggcaggggtaaataattaataggatttaaaaggactttttcaacatcttcaggtgtttttaaatcgtctaaattgatgctgttttcaatatctatatttcctgcaaggactcgtttgagtttggacaaataacagccgttattcagcgcttttcccaaatcgtttgcaatacttcgtatgtaagtgccttttgaacatttaacataaatatctgcccattgttcttcctcattaaattcaagaagttttgtttcataaatagtaactttagatggttttatatctatctcatctgctttaactcccgctcttgcaagttcgtacattttttttccgtttactctttttgcagaatagattggcggtaattgttcaatttcaccgtgtggcaggggcagattattaaattgttcttttgtaatctttttatcaaaggtttcaacaacattgccttcaatatcgtaggtatctgttgattttccgaaacaaaatcttccgatataggctttatcgctatttaaatactcaattaaccttgttgcttttcctattgcaacaggcaaaaccccttcagcaaacgggtctagtgtgcctgcgtgtccgatttgtttgattttggttacgcgccttaaatatcccacaatatcgtgagatgtttttcctacgggtttataaacattaagaaaaccaaacataattcccctcaccctgaccctctccccgcaggggcgagggaacaattctaaatttcgcctcttgatattttatcaataagttctgttactcttgaaccttgttcaagggcatctgtgtatacaaatctgatttcaggggttaatcttaatcttattctttttcctacttcgtatcttactttagaggtgcttttttcaataacttctttatctttttctacctgttcagggtttcccagaacactgtatttgacctttgcgtaagaattatcgtgtgatacttctacatcaacaatagatacaacaccttccaaacctctgacttcttttcttaagatatcagagatttcacgcatcaattcttttcttactctttcatttcgtagtgtcatttttataccttattcgagttcggtacgttcgatttcttctgtttttacaaattcgataatatcgccttcttcaacatcgttgaatttaacaaacgaaataccgcattcataaccctgagcaacttctttaacatcgtctttaaatcgtttgagctggtctatgctgcctgagaagatttcagccccgtcacgtttaacgattgctttgttgttacggttgattttaccgtcagtaacataacaacctgcaattttaatggttttaccgatagtaaatacttgtctgacttctgccgtaccgacaacaacttcttttgtttcaggtgaaagaagtgaaatcatagtcttttcaatatcttcaagtatctgataaataatatcatatttcttgatagttacatgttctttgcttgccgcaacaactgcgttgttatcttctttaacggcaaagcccaaaatcagagcgcctgaagctgatgcaagcataacgtctgcttctgaaatgtcaccaaccccaacgtggataatttttgtaataatttcttttgattcaaactgagcaatagcctgtgatactgcttctgctgaaccgtaggtatcagctttgatgataaggttgagttgtggaatttcctcctcaccgacacctgtcgcacctgattcttttctgatatgtgcaggtaacattgcatcaagtcttgtttctcttgcttttatttgtcgttcggtaacgattgctttcatttctttttcgttctgaacaacttcaaaatattcacccggtgacggaacttctgataacccgagaacctcaacaggagtagatggttcagcagattttattctttcacccgagtctgataacagtgctcttacacgaccgcatgcagtacctacaacgatgcagtttcctgctcttaaagtaccgttttggacaagtaaagtagcaacaggacctttacctttatcaaggttagcttcgattacaacccctgatgcttccgctttagggtttgctctcaaatctttaaggtctgctaataaccagatatattcaagtaaatcgtcaatacctgtccccagaagtgctgaaactttaactgtaatagtatcaccgccccattcttcaggtacaagattgtgttcggttaattgggttaatactttgtcaggatctgcacccgctttatcaatcttgttaacagcgacaataataggcacttctgctgctcttgcgtggttaatagcctctatcgtttgaggcattataccgtcatctgcagcaacaacaaggatagcaatatcagttgctttcgcacctcttgcacgcatttccgtaaatgcttcgtgccccggagtatcgacgaaaacaattttcttttcttttttattatcaagataaaccgtgtaagcaccgatagactgtgttataccgccaacctcggttgatacgattttgtgttttgatgcacggatactgtcaagcagagttgttttaccgtggtcaacatggcccatgatactgacaacaggggcgcgtcttttgagcagtttcttatctacttcggtaaactgtttcttgatttcttctttcttttcttcttctgcaatataagcatctaaatcttcttcaagaacttcaagttcatattccgcacagaccttcttgataatatcaacatcaatcaattggttaactgttgccataacaccttggaacataaggaatttaacgatttctgcaggggttttgtggattttgtctgcaagttcgctaattgtcatagctttgtcaacaacgattgatttaacttcttctacggcttcttctttaacaactttctttttatggtgttgtgctgccgctttttctaatgaaattctttcttgttcttcttttttagaataatctttgtcttttttcttgtcagaagaaccttttttctttgaaaaacctttattttcgtaaatatcctgagggataatgtggcgttctatcggtcttttcggtttgtctgattttggagctgcattatcgtcagaaccttttttaccttcgccgtcagcggttttcaaatcttttttaggttttgtcggatcgacaactttttggataggttttttgccgttgccctgctgaacaatttctacgcgtttcagaggcactcgtttaacgatttccagtctgttggttggttctttctttactacttcaacctgtttgcgttcggctttttcaggttttgcttctttttttgctgtttcgtcttttttatcgtcctcttttggcggttcttcctttacttttttggcctttttaacaataaacgccttcggttttttacttggaagttttgagccgtcagcgataaagtcttttagtttttgtatttgcagaggggtaacgatattagagtgagatttgatgtttatagagatttgggcaaatttttcaagcacttctttgcttgttaaacccaattctttcgctaattcacttactctaatattctcgtccatccagtaaccctttcaaatcctcggaggttttaagagctcgatttagtttgttcttttttaatgcaagctcctgacagtttttattatagcaaaaatatgcagatctgccaaatatcttgcaatccggctctatgactatctttccgtccgcattattctttgttattttaagcatttctgctctgtctttgatttcgccgcaaccgacgcattttcttttaaccaataatacctcgttatgttgcactttgtgctaatttttcaagtttcagtttttggtcatattcaatcaaaagattgattaattcttccaaatcgccgtcaataacagtccatacattaaggttgtgacctattctgtggtctgttaaacggccttgcgggaagttgtaagttctgattcgttcacttctgtcccctgttccgacctgagaacgacggaggtctgttacttcctgcatttgtttttgtacttccaaatcgtacaattttgccttcaaaatttccattgcccgttctttgttttggagttgagaacgctcttccgtacagaaaatcataattcctgtcggtttgtggaaaagtcttgcagcggtttcaaccttgtttacattttgaccgcctgcaccgcccgaacgcgctgttgacatttcgatatcttcaggtctgatttcaacctcaacatcgtcaacttcaggcataaccgcaacagttgcggttgatgtgtgaactctgccctgtgattctgtttcaggtacacgctgaactctgtgaacacctgattcatatttgagttttgaatatacggcatcaccttttattgaaataataatttctgaatatccgcctgcttcacattctgtttttgaaagtatttctgttttccagccctgtttatcggcgaattttaagtacattctggtaaggtcgcccgcaaaaatgtttgcctcatcaccgcctgcacccccgcggatttccagcataatatctttgtcgtccatcgggtcgcgcggaagaagtaaaactttcattttttcttcaaattcaggaagttttgcttcgtttgcttccatttcagcttttaaaaatgccttcatttcttcgtctttttcttcgtgaatgagttgttttgcatcttcaattgcgtcaacggcttctttccatttgtaatacaattctacagtttcttccattgattttcgttgttttgataaatcgcgaaacttgttatagtcctgaattacttcaggatcagacagagtaacgcccagttcgttgtagcgtttttctatctgtaatattttatctaacatatctttcataataattttccttttgtttcattatatcaaaaatatgttaatagtgaacagaatatgagtcggctgattgtactaaattctctgttcagcaaaaaacagggagtctgttaaccccctgttttatatgtttaagttttatattttgtctatgaacaacctgaataaccgcagttcagacagataaagcagccttcagccatttctatcttgttaccgcattcaggacaggtaataaccttaacttcgcctgtcggattgtattcttctactgcttcttcttttacttctgcaatcggttcttccgctttcttttcctcttttttgaggttcattggctggaaggttcttgaattgtttctgtaaacagtgatacctttcaggtggctcttgtatgccaaaatgtatgcttcttcaatatcttcacgggttgcagattctacgaagtttactgtcttagaaactgcgttatctgtgtgtaattggaaagcagcctgcattttaacatgccagtacggtgtaacatcgtgtgctgttacgaagatgtgtttaatttcatcagaaataccgtcaacatgagcaacagagccgtcaacagagatttttctcattaagtcttctgaataaagacctcttgaaaccatataatctttgaagattgggttaacttccaacatttctgtattgtccataatcaaacgggagaataccaaaccgaataacggttcaataccacctgatgcacctgcaatcattgagattgtacctgtaggagcaatacatgttgtagttgcgtttctgataccgtgaattttaatttgggcatcaagttctttccattgttcatcagagattatacctgctgatttacctttatatttttcatataagtagttatcctgatcgtagatactgccttcaaagtttttgaatttgcctctttctttagaaagttcgatagattcgcatttagaaatgtaatcaatatattcaataacctgagcacctaattttgtaccctcttctgatgcataagacagacctaatttcatgagcatatcagcccaacccattacaccaagaccgattttacggttgttagtaaccatttcgtcgatttgaggtaacggataattattgatagcgataacattatcaaggaatctgatagcagttcttgttgtttcgcctaataaatcccagtcaacaacccattggccgttttcttctttaaccatacggttaaggttgatagagccgaggttacaagcttcgtaaggcaagagaggaacttcaccgcaagggtttgtagattcgatagcgccgatttttggtgtagggttatcatagttcattgtgtcaatgaagataatacccggttcaccgtttctccaagcaccgtcaacaatcttatcaaacaccatttttgcgttaagtttgccgacagattgttttgtattcgggtgaatcaaatcgtaatctgttcctgctaaataagcatccataaatttgtctgtaatagcaactgaaatattaaagttgttcagttttgtgttatctgctttacagtcgataaattccaaaatatcagggtgatcaactctgagaatacccatattagcaccacgacgggtaccgccttgtttaactgcttcagttgcagcgttaaatacttccataaatgaaacaggccctgaagaaacacccatagtagaacgaacgacatcgtttttaggtcttaatcttgagaatgagaaccctgttcctccgcctgacttatggataagagcagtgttcttaactgtttcaaatatgccttcaagtgagtcctcaacaggtaatacgaaacaagctgccaactgacctaattctctgcctgcattcatcagagtaggtgaatttggcataaaatagcaatttgtaattgcatcataaaatctgtctgacagtttatccacatcactttgagttgcaccaaattttaaatcacctgatgcaatagtatctgcaactcgtctgaacatatcagccgggccttctatacacttgcctgaagcatctctttttaaatatctcttttctaatactttaatcgcattttccgataaattgatttgtttgttctctttcaacactaaaattacctccccactaaatctgtgtcttttaatcatacaacatatatagttttcgtggtattgatttagctaaaatttacaaaaattgaaatgaaacttaataattgcgttatttaaacgggataaaacaggaattattcgctgtaattttcggcttttatttcaaaaattgttatttcggggttggcttttttaattctgtttatataaactctttcgtaagggtttttgataatgatggcaacggcaggttttttgcctgtcattttagagtaatacatagattgcccgatagattctgcccattttttagcccagtcgtattctatagcatattcatcagtcaggcagtcaacacgggttctgtccggaagttggtattctattattcctttgcagtacatattcacataatcgccctctttcatgtgagaggtttttggaacaggtttttggttgaactcctgaaacgatgacggacttttataacagataaaagctccgaataagccgattatcaaaagaataacagaaaaaatatcaaacctttttcgtcttgccataatttcatttcctgtgcatgttaattctatcataaaatcctttctgaatttagcgaaaagattctatcatggctctatgtcaaaaacggacatgtttaaaatttttggaaaaatttttacattagaactaaaatccatttcaatatgctattatagtttttgtaataaatataaaaggaagtagaaatggcaaaaaaggttttcgcatttgatttaggtaaagcaagtataggttactgtgtaagagaaggtcatgatataaaagaggcaaattctataattatagataaagaccatgctgaaagagtatcaagtagggatagaagaagaataaaaagaacattagatgctcataaagcaagagaacaatattttgacaaaatatggcaagagtgcgggcaagaggttttagataaaaaagataaacgattcacaaaagaatttggcggaaaaagtgatgatacgatttatacttcctgtttgttaagaattgctttattgcaggaaaaacctttggaaaaatggcaaatatataaagcaatacataatgctattcaaagacgcggttatgatccgaatgttgcatgggctacaaaatcagaagatgatgaagacaatttaaaacttatcgaaaaatatacaaaagaaaatgatgttgaattaattcaatctgataaatacaaatttccatgttattacgatgccgtaaggttaggtttgtgggcagaagataaacctcaggaattaaagacatatattcgtattggaaatagtggaaaagtcagaacaactgattatgttgcgccaagacaattaatagaaaatgaacttcaacttttatggcaaaatgcacaaaaacaaatacctgaattaaagaaaataagtgcagaggaatttttgtatggggaatacagagaggcatacggctctttagtaaatcctgattacagaaaatttatgggaactgaaagagattggcaaggtgttttgggacaaaaaattccgcgttttgacaacagaataatctcaaaatgtaaactattaccaaaaagaaatgtatgcaaagcagatacaatagagaatgtaacctttgttttattgatgaaactcaaaaatctcaggtttacggatgtgtcaggcgaaaaagtgaaattaagtcctgatgaaattagtgcaatttatgaaaaatggcagaaaaaagtaaaagaaaaagacggcagattagatgttactataattaagaaagatattgaagaagtaacgggtaaaaaaataatagataaaattgaacctatgaaagcaaatatatccggtcgttcttcattctgccgcagggcatgtcagattatgaataaaataattctgacaggtgaattgtatccgacagaaatggatatatcagaatttgttgatgataaaaatgctgttaatgggataactgaagaagaaataaaaacgatgttatctaaagttggtgattggaataatttatatatttctgataacagagaagaaaatgcgaaaaatgcaagcagttcaagaataaaaacggatattatgataggtaatataaccaatccgattgtacgaaaccgtttgcaaatatttagagatttgataatagatttggcaaatcaatatggaaaacctgatgaagtcatttttgagtttgtaagagagggtgcggataattctttatttggtaaggtcaaagcaagtaaagcagaagcatatatgaagtcacaggaaaaagaaaatgaccagattaaaaaagaattagaagatgcagatgctttaaacggtaaatatttcttaatgcataaattactaaaaatgcaggggggtagttgtgcatacagcggtcaaaaaatcgggataacagattttccaaaatgtgaaatagaccatatttatccgagaacaatgggcggaaatgatgctttatataataaggttgtatgcttgagggaacaaaaccagcttaaaaaaggcagaacgccttatgaatggttatcctctgatgagcaaaaatgggcggattatgttaacagattgaacaaaatcaaaggtagtttaggtcaaaagaaatacgaactgttaacaagtaagccggaagactgtgcaaaattaatagaaagttataacggacttgcagaaacaagtcatattgcaagagttgctcaacaaatgacggcattcattttcggctggggacttcaggttgagggtgaaaaacgacatatatttgtgaataatggtgcatcaacatttgctataagaaaaagatatgggttaaattctttcttgggtgatgatgaaaagaaaaacagaagtaatgacaagcaccatgctcttgatgctatttgtatcagttattcaagagattttaaatatgataaggaaacagataaggatatcattgacgggtttaacccgttgaaagtaaaagaggttattgattcaattatgccttatccttatgcaaataaaaaaccgttcaaaggtaatactaaaccattagaaacgatttatggtttaagacaaaagggcggtaaaaactatattacaaacagggttgaaattacttctattgatcaaaaagaaagtaagataaaaaatattattgatgaaactatcaaaaatgatttgttatcaaaattagaagaaaaaatgtccgctaaagaatggacaaatatgttagaaaattatatacacccgaaaagaaaaacgcatatcaaaaaagtaatgcttgttgtatcggaaggtgaattggaaaaagattccaacggcagagaaagaataggcgaatttgttgattttggtactaaaggtacaaaaaatcaatttaaacattctaaaggacaaaaaggcagaattttatattatgattcaaaaaataacataaaggtaatgactatttattcaaatcaaaagaataccgatgtaaatgatatattagagaatatggggtgtaaattatatagaaaaggtgagatttattattctgggtgtttaataaatgtttgtgatgattttattggtggaaaaaatacttttaaaaaaggtttatataaaattagatcaataaatggtgctggtgttgcttggctgatagacaattcgggagtagaagtattgacaaatgtaaaatatctagttcaagcaaaattttcaaaatataatggttaatatacttgaaaaaacagaaaaatagtttataatataggtgtaggggggagtccctgcatgaactccctgacagtccctacaacatgtttgaaataaaaattagagtatgtcctatgagcagtagggcatactttattatttcccgcagatgttttttcatcgctccctcctttccaacaccagttgacagttgaatgtttgctgtgcgtttaaggaggaagttttgaaggacttccctacagaaaaattataacatatttttaatacatttgcttgtaaataaaacttaacaaatattgttttttaaaatattgtcattaaacatggcatgactatgagttaccatatattacatttaacaaccccaaactgtgcaatatcggttgataaggggcttttattctgcaaatataaatcaggtgaaaccaatatgatttcaattgctgatataaaagcaataattgttgcaacacatggaataacattcacaaacagttctcttgccaagttactggaatttaatgttattattttgcattgtaataattcctatcagccgacagggtggagtttgcctctgcagaggatagtaagaccaaaagttttttataatcagattgcccgtaatgaagattttgaaatcagattatggaaaaaagttttgaacacaaaggttgttaatcaggcagattgtcttgatcttatcggtaataatgaccataatttgtacaaattggcagacagacctcttgttagtgaatctaatattgcaagacaatactggaaacactattttgatgaaataggaaaccctgtaaaaagagagcatgaacatgcagaggaatttgaaaatatttgtctaaattatggttatgcagttattaaaactttaatatatcgggcaattattgttcatggtttattgccggaattgggtattcatcatttggggaaatataacagcactccgcttgtatatgatttgatggaagtttacagaccatttgtagatttttatttttataaatttgttcaggattttgagaatgattataactccaaaaatataaaagaatgggcaaaatatatatcaatggcaataaaatgctaccgtataaaaataaatgaaatcagttataaaatagttgacagcgttgatatgtatgtagaaaaaatagccgatgcgtatatgaaatatgactgttcaaatatatttttacccgaaataaaacaacaatatttgcatacagataaacacaggaacagagaatatgaggagtaaatacagaatgggttggttaatagtatgttttgatttgcctgttggtgaaaaagaagaaatgaaagaggcggcagctttcaggaaatctttacttaaacagggatattttatgctccaaaattcaatatatgtaaggtcatgtgtaacctatgacagaacggatattcatatcaggaatttgaaactgattgctccgcaaacaggaacaataacagcattttacctaacggacagacaatggagtttatccgttaatatagaaaaaacaaactacaaaaaatcaaaatacaaaaagaatgcaggcgaagatggatacaaacaaatgacattctggtaattttttgatagaatgtctatatgatgtatttaattttaaaggtttagagaatgaatttattcgtacatacaagcagaggaatcaattattctcttgtcaattatgattggactcttaacttaaaatattttacctttttattatatcatatttatttaattttgtatatcctattataacatattttaaattaagagtgaatcaaaacacgatttattctattttatggaaaattcattataacatattttaaattaagagtgaatcaaaacatgtacccgaaagtgttcaacgaatacaaattataacatattttaaattaagagtgaatcaaaaccggtataggataaaaaccgtcaatattgcattataacatattttaaattaagagtgaatcaaaacataggtacgattatgtagaattattttgtattataacatattttaaattaagagtgaatcaaaactattcttgcagcataaaccggagacataaattataacatattttaaattaagagtgaatcaaaacttttacctatatacacataaaagaatagcattataacatattttaaattaagagtgaatcaaaacttgactatataagtgaagattttataaaaattataacatattttaaattaagagtgaatcaaaactactccatatcatatatctgctgccgctttattataacatattttaaattaagagtgaatcaaaactaatatcagtatttcgcaatatacaaatcaattataacatattttaaattaagagtgaatcaaaacttcattgttagcctcctaaagcctcactaaattataacatattttaaattaagagtgaatcaaaactataagtccgcaaccgataacattcgttctattataacatattttaaattaagagtaaatcaaaactccccccttcaaaaatatagccgtgtggcttatagacatttggtctgaatttatcctagtatataaatgttttgagattttattaaggttcaatttatgcaggcatatacggaaaacaaagaacttacacccagagaaaccgaagttttcaggttgttggcttgtttttttgagaataaggaaattgccaaaattctcaattgttctgtcgctaccgtcaagatgcatgttgcatctattctgcaaaaaatgaatgtaacctctcgggctcaagctgtcataatggggctgaaaacagggataataaatcttgatgatgttcgggtaaggtagtttgtaacaatttattaccccaacaaaattaattagcaaattgtgtctttcatacattttatatacagcgtgtaagattgaaaagtcacagaattttcaaacgagtaaatattaagatatttacagaaaacacaaatattaaaatcactaactatagcaaagacgatatttccgaaaagagataccgtctttgttattttttgtcagataaatattttattctctttctgtttcttcctgcaatttgtcgcacgggttacatgtgcttggcgcacaagaattgcattttggtgtttctgttttacatttatcttttgcagggcagcattttttggtctttttgcaaggatcacatttttgttttttacatccgcagtctgctgccgcaccacaacagtttgaaccccatgtgaacgggttgagattgctccagcaaaatgcgtttgccgataatgtcgttgtcgataatactgctatcagtgttgctgccaataatgtttttttcatagtttctccttttttacaaatataactgagtcgtttaacacaataatattttattaactattgcggaaaaaactattgcccaacaggggatttaaatggcgattaaaaatgattaaaacatttttccagattatctataattaattcatcattattatagtttattatttttaccggggtattttcaattttggtttcaacccgtccgattatattcagcccgtaagtttttgcaaaatcttcgggaacagtcgctataatctgataatcttccccgccgtataacatcagatttttataatcgtcaggaaaaatttctttcagttctttgtcaaacaagatttttttaaaatctatgacgagggttttatcactcgattttgcaatcttaaacagtgcatctgcaagtccgtctgaactgtccatcattgcgtaatcttcttttatgttctttgatattttttctgaaaattcaacctgagctttcggcataagatggcgttcaacgaggtttgaggataaatttttgttttcctgtaaaagtttaagccctccggcagacgagccgtgaactccgcttgtgacaacaacctgcccctcttttgcatttgctcttgatgatatttttctgccgttagttgttccgattattgttacggatatcataattttatcggagccggtgatatcacccccgataatttctatcccctgacacgcatctttgagtcctttataaaattcttcaacaaagtcgttttccgtatttttaggcaaagacagggcaacagtcatatatttaccctctccgcctgatgcggatatatcactaatattaaccattgcagatttgtatccgagtttatacggagtggtgtattcaagcgagaaatggacatattcaaccagactatcctgactgactacaatccccaaatccttcagaaaggcacaatcatcaccgatatatttatctccgataatattttttatcgtttctataaagtcgttttctctcatagttatattatatagtgaacatctatgaatgtatgactgaaacatgagatatattattaagttttgttaacaaacatgaaaaaaccatggcaattttcatgattatatatcctttatatatacataggaaataaattaggatattatttacaggagaaattataaatgggtatcgatttcaacaatctgcttaatcaattaggtaaagttgcagcaagtatgcaaaatcaaagagataaaattgatacagattcagaattaaacacttatgtttcaggctgggatgcaatcaaggcaaaagctaacgagcaaaacagcgataatgatgtcaacaatgatgttgatatggcaactcttgaaacacagatgaagtctgaattagcaggtttaatgggtgctgatttcggtaaatctaaaggtattgaaacaaaaactgaagtaaaagacggtaaagaagttgctgtatttactgatgaagaagcattagaaggattaatgagcgcattatcagaaacaatggatgcagaaatgactgcaaaagttgcagaatataatgcaaaacatcctgaattggcagcagatactgacgaagcaatcgcttcattaaaaggtatcattactgaaaaccatgcagaaattgataacaaaaagaaaactgcgttcacaggtttcgacagcaaagatgttgatgacttgatggaagtattgggcgacagtgcacctaaagttttcagatatatgtcacacgcaattgaaaacggcagagctgatgcgattagtgcaagtattaacgaagcaggcgaaggttctgaagttatttatggatttattcaaggaaacaaagacgaaatctttgcataaaatattggcaggaaaaaaagttgtaaacaaaaagctgaacttcggttcggcttttttgtttggtttggggcggaaatttaatatttcttaaactaaaaccgcatgcccgttttgttcttgttatcatgttttgggataatcacaaatcatgaaaatagcacgaattatactggcaatatttacggtttttgttatttctctgtcatcttttgcggaggagtacaattttttggttattccaaacagcataatagatacagctcacagaacgattataggtaaaacggatattgaagagcttttggctaagaaatttattgataagcttgaggcatctgatacggcaaatgctccgactgtcaatgttttgaagatatcaataattaataaccctaatttcaaatattatgcggaaaaccctttggataatgcaaaaattattgctaatgcttttgggatatcaaaggttttgataatttcttcaacaactgaggtgaagaaccctgctcagcaaaaagagttctggaagaagatggggctgcctgttataaccaaccccgaaccgaatgtcagagtggttacaagggttacaatgtacaatgtcaaagacgatgaggtgttgtacagtgatgtgttctataaaaacctgaactttacgggaacggacataaatgtatatgatatgggaactccaaaacttaccgcagttgattcatattatgaagaactgataccgaagatgtttgaaaatgttaaggatagcaagcaaacccatgctattttgttatcatcaacatcaggggtgcaaaaaaatattgtggtgacagatgagttgttaccgaaaaaatctgcaaaaaaatcggaggaaaaagaggttaaacccgttaatactccaattgttccgacaacagaggttgtgtctgttaagcatgaaaaaattgttcctgcaaagaagttgcagcctgatttagaggttaaagagaattttaatgaaaataagcaggataaaaaagagaaaaaagggttgttggcaaaaataaaagacggaatgaagttcaatgtaaaaatatttgattattgtgcggtgaaagatgttcctgcccaagccacccagacaaaaccttatacagtcagaaaaagtgttgtgaaaaaggttttgaaagaacggaataatgagttaaagaagcaggaatcagcagtaaagtctgtaaaatcagatgagaaaaaagaaataaaaacatctgataaaccaaataaggaaaaggtttctgataacgaaaacaaaattaattatttaaatctggttataccaaatgatgataatgaatcggcaaacaggtatatccagacgaaattaagaacaagagcaaaagaattttcgccgaaatttgacaatacggtcaatgatatgtaggcgaaacggagtgaataaattaaaagttgacttaaaaacatgttcttgatagacttatggggcagggtacaagaaaagtccttgtagtcgaaaaataaataattttgcgcttgtagctcagcaggtagagcactccccttttaagggataggtcgcgcgttcgaatcgcgccaagcgcataaaaaacaggataggttacctatcctgttttttattgtttgtcagaggtgagaacacattagcgttcgacaagccgagcagagccacgaacgcagcgggaatgaattgcgaagcaacttccattcccgcaagtgagagtcgaaacacgactcggcgtaaacggttgcggaaatgagttgcgaagcaactcttgcttccgcagttgagttttcgacgggagtgtgagcggtggcgtttaacgcgaggcgcagttccgttatgtaatttattagtgcgtgctctaccgtagagctcctccatttgcttattcggaaacttattggttagtatgtaattcaacgcaaaacgtgacatttagtcaccttttgctgaacgcaaacggagtccttccttttaagggataggtcgcgaataagatttaccccttcgaatcgcgccaagcggatttctgtacggcaacgaccggatagcgaacaaattttgttgacaggtacaaagtaccgcaaacaaaattttgtgagcgtgaaagaaatccaagacagcgcaattttttattgagtttttttggggggagtgctctacggtagagctcctccatttgcttattcggaaacttattggttagtatgtaattcaacgcaaaacatggcataagatttttactattccaattttcaggaaaatatgttaatatatttttgtagggcggtctacataagttgaactccatttctacgcgacaaacattcaactgaccaaatggcgtgaaaggaggtgatgcttatgaagaacaaatggcgagaaataataaaatgtgccctatggctactaggacacattttgattcttatttcaagcaatttgtagggactgaccggagccgtaaggctccccctacactattattataaactattttttattaatttcaagagttattttatatttaccccgctatggcttttttgattgtttgggtaatgaaatcttcatttaattcatcggaatattgagaattttctacaacattattggcaacaaaattaataaaagactttattctttcatagtctttatctgtgtttgttccttttttaatctgcattagagaatataagaaatcctcctgcatatcggaattttcaagaagtccttccgttatttgtttttgcagaacatcgttagtcttttttaatttcttttgcgctaatgctatctgcatctgaacggaaactcttgcaataacttcatcaggctttatcggttttttgatataatcaacagcacctattgcaagacctcctgcgatatatttaacatcagataatgaacttacaaatataatcgggatatctcttgtttcagcatcctttttaagcatcttacacaactttaacccgttaacttccggcatatttatgtctaaaagaatcaatgcaggttttgtttctttgatgatatcaaaagcaaatttcgggtttattattttatccgttttgaaaccggcttttgtcaaaaccaaatcaagcagttttacattggtttcgttatcatcaataataattaccttatttgtcattttgcacctcttaaatatcaattaacagcaattcatcaagaagttcttttgctttttccaactcttcttcgctgtattcagttttatctctcaataaattatttaatgctcttgcaggaacagatattttatctattcttaaattagcacttgcccctgcaacagaatgggcaacctcgtttacctgagcataatctttttcatcccaataagattttatctgtgatttttgttcactgaaatctttcaggaaagtatctaataaatcttcgatatcttctttttccaagccaagttcagctataagaatattaattatttcttctttatagttgttattattttttggattatttttggaactttgagtgtcctgtatgtcttgtgtatcttgagtttcaacctttaaaaatttattaaattttgcaatcatatcatccatttttacaggttttgtaatgatatcattcattcctaaagataaacatctttctttgtttgaactaaaagcatttgctgtcagagcaattataggaattggtttcaggttttgttctttttcgtaatttctgattgatattgtggcttcataaccatccataacaggcatttggcaatctaataatataagatcaaacggtttactcttaaataaatcaaatgcctctttaccgttagaaactatttcacattctaatccgaatttattcaaaaattttcctataaatttttggtttgttgggttatcttccgcaacaagaattttgaaagattttgtgaagatttcttccaaaggtgcttgttcttcctgcttttcaacataatcattatttatttcaaattttattgtgaaatagaacgaagaaccttttccttcttcactgtctaattctaatttgccttccatcagggttattatattattacatatagcaagcccaagccctgttccgccatattttcttgtagttgattcatcggcttgggtaaattcttcaaatatttttgactgtttttcttttgcgattccgattccggtatccgtaactttaaactcgatttttgcttcattaccggttttttcaatgagttttgccgcaatttttatataacctttttccgtaaattttaaggaattattgattatattcatcagaacctgacgcaatctgacctcgtcgccaaaaatattttccggaatattttcatcaaattctgtaattgtttcaatatttttgtcgtttgaatttgttcttgtgtataagctcaaatcttttataagatcttttacattaaaactaatatgctccagtataattttgtttgcttcaccttttgaataatctaaaatatcgtttattgttgttaacaaaattacggaagaatttttaatttcttctacatattctttttgttcttcatcaagttttgttattgataaaagtcgtaaaaaccctaaaatcccgttcaacggggttcttatttcgtgactcatgtgagccacaaatctgtttttcgctttgtctttttcaatatgttcttttaaattatccgtcataag

SEQ ID NO: 2052 - DNA, 15210 bp, synthetic construct
  source 1..15210: mol_type = other DNA
  misc_feature 1..15210: note = Synthetic
taattccggcattggttaaacctcctccatatgttccgaaaaatatatcatctgagccaaaatgaccttctctttgagctttatcaaaacaaaataagaaaacatgtatatcataaccgggtctatttggagatttatcaccatttaggtcgtagtaaacatccatacaagtgcacccggcaccacaaggtaatgtcattttagaaccatctttaaaataaatacttctatctttggtaaaagcgtgtccaacatatgggtcaatgttttccatgtaccaattaaaatcagcctgagggcggtttgaagaaggcaatgtcatatcacgaaaagaacctttgtccatttccatatctaaaatggcattgttcatcttactgtagtaattttttaactttgcagaatactcttttttcactctctggtaatgaagtgtaggtattgtaagtgcagcaacaactccaacaattgtcattgtcaacataacttctgctaaggtaaatgcggctgaaagcctttctttataaggttttaagcttctaccccccccccgaaacccttactgcgactgaattttagcatatttaactctcctatttctttgtacataggaattatagcatttttttctgagtgttgcaagtatttgcttttatcttttaacccaattttcaaggatttttaacggtgaacgggttattgcaagagcccatgccggaatgtttttggtgataattccgccggcacctacgtttgctccttcttctaaagtgacaggcgcaacaagtactgagtttgaacctattttgacattatctttcagaactgtttttgatttaatttttgtcaaagggttgtagtttgcagtaattgtgcctgctccgatatttactttttcaccaagctcactgtcgccaatataagacaggtgaccaacatttgtattagagcaaattttggactttttgacttctacaaagtttccgattttgacattatccaaaacctcaaccccgcctcgtaaatgcgcgcaaggtcctattttgcagtttttgccaatcgtatttttgccttcaatataagttgccggataaattattgtatcttgtccgattgttgtatcttcgctaatccaggtcgaatccgggtcaacaattgtcacaccttctgtcatatatttttcaaggttgcgtttgttcatcatttttgcagcttgtgcaaggtttagacgtgaatttattccgtaaatttcgtcactgttttcaagaatatacgcattaacattaaggttttgggctttgccccatgaaattatatctgttaaataatactctccttgagcattatttgtttttaattgagaaaatgcgtttttaaacttactccagtcaagacagtaaatccccgcatttacttcttttataagtttttcgctgtctgttgcgtctttttcttcggttatacattttagagagttattatcttcgcggataattcttccgtagccttttggattgtcaaaaattgtgctcatcacagtaaggtcagagttttgtgattggtggaattcaacaaaatttttaagtgtttcttctttaataagcggagtatcgccgcaaagaattaacacaaacccctgatagttttcaagttctggtgctaccatagaaaccgcgtgtcctgttcctaattgaggcgtctggagcactgtttttgcgctgctgtaattcgatttaacaaaattttcaacctcttgtgcatgatgacctacaataacgtattgagttgaagcaagattttttacgttatctaaaacatagccaagaagtgttttccccattatttcgtgtaaaactttcggggttgttgcagaattcattctcgtgcctttgcctgctgcaaggattacggctttaatatccataagttttctctccatttttcatacaattatttttaatatctcaaaaaaataattgatatgcaaacgaagaaaatttattccctagccaagtttttcttttttgtaatcctgaccgccaacaatccgtaagtggcggctttcgccttcgccaatggatttactttcaagattgtgctgctcaacaagttcgtgttgaagttttcttatctgctggttttgaggggttaattcaacatctgttgcaccggcaaggattttttctatcgccattttggcttcatcaagcgctttttctgttatgtcataaaacgtctggcggtcattgacttctgcaatgtcaagcgcttcttttattaccttttgaatttgcgccattgaatttgtcttaacgtagaatatctgcaatctgttttcttccgcagttgataagacttttgcaccgccttttataaagtttttatgcgcaattacgatatcagcgtcgtctaaatttcgtgttatttcagcgttcaggtcaagccgttcaataactttttccgcaatacttcttgatactgcataaagataaattttcttgaattttttaacttcttcaacgtatttttgtcttgaaaagctgaatttaagactttccggatgttcgattttttcatcgagcgcgttaattttgtctaaaacagttggtgttttttcgactgtcggttcagaattaaagctgtaaaccttgtcaacttttcttatttccggtctgataggccaacctcgaagaatgtagtcaactgcttctgaggtgtttttgtaaaccgctaatgtatttctgtctaaaatttcgattactatatcgaaagtcggctgtttctcccgttctaatactgttttctgcgaagaacggcgttttgcctcatcatcgcctaatgttacggattgaataccgccgactaaatctgataatgtcgggtttttaatcaaactttccaggctattgccgtgtgctgttgcaataagcataaccccgcgttctgcaattgttcttgctgcttgtgcttcagcttcggttccgatttcatccaccacaattacttccggtgtgtggttttcgacagcttcaatcatgatatctttttgatactcaggctgtctaacctgcatgcgtctggcatgtccgactgccgggtgcggtgtgtcgccgtcgcctgctatttcgtttgatgtatcgacaattacgaccctcttgccaagttcatcagcaacaagtcgtgaaatttctcttaattttgtagtcttaccaactccgggtctgcccaaaaataatatactcttattttgcagacatatgtcctttatacaagaaatggtccccgtgacaacccttccaattctacacgtaagaccaactacttttccctgtctgtttcttattgcacttattctgtgcaatgttcccggaattcctgaccgattatctgatgtgaactcctgaacatgcgatgttatgtaatttatatcatcataagttatgtcagaagcctcaagatattcaatctttccgtctgaatgccttatttccggcggtcgtccgatatcaagcacaatttctatcacatcgtccatctgagcatacgatatgtgttgtctgattctgtcgggtaaaatctcaactaatctatctaaatcattctgaaattgtaggttgctcatattcgccgcctttctattttgattataacaaaatattccctggctattaaatgcgatttacaatgtaatatatcttctatatatattataacacatgaaacggtaaatttttggaatttatttactaattttgtagtaatttttacaaaactttacattttaaatcgggttcaaaacgtgtaatatcaacacttttcattttaaaaaatgcaaaaaaaataaaaagtctcgtcctgtggattgaacttaattttactgctttacattttgaaatacatcagaaatccggcttaaaatttgtttacaattatacctggtcaactttacttccatgctacaataactatgcaaaaagaacaggagagataaatgacaaataaagttgtagttggcgctcagtggggagacgaaggtaaagcaaaaatcactgatattttggcgcaggacgcagatttaataatcagatatcaaggcggatgtaatgccggacataccgtcgtagcgcataataaaacattcaaatttcacttgataccgtccggaattttatacaaaggtaaaacttgtttgattggcaacgggacagttgttttgcctgagtattttcagcaggaaatcgacgggctaaaagctgaaaatattgacctggcaggtttaaaagttagcccgcttgcttcaattacaatgccttggcacactgatattgacggctacagcgaagatacagcaggtaaaggtaaaatcggcacaaccaaaaaaggcattggaccgacttatacagataaaatgaacagaattgggctaaaaatcgaagatttatactcagctgaggcgttatctgaaaagcttgacataattcttcctctgaaaaataaacagcttaaagaagtttataacctgaaaacttacaccaaagaagaggttttagacttgtgcaaaaaatatgctgaaattttcagaccgtatgtttgttttgagtggcaagaacttctgcaaaacgcaaaacgcgaaggtaaaacaattctttttgaaggtgctcagggcgttatgcttgatgttgatttcggaacttatccatttgtcacaagttcaaatcctgttggcggtggtgccggaacaggttccgggtatggaccaactgtgattgatgaagttatcggggttgcaaaggcttatgtcacaagggttggcgaaggtccgtttgtaacggaattgactgatgcggttggaaaatcaattcaggatataggacatgaattcggtgtcacaaccggtcgtccgcgccgctgcggctggtttgatgcagttacaatgaagtacgcttgtcttgttggcggtttgacatctgttgcgcttactaaaattgatgtttttgatacgtttgatgaaatcaaaatttgtacagcatataaagatacaagagatggcaaaatttataaatcttatcctacaaatgtgtttatccataagtatttagagccggtttatgaaactcataaaggttggaaaactgatataacaggtattcaaaaatatgaagacttgccggaaaactgtaaaaaatatattaaacgtctggaagaaattttagaaactccaatttcaataatttcagtcggaccggacagacagcagactattttttgttaaattatgagtgacatctgcaaaacaatcgaattatttttaaaaaagtacgaattggataaatccgatttaagctatattgttgcattttccggcggatatgattcattgtgtttgctagattcgttaaaaaaaataacaaaaaacaggattatcgcaatacatctcaatcacaattggcgcggcgaagaaagcaaccaggaagaagcaaattgtaagaaaatttgtgaagaacttggcattgatttttattctgaaacgctcagcgctgacgttgcgcatacagaaaccgctgctcgcgctgctcgttatgatttttttgaacgctgtgcaaaaaagtttgacagccgggttatttttactgcacacaatcaaaatgacaatgcggaaacgcttatttacagaatttgtatgggcacaggcgttcggggattgcagggaataagcgaaaatcgcggaattttttatcgcccgttgttaaatatttccagagcagatattgaaaattattgcaaagaaaacaaacttaatccaaacaatgacagctcaaattccaatacaaaatacaaacgtaactttatacggacaaaaattttgccattgcttttagaaataaacccaaacacttttgatgcagtaaattcactatcaacagtcgccaaagaagaaaacgaaattgtaacagagtatattaataatatattagagaaaattacagtcgatgaaaaaattagcacaaaggaatttttaaaactttcagccgctattcaaaaacgtataatttatgaaattttcatcaaaaataatcttgattatgacagaaaaaaaattctaaaaatatggaaatttattaaagaaaattctgaaaataaatccggcaaaacgacctctttgactgataatctctggatttttgtaaatgaaaattatgtagaaattatctcaaaatttgacaatacgcaacctgttttttttattgaaaaagaaggaaaattggagacagaaaattggatttttgaaataacaaaatttgataaacctgttgaaaatttcccgccggatgatagctgctgtgcgtatgtaaatcttaaagattttccgctggaattgcgttatcgaaaagacggtgacataattaaaccgttagggttgaaaggaactcaaaaattaaaaaaatacttaaatgaaaagaaaattccaaaccatgaaaaagaccggctgatgtttttaacccgtaaaaatgaagttctttgggcaattggcttgggtattagtgataaaataaaagttgaaaaaaacgcatcacataaattgacattcataagaaagagggcagataaatggaaataaaaatcgaagaattaaaagtattgtttagcgaagagcaaattcagacaaggataaaagagctagcacaggaaatgaatagtttttacgccggcgaagaagtcattgccgtatgcgttttaaaaggtgctgtaatgtttgcggttgaccttgtgaaaaatcttgatatgccgcttaaaatggaattcataagactgtcaagctatggctcttcaacttcgacttccggaaaagtgaatgcggttgacataaaacttcctgaccttaacgggaagaatgttttaatcatagaagacattgttgatacaggtttgaccgcgaaatttttactggattttatgcactgcaatttcaacgccaagtcaatcaaattctgctctttacttgacaaaaaaataaccagaaaagtagatatcgaacctgattactatggttttgacgttgatgataaattcgttgttggctacggactagactacgacggctattacagaaacctaaaatacatcggctataaagaattatcctaaaatcatataaatatgttaaattttgttatttttatttacaatatggaacctcaatgttaatataaaatcataacagagggaagtatgacaacagcaagtaaagagcgtgtaaaaaaggcaatgaagagtgttggtataaatactcttacagaattagctaatgaagtaggcattacaaaaaatcaattatcagttattttatctgatagatataatcctataaaagctactttttttgaattaagtgaagttttaagagttacacccgataaattgattgattttcaatcaaatggtaaaaataaaccaaaatgtcgtgctcttgttaagcataatagtaaatactctgcaattgaattatttgcaggtggcggagggcttgctttaggcttagaacaagctggaattgatacaattttacatgttgataatgataaatattgttgtgatacattatctaaaaatagacctaattggaatgtagtttgttctgatgtttctaaaatagattttaaaccttataaaggaaagataaatattgtaacaggtggatttccttgtcaagcatttagttacgcaggtaagaaattgggttttgaagatactcgaggtacgttattttatgaatttgctcgttgtgtaaaagaaacagctccattaatatttgtagcggagaatgttagaggactaatttctcatgataatggaagaactttaaaaactattattgatatttttgaaagtcttggatataatatccaaacaaaacttctgaatgctgtaaactataatgttccccaaaaaagagaacgcattgtaatcgtcggaacccaaaaagatacaacaataaaatttgagtatcctaaagaatctaaaaagataaaaacattgcgtgaggctctaaaaaatgttccaaagtctgaaggtcagacttatagtacggctaaaaaagaagtttttaaactagtacctccaggtggttgttggagggatttacctttgaaaattcaaaaatcttatatgggtaaaagttttacaagtggtggtggtcgaaccggaatggcaagacggatttcttgggatgaaccttgtttaactttaacttgttcacctagtcaaaaacagacagatagatgtcatccagatgaagtaagaccttttactattagagaatatgcaagaattcaaacttttcctgatgattgggtctttgcaggtggcatggggcaacaatataagcaaattggaaatgcagtacctgtagaattgggaagacaaataggtatacagataaaaaaagcaatagatacttataaaaagtaaagatttataattgtttaactaattcttgtataacttcatttattaaatctgtactatcaacttcatcagctattgaaacaaaagttgctattaattcgttgtagaaattttcatcccctgtaagtctgtgccaaaaatcttgaccaataattacaggatattcttcattaattgttctgtaaaattgtgataaatctttttctgtaccatataatattccgacaatgcaatcaatattggggttaaaattaggtaagtggtttgtccttgctaaattttttatggatttaaaatcctcttttattgacgttatatccgcatagttaatagtatttggtcctgatttaatctggcaatattttttcctcccgtctaaagcgtctataaactcaatatcaataccagtagttgtagaagccagacccgatagaacttcacaacagaatgtttgaatttgagttccgaaagatgtgttaatagatgtccctaaaattctagggtaaactaaagcctttgccatattctcttttgacgtgtttccaaaagcaaaattagcaagataattaactagaaatggattaattataaattctttaatcttttttaattttttagtgttttttatatgatttgcaacaatgttctttttaaaaaataatttagcctttgctaatatctctaatctttcttctttgttcataatccacctctttcatgaggattatagcataaatttttatttacaaaatggagcgggcaacgagactcgaactcgcgatcttctccttgggaaggagacattctaccactgaactatgcccgcatggtttactttattttagcacaaatattttattttatacaactctgaattatttacctatttacaaaggcttctatatgttataagctaattaaatagctgaaggagaacgtatgagtaagaaagtttttgcatttgatatgggtaaagcaagtataggttattgtgcccgtgaagataatgagataaaagaagctaactcaataattattgatagagaacattcggatattagttctttaagagatagaagaagagtaaaaaagactttagatgcgcataaagcaagagaaaagttttttataaaggtttggactgattgtggtttagtgcctttagatacaaacagtgctgaatttaaaaaagagttttctgcaaaaaatgaccaaactatttatacatcttgtcttttaagaattgttttattgcaaaataaaaaacttgaacaatggcagatatttaaggctttatataatgcaattcaaagacgcggatacgacccaaatctggcatggaaatctgctcaatctgaggatgacaaagaaaatcttgaacttatccaaaaatatactcaggaaaatgatatagaattaatcgcaaatgatgattataaatatccttgttattatgacgcaataagacttggattgtggtgtgaaaataaacctgatgaatttgaacgaactgttaatcagcaaagtttaatcaaggtgagaactacttcttatgttgcaccaagacagcttattgaaaaagaattaaaacaattatggataaatgcgcaaaaacaactttctgaattgaataaatattcggttgaagaatttttgtatggtgaatatgaagaggcttacggttcttatgtaaatcctgattacaaaaaatatatgggaactgaacacgattggcaaggtgttttaggtcaaaaaattccaaggtttgataatcgaattattgcaaaatgtaaactgctgccaaaacgaaatgtatgtaaagctaataccttagaaaatgtaagttttgttttgctgatgaaattaaaaaatttgcgattgacaatgcttaacggtcgcaagaaaaagttagatccttcggaaatcaaaaagatttatgacaattggttacaggaatctaataatggcaaaattttaactacaactattacaaagacaaaaatagaaaaggtacttggcgaaaaaatctcagcagaaacaaaaactctaaatgatgatttaaaagttaatatttcaggcaggtcatctttttgtaaaagggcttgtaaaattatgaataagtttatcttatcgggggaattgtaccctcttgatatggacataacggaatttttagaccctgaagattgcccaaatagaattacagaagaagaaattcgttccatgttatcaaaaattggggattggaataaattatacattcctgataatcgtggtgaaaatataagtgatgaagaactaactagggttaaaactgatttaatgattggtgatattactaatcctattgttagaaacaggcttcaaatttttagagatttattgctatatttagagaaaaaatatggtaaacctgatgaagtaatatttgagtttgttagagaaggtgctgataattccttgtttgggagagctaaggcgcaggctgctgaaactaacatgaaaataatggagaaaaataatcagttaatagttaatgaattaaatgctgccgatgcctacagtgctgtaaattttgaaaaacttaaactccttaaaatgcaggcaggtcgttgcgtttattcgggagataatatttgtgtagaagattttgacaaatgcgaaatcgaccatattttcccgcggacaatgggcgggaatgacgctttgtataataaagttttgtgtttcagggttgaaaaccaggataaacggggtagaacaccttatgagtggttatcttccgatgaagataaatgggcaaattatgtcaaaagactaaatgacataaaaggtagtttgggcaaaaagaaatttgaacttttaacaagcaagccggaagattgtgcaaaacttattgaaagttacaatggattagctgaaacaagtcatattgcaagggttgcccaacaaataacggcgtttgttttcggttgggggttgcaggttgaaggtgaaaaacgacatatttttgttaataacggttcttcaactcacgcaataagaaaacgttacgggctaaactctttgcttggaaatgataccaagaaaaacagagataatgacaaacaccatgctcttgacgcaatttgtataagttattccagagatttcaaatatgatgaaaaatctaagaaggatataatcaaaggctttacacgtgaaatggttaaaaaagttattgaagaaattattccttacccttatacaaataaaaaacctttcaagggtaatgtaagacctcttgagacaatctatggattaagaacttatggtgataaatcttatataactcaaagagtttctcttgaagatattgagcagaaagataaaaaaattaaatctatagttgatgaagtcattaaaaatgatttaatggaaaaactttcgcaaaagatggattccaaagattgggtaaatatgctgcaaaactatattcacccgaaaaagaaaaccagagttaaaaaagtaatgatagttgtgtcagagggcgaaattgaaaaagataacaatgatagagaacgtatagggagatactgtgactttggaacaaagggtaccaaacatcaatttaaacgttcaaagggacataaagggcaaatactttactttaacgaaaaaggtgcagtgaaaattatgccggtctatgcaaatattaaaactcaagatatcaaggataaattattggcgcttggttgtaaattgtatcgaaacggcgaaatgttttattcaggatgtttaattgatatattaaatgagtttaatgtaggtaatattacttacccaccgggaacttataagttaagaacaattgaagaagtaggaacaactaaaatagagaccaataatggaatagaacttagattcaatattaaaaatttggttcgggcaaattttaaaaggaattggagttgacataaaaaaaatgttcattacatgtaggatatgagttatcatatcctgcatattacaacacctaattgttacctatcggttgatagggggctgttattttgtaaacttgataatggtgaaacaaatatgatagccttggctgatttaaaggctattattgtcgttacgcacggtgtatctttttccaatcattgtttggcaaaattattagaaaataacgttgtaatactgcattgtgataatcattaccaaccaacgggttggagtttgccgttagaaagaattgtcaggacaaaagttttttataaccagattgccagaaatgaagaatttgaaaatctgttgtggaaatcaatattaagatgtaaggtactaaatcaggcaaataatttggatttaatgggagataatgaccataacttgttcaaattaataaacagacctttaatgagtgaagcaaatattgcaagacagtattgggaacactatttttctgagattgggaacccgcaaaaaagagaacatcaatgggcagaaacttttgaaaacggttgtttgaattatggttatgcaattattaaaactttgatttatcgttcaattattgtgcatggcatgattgcaagtttgggggtacatcatcttgggaaatataaaagtacccctttggtttatgaccttatggagccgtatagaccttttgttgattattatttttataaattttctcaagactttgctgatgagtatgacagtaaggattttaaagcatggagtcactttattgcaaattgtattaggaactatcgtttaaaaatcaatgaaaccagttataaacttgttgatactattgatatttatattgaaaagataactgatgcttatattaaatttgattgcagcaatatatttttgcctaaaatcgaagaacagtacctttatatagacaaacaaaggaacagagaatatgaggagtaaatatcgtatgggatggttgatagtatgttttgatttaccggttggcgaaaaggaagaaatgcgacaggcaactagatttagaaaatctttattagagcaggggtatttcatgctgcaaaattcaatatatgtacgctcttgtgtaacttatgacaaaacagaccaacatgtcagaaatttaaaaatgatagccccgctaactggaacgattacagcgttttacataacagacagacagtggagtttatcagtaaacatacaccaaataaattacaaaaaatcaaaataccaaaaacaagccggagaaaacacagaaaaacaaatgacattctggtaactttgtgataaaatgtcatgtagaagtattaaattttaaggatttagagaatgagtcaattcgtacaatattgcagaggagctaactattctcttttcaattatgattggactattagtttaaaatatcttacaagtttattgtatcataaattatttaatttgtatatccattataacatattttaaactaatagtaaatcaaaacgcggcatcgtattgttcttcttgccaattattataacatattttaaactaatagtaaatcaaaacgcatattcacgcataaatacgcaaatttttattataacatattttaaactaatagtaaatcaaaacagccttttataagacttcccatgcctgcattataacatattttaaactaatagtaaatcaaaacatatagttgcattaaaacatcatcctttaaattataacatattttaaactaatagtaaatcaaaactatatcgtgtgagaagtatggcttagatgcattataacatattttaaactaatagtaaatcaaaaccgtttctaactaataatgttgcttctgctgattataacatattttaaactaatagtaaatcaaaaccgtttttccgtttatcgttgctttttcaattataacatattttaaactaatagtaaatcaaaacagatcagtgttatatcgtgaaagatttcttgattataacatattttaaactaatagtaaatcaaaacaatagcaagatagatgtttcctttaaaaattataacatattttaaactaatagtaaatcaaaacatatattctctaacaatcattctgataatattataacatattttaaactaatagtaaatcaaaacatatattctctaacaatcattctgataatattataacatattttaaactaatagtaaatcaaaacgtgttttgcgattgcaaaataatatcttatattataacatattttaaactaatagtaaatcaaaacgatccgtaagaattaacggaactcttgatattataacatattttaaactaatagtaaatcaaaacattacatttgtagtttaactcgttgttgttattataacatattttaaactaatagtaaatcaaaacgcaatgtggcatgtgcagcaagttaataaattataacatattttaaactaatagtaaatcaaaactcggatgaaactcttgtgtataatacggcattataacatattttaaactaatagtaaatcaaaacccagatttgccgtaatcttcaagataaacaattataacatattttaaactaatagtaaatcaaaaccattcgccttgcccttaacaatttttgataattataacatattttaaactaatagtaaatcaaaacaccctccttatattttcttttaaaattttattataacatattttaaactaatagtaaatcaaaactatatcaagctcataaagttcttgtt

SEQ ID NO: 2053 - DNA, 13917 bp, synthetic construct
  misc_feature 1..13917: note = Synthetic
  source 1..13917: mol_type = other DNA
agctacagcaactggagcagcagcagaaacgccgaatttttcttccatagcttttactaattctgaagcttctaataaagttaatttttcgattgattctaaaatagattctacactcatggttttctcctttttattattttaatttgtgtaatatacgttttgttctgattaataatcagatgcgtaaatcttacgcagatttttgatctctaacagcagccatagctcttgttaatgaagacataactgcattgatagagtttgcgataccagatgcaggtgaattgatacaaccaagcatttttgcataaatttcgtgttttgaaggcaatgtagccaatgcttttgcttctgctgcagataacaatttaccgtccatagcagctgctaatatttcaccttttttggtttctttaatgaattttgccaatgcttttgctggtgcaacctgatcgtcaaaaccaaatgcgattgcaacaggacctgtcaaagaatcagctaatacttcatattctgttcctttaacggcaatttttgctaaagtatttttagttaccatataatcgccgtcttctttttgaattgagcgtcttagtttggtaatttcttctactgataaacctttgtaatcagtaacgatagcaacttttgccttttcaattttctctttcatttgagaaattttttctgatttaaaggcttttgttgacattttttgctcctttgtttttatttttgcgaattaataataaatccgtttcgaccttttgtttacatagtaaaaagactttgcgtcaattactttaccgcaaaatcttacacatttaaaaactattttaatatttcgactgtgtaacctaggttagccggttcttccttttataatgtgatgagctagaaactttgtttcttttacatcgaggatttgcaccttgaaactctgtcagcataactaactgtctgcggtttgtactcatggtagcaaataaattttagaaatcaagcactttttattaatttcttgaaaaaaattaacatgtgggctatactttccttacagagtatatacaataaaggatttggaaatatgaaaaaaagattagcaactttattattacttagcttattaagtatagcacctgctcttgcagaaggcgaacaagctggacaagctcaacaacctgcacaagaaactcaaaatgttcaatcggttgaagttaatgacgcaagtcaagctattgaaccaacagcacaaaaacctactgaacaaactaaagttacaataaacgatataactacagattattgggctaaaatgtctattgaaaatgttgtttcaaaggacattatgaaacttgacgataaaggaaactttaatcctgaaaaaagtcttacaagaattgaatttgtacaagctcttttgaagattttatctaacgataacttagatgtaaaaatatcaaacatattcacggatgttaaagaatctgacgcatattatgcagatgttttacgttcagaacaactcggacttgtatatggctaccctgataataccttcttgccaaacaatacaatgctaagaagtgaaacaacatctatcataagtcacataacaaaagataaatttgtagattgttcaatattagataaatacacagataaaaacgatattcctgaatgggcaagaataccttatgcaaaatctattaactatggtatctttgtaaatcaccccgatgaaaacaaacttgaaccaaacagaaatatcacaagagcagaagctgctgttcttttatctcgtttaaacgataaactttctttagtaaaacctaaattcgttatcccttcagaaaaaatgctttctgtagaacatctaaacttgataagaagaactccttgttctaaaatccaaattacaaactggagaaagattattttagaaggtaatgtaatccctgtaaaatatgaatccaaatttgcatcaaaaactgcatctgaaggcgataaagttaatttcgttcttcctgaaggattatacacaactgaaggcacacagcttttacctgcaggaacaaaactaacttcagaagtttctattgttgaagctccaaatagtttcaatagacgcgcaaaagtttatgtaaactataaacaatttgttttgcctaacggcacagcttatgatgtacaagcaaaaacatatacaagagataatgctctaaaagaaactctatggcttgcaattccaaaagcactaacaggagttggagctgtaatgccggggctaaattatagagccaaagagggtgaaaaaataaaagttattatgttagatgatgcattcctaacaaatccggaaagaatgcaacaacaagaacaacaagaaacagggctgtaatcagccctgttcttttggctaaattttttaaccaacattatatctgctctctattcttgacatatatagaaatatagtatatctttcaagtaatataaaatggaatttaaagaatggcgaataaaattaaatgccctaaatgtggtgaagaaatagatatagaaaacctaattcaagccgaagcaaaagatgcgcttgataaaaaacttgcgcaacagaaagctcaacttgataagcaactggaagaatacaaaaaacaaacagaatcgcttaaatctcaacttgaaaaagagaaagaaaaagctatagatgatgcactaaaatcacaaaaacaagaattcaaagccaaagaagaagaactcaaaaagaatatacgagaagaacaaaaagaagcttatcaagaacttgaaaaagaacttgaagaaaaatcgttacaaatcaaagagcttaacaaattaaaagccgaaaaatcacgacttgaaagagaaaaagaagaattgcaagaaaaaattattgcagatacagaaaaagaattttctcaaaaactcgttgaagaaaaacaaaaatatcaaaaacaagcagaagaaaagtttgaactccaaatcaaagaactccaaaaacaactacaagaccaaaaagacttgacagaagaaatgaaaaaacgccaagaacaaggctctatgcagttgcaaggtgaagttcaagagcttgcaatagaaaaatatttgaaggaaaactatatctatgacgagataaaagaagttggtaaaggtgatatgggtgctgattccttgcaaatcgtaaacacctcatacaaacctaactgtggaacgatatattacgaaagcaaacgcacaaaaaccttcaaagaagattggattgccaaattcaaaaacgatatccaagaaaaaggcgctgatataggggttcttgtaacagcagtttaccccaaaagtatgacaagaatgggtatgaaagacggtgtctatatatgcacttatgaagaatttaaggctctttcatttatccttcgagaaactcttatcaaaatcagtgataccaaaaccttgcaagaaaacagacacgaaaaaagtgctatcttgtataactatttgacaagtacagaatttcgattccagtttgaaaccattgtaaacgcatttgtcggactgcaaaacgatttggaatcagaaaagcgtgcaatgaataaactttggaagaaaagagaaaaagaaattcaaaatgttctatctgcaacaacagatatgtatggcgcaatacaaggaatttcaggcaacgcaattcaacgagttgaagcactcgaacttccactattggattaattattaagttttctttacaaacctttcttattttagcaattatatcctcgatatatacttattatatatatgagtgaatcagcaacaaataccacgaatatgccacaaacaacaccaacatatagtgttgaacctaaatctgtgacaactcctgttcaaccaactgctgcaacagttgatatgacttcaacaaaaggtactgtagctgagcctcaagttaataacaacccccaaaaagggtttgatacaaataacgcaagtattccaactacttatgctcaacgctacatgtcagggattaataaaactccgacttttcaaaagaatcaaaatgatgacgaattttcattgaccaattctttaggaaattcagctttattaaccttagcttttaaaaatgatttcacaacgcaagcagaaaacagaacaagttttgaaaagtcaaaaaatttatttgagacattagacaacgaaaactttaaatacggtcgtttattcttccaaggcagttggataaatactcgcacaccgattgatcctgctacaggagaagcaacaggactacctgaaatgttacctgcttaataattatcacatatttttattttcatatataattactgtatgaaacttgcaatagtcacaaataataatgtagccaatacaaaaaaagttctttcaaagttcgaagatgaactccaaaagaactctttaagctacgaaattgtagatatagaccatttgaaaaacggttttgattttgtttgcgcaatcggtggtgacggaacaattcttaaaactgctcgtttttacgcaaattatgacactcctatactcggtataaaccttggacgcttaggttttttgtcacagtcaggcacatcagaaattgccaaagttgttgaacatatcaaaaacaaaacttataaagttcaagaacgaacaatgttaaaatcagacaattatactgcattgaatgattttgttataaaaggacattcttgcacaagaacttcaaaattttcattacaaatcaataacaaatttgtatgcgattatattgctgacggaataataatttcgacaccaacaggctcaacggcttatggactgtctgcaggaggtcctatattgtgtcctgaaattgattgccttgtaattgtgcctatatgtccacatactttgacagcaagaccgttagtaattcctacaacagaaaaaataacaataagctctatggacgaattattaacagtcgctattgacggacaagaacaaagcggcactgtcaaaaaagttgatatagaactttcacctaagaaagcaaagctagcatttcttggtgatgatgatttttattctatcttgcgtgacaaactacattggggcatatcaccaaccgataactaataattaattaaaaatctgtcgggccgtcaacatcacctccatctcctccaccaccacctgaacctcctgaattgtaagaagctgtaatattaaaccttgctttgtcatactggtaattattcatcatttcttcatcagaaatataccttgtgtacatacgggcagagttgacagtgatataagaaggatttgaagaatacttgccagtattatcaccacaataacctatggtaagtgggatattcggcaaatcagataacgaatctgtaagaacagcagattcatcagaaccgtaataactgttaaagaaatgaatctcaccttctttaactctaaaacagcaatatatttttgcacctgtaggaatagttttgtaaggtgaaactgtataagttttgcttgtcccaacataacaactgccgtatagattaccatatttatcaactctaattgaatatccacctgtttttggtaccagattcccgaacaactgttgagttgttgataaaatttcatttaatgtaaatactaattcgagagtacattctttgttataatcagttatatccgtatatccataaggtgaagaaccataaaacccataccctgtagtagatgtaaatgttgtagaatcctcatcaaaaaaacatgctctatcagttacagagtttgcccaactgttaatcccgactaaagggtgccatctgctagattcacccgaaaaacgagaagatgtaaatccaccttgattgtttattgcgtccagccatactctcaaacctacaggagagatttgaggagttgaagcaactgatgatgtcggaacattaacaactacttcacctagtcctgtgtaaccttcatcagctgaatatgtaccattttctgttattattttgttttgattgttaattgtatcaccaactgttatttgagaaatagcctgcgcaagtttgtctgacttgttgttgtattcagtaacatttacattgaatttttctatttcttgatatgcgtttgtaatgttggttttgattcgttgtatttgattagcgattgtcatagttatatttcctttcttttgtgtcattcagagggcatagcccgaagaatctcttagacacgttagagatatttcgcttacgctcaatatgacataacgagtttcttattcacttaaaaacttagatttcctccaataatgcttctatgccgtccagttttgtatctatttctgttttggtgtaaacatctgatacattggctttgatatcaagtttggcatctaaatctgcttgtgaatcaatgttgcctgtaataaagccccattcaagttttgtattgccgagattttcaatattatcagctacagtaacaattttttgaatattttgagaaacacttacaaaacctgagcttgctaaaatgttatcaatatctgattttgtttgtacaacatctgttgcaaactcttttgcttgtacggcgaactctttagccgtatctgaataatactttgcagtattgttggtaatagtaatacgattaacatcgtatccagattttgtcataaccataaaaaatcctttctgtgtaaaacacttttgattgcattaacaaaaaattagacaaactttttatctctctattggtatagagtaggtagagagtggagtaaaaaatgcgtaagctggtttttatcgacttaaaacattatctttgtgagccactaagcagacaatctaaaccacaaaatcaccattccgagccattagtcaaagaatctctaacaaaacttgctagagatatttcactcgctcaatataactataagggtagccattccttactacgatacggaatctgtcaatgccgattttaataatttaataatttatttctcattaactttataaatagattaataaagaacttaattatattaacaaatcaataaaagaattgcagtttctaaactaatcactccccaacaagaaccccagaaatcacacagggtaaaataggctttgcctttttcgggtgggcttcgctataatacagccaacaatttgtgggtaaattttcggcaagaaaaagtctttcttcatctgacaatgccatatattcttcattcgtcatattcaatcgtgaaagatttttaggtagcatattatcaccttacttataactttttacttttcttccgtattggtcgtattgagttgttctacctgatgaatccgttttaaacgaaccaactttttgtccatatttattgtattgggtaactgaaccgttagaattttgcctatatgaacctgttttctgtccgtatttgtcataggaattatagcccgatgaagttttgcgatacgaacctgttttctgtccatatctgtcataagagttgtaacctgacgaggtcgaacgataagaaccagttttttgtccgtatctgtcataggaattgtaacctaatgaagtcgaacggtatgagcctgtttttgccccatatttgtcgtaagagtatgtagtttttgcaaaaacaatagacgataacaagaataaccctaataataacgaaaatatctttttcatattaccccttcagatttaacaataatcctttttctgaacttcttaccaattatataacgaaaacatagatttctttattaaaatatgatatattaagtattattttggagtgatctatgaataaaaaagtttttgcatttgatttaggtaaagcaagcattggatattgcgtaagagaagatttaaaaattttagaagctggttctttaatcatcaacaaagaccacgcagaatgtatctctaatagagatagaagaagagtccaaaaaactcttttagcacacaaaaaaagagaatcattttttaacaatttatggcaaaattgcgatttaaacatattaaacaaagatgataaaagattctcaacagaattcggcaaaaaaaatgattcaactatttataattctacacttttaagaattgcattaatacaaaacaagccccttgaagaatggcaaatatacaaagccttgcataatgcaatccaaagacgaggttatgattccaaactaccatgggcaaatgcaaaatctgatgacgataaaaagaatgaagaattatctgcacgatatactcaaaacgaacaaggcgaagaattaatcaaaaatgagaactttaaatatccttgttactatgatgcagttcgcctaagcttatggtcagaaaacatgccagaaaaactacaaacctatgttccacttgataatgttaaaaaaattagagatgctggaattgttgcacctcgcaaccttgtagaaaaagaacttaaacaactatatatcaatgcacaattacaactccctcaactcaacaaatattcagtagaatatttcttgtatggcgaaggtgaagttgcatacgcatcttataacaaaaaagattataaatgccatcgtggtacagaatgggatatgcaaggagttttgggacaaaaaattccacgttttgataacagaattattgcaaaatgcaaattactaccaaaaagaaatgtatgcaaagctaatacacttgaaaatgtttcgtttgttttattaatgaaactcaaaaatttacgatatacaaacataaacaacgagtattcaatgctttctgctgatacgataaataaaatttatcagaactggctaaacaaagccttgaaagatgatggaagctacaaactagatacaaccattatccaaaaagaagttgaaaaagttcttggagaaaaaatacaagataaatttgagcctttaaaagctaatattagtggacgttcaagtttttgcagacgagcttgtaaaatcatgaaccatatcatcttaaacggcatagaagacccaacaacaatggacgttgctgaatttacagataatatagatactcccaacggtataaccgaagccgaaatacgaactatgctatctaaaatcggaacatgggaaaatttatatattcctgacaacagatatgaaatggcagaattgtcaagtgataatcgagaaaaaactgatattctaattggtaatattacaaaccctattgtaagaaacagacttcaagtattcagagataaattaattgaattaaagcaaaaatacgaaactccggataaaatcatatttgaatttataagagacggtgcagacaattctttatatggagcaaagaaagctcaagacttccttaaaacaattaaagaaaatgaaaaaacaaataatgatttagctatagaattaaaaaatgcagattgctttagtgttgtaaatcttgaaaagctaaaacttctaaaacaacaagacggtatatgtatttattgtggacaaagaattggcatttctgatttagacaaatgcgaaattgaccatatctatcctcgttctagaggtgggaatgatgcaatttccaataaagttctttgttattcaatagaaaaccaaaagaaaaaagatagaactccttatgaatggttacataatgatgaaagaacatgggctgattttgtaaatcgtgccaaactgttaaaagataaacttaaaaaaacaaaatatacacttttaacaagtaaacctgaaaattgcgaggaactaattaaaagttataatggacttgcagaaacagctcaaatcgcaagagttgcacaagatattacggcattcatattcggttggggcttgcaattaaaagatgaaaaacgaagaatttttgtcaataatggagcatctacatctggaataagaaaaacatatagattaaacaaactcttaggaaatgatgtaaagaaaaaccgtaataacgataaacaccacgcacttgatgcaatatgtatcagtttttcacaaaattataaatacaataaacacacaaaacgtgatgaaattgaaggactagacattcatgataatgaatttagagaactaataaaacaaaccttagatgcaatcataccttatccatacacaaatgataaaccttttaaaggtaacacaaaacctttagaaactatctatggctatagatgtattgacaataaacattacataacacaacgtgttagcttagaaaccattgaacaaaaagataaaaaaattaagtgtattgttgatgaagtcataaaaaatgatttgttggaaaaaatcaaagaaaaaatgccaacaaaagactggacaactatgctacaaaattatattcacccaacaaaacaaactaaagtaaagaaaattttggttattgtttcagaaggtgaattaacaaaagattctaatgctcattctcgtattggagaatacgcagattttggaacaaaaggaacgaaacatcaattcaaacactccaaaggacataaaggacaaattttgtattacaacgaaaaaggtgtaatcaaagttttaccaatatatgctaaccaaaaagatagtgatgtaaaatcatatattgaacaaaatggttgcaaattatataaaaaaggaatgaaattctactcaggttgcttaatccaaataaataaagactttgaagcaactgcatactatacgcaaacagacgaaaacggcaatgacaaacaaattccaacaaaagaaaaattacaagcaggagtttataaacttagaacaatgatgattgatggaaaagtaaaattagaatcttctactggaattgaattattaacaaatgccaaagtattagtagaagctgatttttcgaaattttctaaatattaaatttgacaatatatgataaatcattaatcatgctatatgacttatcacatattacatataactacgccaaacgtcagtctttacacagataaaggtttcttttgttgcaaatttgatgatgatagcgaaaacagactaccaattgatgatataagagcgattattattgcaacacatcaagttacttttaccaattcttgtttagcaaaattgttagaaaataacatagttattttacattgcaacaattcatacaaaccaataggttggagtatcagctttgatagagttgtaagaacaaaagctttttctaatcaaattgcacagaataaagattttgagaacaaactatggaaaactatactcaagtcaaaagttacaaaccaagctaacaacctaaaattaataggtcagaatcctgaaaacatattcaaactaatcaacaaacctttgattagtgaagccaatatcgccaaacaatactggaatgcttattttattgctcttgaaaaagaacaaaaacgagaacacaaaaacgcagaaaactttgaaaatatatgcctaaattatggctatgctgtttttcagagtttactgtatcgttctattatcatacatggcttaataccaaatttaggaattcatcatgaagaaaaatataatagtgctcctcttgtatatgatttaatagaacccttcagagcttttattgatttttatttatacaaattcaaaattaatgaaggtggaagttttaaaagagaagatttaaaatcatggaataaatatctagcattttgtatgaaaaactaccgcctaaatgccaaaggactcaattacaagattattgattttattgatatttatattgaagaaattgtaaactcatttataaaatttgatatttcaaaacttattctacccgatatttctgcacaatatttacatatagacaaacataggaaccgagaatatgaggagtaaatatcgtatgggctggttatttgtatgttttgatttacctgttatagacaaagaagaacttcgtcaagcaaatgcttttagaaaagctcttttaaaaatgggctattttatgctccaaaactcaatttatgttcgttcctgcgttacttatgataaaaccgaacaatttatccgtaatgttaaacttatagctccaactacaggaagtgtaaatgttttttatttaaccgatagacaatggagtttatcagtatgtatagaaaaaactaattataacaaatcaaaatataaaacaaaaataggcgaaaacgcaccaaaacagatgacattctggtaaatttatattagaatgttattatggatattcgaatttttaaggatttagagaatgagatcttttcgtgtcgtagcagaggaaacgactattctctgttcaattctgactggactcttaacttaaaatattttattctttcattatatcataattatttaactgtgtatatcctattataacatattttaaattaagagtaaatcaaaactgggattgtttgcatacaatttataaaaattataacatattttaaattaaaaataatcttacagaatattttcatatttttcacttaaaaaatatctgcgtttacgcccttctccatcataatgaagaaaactagattttacccattctgaaactaataaacgagcagttcttggagcaaatttaaaaaattctgctacatcctttgcagttatatatttttgaacttcgaacaaattcaaaatttgtcgttgctttgggtctagctctcttaatacttttacttcatcttttgtatttttattttcttctgcttttttataaacagaattaaacgcaatagccataccattgacaaagtattcaatccattttgtaatatcagattctgcacgtcctaagtaatagttatgagattttccaatggttatagcatcataatagccttgtaaatcttttgcataatattcttctagagaatatattccttttaggtcatatcctcctttatgtagagctaatgtagttaaaagccttgcagttcttccattcccatcaaaatatgggtgaattgtaacaaattgataatggataattgcagctttaattggtactggaatatcatttgttgtatttatccagtttacaaattctttcattaatattggtacatctttagcttcaggaggcatatatacaatatttccggacaaagaatccgttattacattttgcccttcacgatattcagttggttttacctttttatttccaccaccttcaacaagtgcatgaatttgctttatgtgcttttcggtaatagttgctttttctttaatcaatttttctatataatctaaggcaatataatatcctttgatttctttttcatctctaattcgtcctgtattagaaattactttgtttggattttttaaaacattataaacttcttcctgagaaagcctatttccctctatttgagtagaataatgaatggttgtcattttagcagtctctctaagagaagtaaggagttttggatttattggtaaatttttaataccctctttaaccctttcaatttgaataagattattagcgataaaatttgtaatctcgtattttggctcaaattttgccatattagctccttatttttgccactattttgccacattcttgccacaaagtcaagtgatataagttaataaagagtctaaataaaatataattaatcttttccctgaatttgtttaggttgcttatgtggaagaaaattactgtcagttacaacttttttactggtttctaattccaacttttttgcgtagcgatcatattgggttgttttacctgtggaatctattttgaacgagcctgtttttcttccgtatttatcgtaagatgtggttgtgtcgttaggggttt

SEQ ID NO: 2054 - DNA, 13700 bp, synthetic construct
  misc_feature 1..13700: note = Synthetic
  source 1..13700: mol_type = other DNA
ccggcagccgctccgcctgcggctcctgctgttcctgctgtggtaagtccgccaactgttccggcagttcctgctgctgtccctgcacttcctgctgcggcagctcctgttgcagctcctgcacctgtaccgcctgctactgtcgtgcctaaacttgatattccgttaccgagagtgcctattgcaccgccctgtgtcccgagtttagctccgatattttgaagtccctgtcctgcaaaacccttaaaatagtttgccggtttatccaaaatatttgtagcggtatttgcaccgttttgcatagctccgcctacattactcatagacgtgccgatttttttcgcaacttcattatttatattatcttttattgcatcaccaacgatagacagtttagcttcgaggtgaacacctcggattgttccatttttagtatctaaaaaatgtcaaattttgcaaagtaaagatttaccatatttgtattccatttttttatcaacatatttctcacccacagggaagattatttgcagtaattatatgttatttcagaaggcattgcagcatcaagtgattttatctatacgcaaatatctgcaaaatttttatattgatgcgtgcatttatgctattatgtataaagataaaaggagttattatgggtaaaagagtatatgcattcgatttaggtaaagcaagtatagggttttgtgccagagaagattttaacatattggaattgggttctttaattgttgataaagatcatgcagaagttatttcaaatcgtgacaggcgcagggtttataaaactttatatgctcataaaaacagagaagattttttcaacaaattatggtctgattgcgggttaaatattttagagaaagatgacaaaaaatttactactgaattttcaaaaccaaatgataatactatttataattccgcattattgagaattgcgttattacaggataaacaattagaagaatggcaaatatacaaagcattacataatgcaatacagcgtagaggatatgatgctgatattgcttgggcaaatgcatcatccgcggatgaaaaagataatatagaacgagttagcaggtatacacaagatgataaaggaattgaaataattaaaaatgaaaaattcaaatatccttgttattatgatgctctcagcttgagtttgtgggaagaaaataatcccgcagagtataaaaaacatcttccattagcagatataacaaaagtcagaacaaaaggtcttgttgcccccagagcttttgttgaaaaagaattaacagaattattttttaaagctcaaaaacaacttcctcaattaaacaaatattctgttgaatattttttatatggccaatatggcagcgcttatgcaacttttagaaaacctgaacagggtaaggaaaaagactacggagttttagggcaaaaaattccaagatttgacaaccgtattattgccaaatgcaaacttttaccaaaaagaaatgtttgtaaagcaaatactaaagaaaatgtgtcatttacattattgatgaagctgaaaaatttacgatttacagattctcttggcaataaatgtatgcttgattctgaagcaataaaagaaatttttaataattggttaattaaggcaaataagaatgatattctgaaattagatacaactataacaaaaaaagagatagaaaatgttatcggttgtaaaatacaggataaaattgaaccgttaaaagcaaacataagtggtcgttcatcgttttgccgcagagcatgccaaataatgaataagattattttggaaggcattcaaaaccctgcgacaatggatgttgctgaatttactgatgacattaatagtgataacggtataacggaggctgaaattcgtgaaatgttgtcaaaaatcgggacttgggataatttatatattcctgacaaccgttatgaaatggcagaattatcttcagatgacaggcaaaaaacggatttcctaatcggtaaaattacaaatccgatagtaagaaatcgtttgcaaatcctgagagataaacttcttgaattaaaagataaacatggtattcctgatagtattatatttgaatttattcgtgatggtgcagataattctttatatggtgctaaaaaagcaaatgactatctgaaaaatactaaagaaaatgaaaaagaaaatttagaaataaaaaaagaattagaggatgcaaatgcgtattctccgtcaaattttgaaaaattaaagttattaagaatgcaaggcggggcttgtatttatagcggaaataaaattggtatcggaaactttgatgaatgcgatattgatcatattttccctcgagcaaaaggtggtaatgatgctttatataacagggttctttgttacagcaagctgaacagagaaaaaggcgacagaactccttatgaatggctttcatcagacagagaagaatgggcgaaataccttcttcacttaaatgatttaaaatcaagtcttgggaagaaaaaatttgaacttttaacatgtaaaccgcaggattgtgaaaaacttatagaaagttataacggtcttgtcgaaaccgcacaaatcgcaaaagttgcgcagcaacttgctgcttttattttcggctgggggcttcaaacagaaggtgataaaaggcatttgtttgtaaacaacggctcaactactgctgcaattcgtcgcagatatggtttgaataaaattttgggaaatgatataaagaaaaatcgtgaaaatgacaaacaccacgctcttgatgcaatttgtataagcttttcacaagattttaaatatgacccgaaatctaaaaaagatgttattcaagattttacatacgattttgttaaaaatgcaattgataaacttataccttatccgtactcaaatgataaaccattcaagggtaatacaagacctttagaaacaatttacggttacagagaatatggagaaaaaaaatatataacaaataaaattgatataagcactttagaacaaaaagaaaagaaaataaaaacaataatagatgaaactataaaaaatgacttgttgaataaaatgaatctttccaaagaagattggaaaaatatgcttcaaaattatatccatcctaaaaaacaaacacatgtaaataaagtaatggtaattgtttctgaggggaaattagattttgataaaaacggtcgggcaagaatgaatgaatatgttgattttggtacaaaaggtgtaaaaaatcaatttaaacactcaaaagggcataaagggcaaattctttattacaatgaaaaaggtgccataaaagtaatgcctatttatgcaaatcaaaaaacattggatgtaaaactcaaattgcttgatatgggttgcaatctgtataaaaaaggcataattttttcatcaggctgtttggttgaaattccaaatgattttgaggcaaatgtttattatcatttagcagataatgatgggaaagataaattagttccaacaaaagaaaaagtcaataacggaatattcaaaatacgaacgattatgtcggacggtaaagttaaacttgaaaataataatggtattgagatactaacaaatgctgcaactttagttaatgccaattttcacaaatataaaatttgacttttaagaaattgacattatacatgcaggcatgtcctatcatatattacatttaaccaaacctaacggcttccttttttctgaaaggggtatcctgtttgccagatatgataatgatgaaacaaaaatgattcctttacttgatttgaaagcaatcattgttgcaacttttggagtatcattctcaaacagttgtcttgcaaaattgctggaaaacaatgttataattctgcattgcaacaataaatataagcctgtcggatggagtttaccgatagaaaaaattgtaagaccaaaagttttttataatcaaattgcgcagaattcggaatttgaaaaagaattatgggataaaatattatatgcaaaagttttaaatcaggcaaataatcttaatttgataggagtagaagaacacaatctttttaaactgatagacaaaccactgatgagtgaagctaatatagccagacaatattggcaaaattattttccgtgtataggcaatccgataaaaagggaaaggcaaggtgccgaaacttttgaaaactcctgtctgaattatggttatgcagttatacaaacgttaatttatcgttctattattatccatgggcttatcgggagtttaggtgttcatcatttggggaaatatgacagcactcctttggtatacgatctgatggagccatatagaccttttgtggactattatttttatatgtttgttaatgacaatgataaagattattcggaaaataatttcaaaagttgggtaaaatatatttcggaatgtatcaagaattaccgtattgaaataaattcaataagttataaaatagttgattccgtagatatttatatagaaaaaataacagacgcatatttgaaatatgacacctcaaatatatttttacctgatataacaaaacagtacctatttattgataaacacaggaacagagaatatgaggagtaaatatcgaatgggttggcttattgtatgtttcgatttgcctgttgaagaaaaagaagaaagacgtcaagctgcaaaattccgtaagaatttgcttgatttggggtatttcatgctccaaaattcaatttatgtccgctcatgcgttacctatgataaaacagagacccacatcaggaatttgaaaatgattgcaccttcgaccggttcaattactgcattttatcttacggacagacaatggagtttatctgttaatatagaaaaagctggttataaaaattcaaaatacctgcaaaaagcaggtgaaaccgcaccaaaacaaatgacattctggtaactttgtgctaccattaagtcatggataaaaattttttaaatgttttagagaatgagatctttacgtgctttagcagaggtaccgactattctcttgtcaattctgattggactcttaacttgaaatatcttatggatttattatatcatagtttatttaatttgtatatcctattataacatattttaaattaagagtaaatcaaaacgtgtcaagtcattacgtggcatgtttaaattataacatattttaaattaagagtaaatcaaaacgtgttaagttattacgtggcatgttcaactattataacatattttaaattaagagtaaatcaaaacgtgtttgtcatataatccgccttttttttcattataacatattttaaattaagagtaaatcaaaacataatggttatatcaaggcacatgacataattataacatattttaaattaagagtaaatcaaaacgcgtcaattcattacgtggcatgttcaactattataacatattttaaattaagagtaaatcaaaacccatcgtctgtcctttattaactcttctctattataacatattttaaattaagagtaaatcaaaaccataacctctataactcaatcatatcaacattataacatattttaaattaagagtaaatcaaaacggagataacaacctttgcaaaagtggttttattataacatattttaaattaagagtaaatcaaaactatttatcacgataatatacaacaccctcattataacatattttaaattaagagtaaatcaaaacttggtctttatgtaatgaataaagatgatgattataacatattttaaattaagagtaaatcaaaacaactcctagatgtagatgcaatgcttaataattataacatattttaaattaagagtaaatcaaaacaaggtattgaaacatacaacattgaacaaattataacatattttaaattaagagtaaatcaaaactaattttatcagcgggtggtaaaactttttattataacatattttaaattaagagtaaatcaaaaccaacggtcatagcggtcctgctgtatggtggcctagtaaaggtcgttcacaatcatacagccatactcgtaggtattctaaaacacgatagttgctattattattgatgttatacatcctattattgttattactatacaaaatcttataatattaattatgcaccatttaataacatttttaagttcttgttccgtcatttactagctccttgtcagtgtagtatattataacatattttaaatacctaaattttatttgcaagagtcacatactatatcttattatatttttgtttgtgattagtaaaatatcaaaattttgaatgtttatttattttaactccgcaaaaaattttttgttctgattttattttgtatgaaaaaggagtaaaaaataatggtctctataaatacatttaccgtaactgccttaaatgcaggtaaaaaagcttataaatatgctgcaaaaaaagcatataatataactcattttgcacaaattgatgcccaaaaaccacaggtaaacctcggctggtatcataaagtaaagtgcagtgaagaggaacgtgcagcaacaggacaaaaatacaagttggtagaagctacaatgtctcaggaaagatataataaccttggtaaaacgacaagaaatatgttttacggttatttattggtctgctcgggacttgttgcaaaaaacaacattgacgcatggcgatatattgaaaaattgccaaaagtcgtagccgcaaatatatcaaaagcccaaagagctgcttctgaaaaagattctataatttttgacagcatacttcctttaccctcaaagcttgcaaaggctactgctaatacatcaacccctgcgggaagattttatcagtctttaagaacaaataaagaaaatcttatggctgatttgggcattgatgatgcaacttttaacacttttgcaaccgttgcactaaaaattgccaaagaagaaagtcagtttggacagagcaaaaaatacaaagcttatgaatggatagaatcctctaatacaggcagagatttgatatcaaaaacaagagaatttgtaaacggtgacgggactttatctttaggtatgacaaggtttaaaattgatttggcttctcctgaagaaaaagcactgtttgacaagtacggcataacctacaatagtaacggcagtaatatcagagaacctgaaaaatctgcaattgcaacggttatacacctttcaagacttgcaaaagattaccccgtatatcttgaaaatgttagaaaattacatcccgatttatctgaccctgcggttaaacaatctattgcccgtgcacagagaattatttttgaagattccaaacgccccgttgccgcagaatctctaagaaacggctggtggggacaggagcaggaagcatcagtaagtatcctaaatcctatgaatgacatctataacgtaaacgaaaaagatataaaagatttaatgatttatgcgtcctcaatagaattatctcctgaagcatatttagcggcgagatggaataatcagaaagttattccgtcaggggagagaatgtatattgcctgtaaaaatcttatgaatattgcggctcaaaaaggttatatcgcaaatatagacaaaacttcccggattatatattaataccaaattattctcagaccaaagattgtaaatgtgagataacagtgttataattcttgtatccgtttattatagataaggagagattatgactacttatgaactgaatttgtctttagatgaattaaaacaaagaactcacaaagattatttaacaacaaaaaaattccttaaagctgatgctccggaatttacacagcttgcccaaggggataaagaagctcttaaacatcttgtaaaagcagctttgattttggaaaaaataaatatgcagatagactgcaaacacaatcttccgttcaagaaatttcttgaagaagaaattaaaaaaggaaatgaacaggcaaagctgacaaaaattctttttgatgcgcaaaaaggtgtaaatgctattgattcaatgtctaccccgatacatttgataaaaggggttgaaacaaagcttggcaaaggggtttatcctgaagatttgtcaaaagaagaatttcattctgtccttatccgtatgattcatgacggagaaattcaggaggtcaaaaatattctcacccagcgttctatggttgtaagagaggaagataaattaaaaggaattgattatatagattatttcaaagacgattttgcaaaaatggcggatgaacttgacagggcaagtgaagtttcaacagatgcagattttaacgaatatctgaagcttcagtcaaaagccctgagaacagcagaccctatgcttgatgcttatgctgataaaaaatgggcaacacttcaggatactccgcttgaatttacaatcacacgagaaaactacgaagatgaaatgacaggcacaatagtagaaaatgaagaattgtcagaacttttgaagcaaaatgatatttcccctataccaaaagattttcttggcgggagagttggtattgtaaataaaaaaggaacagaaactttgcttgccataaaaaaatatcttccgacccttgcagacaatatgccgtttaaagatgaatatgaacagactatttctgcggatgaagatgcacagcaaactatggttgatgttgatatggtttatgctgcgggagatgttggggaatacaggggcggaattacattagctgaaaacctccctaattccgataaattatctttgactatcggcggtggcagaagaaacgtatatcaccgacaaatccgttttataagtgacaaatcaaaacttcaaaaaagacttgatgaaattcttgataaagaacagcataaatactatcttgatgaagcagatcactggtttacaataggtcatgaaaatgctcattctctcggaccaaaagagggcagtgaaaagttggggaaatacagaaatatcattgaagaaaacaaagcggatatgggggcattggcttttgttgatttgctgacagaactgggtatgtatacacaggagcaaagactgcaaattatcgtaacctttgtggctgacaacttccttaaatcaaaaccgacaatatctcaggctcacagagtccgtaccgttatgcagaacaaatatatgcacgacagaggtgtttatgaaattaacaaagacgggaaaattcatgtaaacattgacaaagttgttcctgttgctaaagaaatgctttcagagattgtaagaatccagatagacggtgatttcacaaaagcagaaaaatatgtcaatgacaattttgtctggactccggagatggagcttatttcagaaaagttgcaaaaagttaataaaacacttaacggaactcttgaaaccgagcttgcggacaaacttgcaaatgaataaagtatgatataaaaatgttgttaatttgtataagtgtttctcttttttttaaagagaaaacacttaagtgcaaatttttaattataaagtacattgaaaaattaataaagcacagggtaaaagatactcttttctaaagagaacagccgacaaaatacttagccattcgggttgtttcccgactagaaagaggtgcttatggatgaaatcaatttaacactaattatgctatttttgataatcttcataataaaaaacgaaaaaacggcacatactcaaaaaagtagataccgcttagcctttaacagagtatcgatggtctgacaaaccatcaccctgttgcttttattataaactattattttacaaaattcaagtggggcaattattgtttgttcctaatccaatcagaaaaaatatttagtgctgtttcaagtttttgggggttattgccataacctatgcgcaaatatttatccatttccattgtttcccccggtaaaatcattacgcctgtttcgttttgaagatttttacaaagcttttgcgatgaaacagggaaatcataaccgacaaaagatgttgttcccccgcaaggttcggcgcagtgaacttttgtttcggtattaagccaatctgtcaaaacttttttaccctcaagtattttgtttatattgcgtttgataattttatctttattttctattgcaattgatgcaaaataatcgtctaaaattccgacactaattgtattatattctctttgggaatttattttaccaataatgtctttatttgctgcaatccagccaagtctaagccctgcaagggaaaatacttttgatacgcttgatgttgatatccctttttcataaatatccgctattgaatcagatataattccgttatgctcaagtcctctgtatacctcgtcacaaagaatatatgtatcgttttctcttgcaatatcaacaattttttttagcatttcagagggaattacagcccctgtcggattgttcggattattcatgcaaatgagttttgtatcattatttacaagtttttcaagctcatctaaatcgggaaaccatttattttcttctttaagaaagcataatttaacatttgccccaaattgttctgggatggaatagtgctgttgatatgtcggaattattgatacaacgttgtcttttggttcgactaaagtcattataacaagctgatttgcacctattgcaccatgagttattgtaatattttcattaaattgttttttatatagtgatgatattgcggtttttaatctttctgaaccgtgtatataaccatagtttagttttttggcaaaaatttccgctatatcgtcttttttgtctgtaatttcgagtagttcatctaatgataaagattcaacacatgtatccgcaaggtcatataccgcatctttttcatatttattaaaccattcttctactttaaatttacttatatacaaaaatctctccttatttggggtgttttatacctgataatttatttcatgtttttcgagcatttcattcagatattctctgttttttacggtatcaagagcagaaaattccatgtgtgcatggttgtataagtcatcactgtcaattttttcgccgtttcggattttgcttctgagataatctccgacaacattatttgcaagttcaaaattgtcccctctgttttgcgggtctttcattttgctaaagaaaaattttgccgaatttgcgctgtcgaaatattttccgtccttttcctttgtaacaaatttcagattatgcaaaacttcatcaggattttttgatcttatattaaacccgaatttagcataaaaaggtatggaatccctgagcgaaaaaactttgaaaagattgaatttattttcattaaaaataattagtgatgcgagatttaaaacctctcctataccttttttctttggatttgcaactaaagaaagcccttcagcttcttttttttctctgtcaaaattgatttcatacaaactgatatcgctgttgtaagtatcttttgcaataatcgaggaatcagattctaacgagatttttaacggttttttgaatttatcgacagcctcaatttctttgaataattttatgccgtcatgctgataaaaagttatgggattttttcttaatatctgaaatgtcatacaaatattaaatcagaacaaaatattttttgcaccgtaatattaaaataaattaagcaaaaatgtgtaaaaatgagagctatatgctattttacagcgatattttaaataattatctgcataaataatattattgatgttttttttcataaaaaaactatttgccgcatttctttgaccgcaaaggaactccccgacctgaactacggagggctaatcatctgtaatttgctcaacatcatactccgcctcgaatggggaggatgaaaggggtacaataaaaagatatggcaattatataaccggatatcacaaaatatattgacctgttatactgaactttactgtaacattgtatatagttatcttattttatcaacaatagcaacaacctgagtttttaaattttcataatcggaattgttatcaatgatataatcccactcttttatatggtctaaaccaatctcagtaacatcattttccccgactaaatcgcctcttttcatacgggtgtcacgggatgcttcaacacgaattgcaattgcacctgcagatttaaaaacttcgtattcatgctctacacgaacatctgttacaactatatttccatcctgttcaagaatttttttcaaccaataatcaggatcctgagctctgccccaattgcccaaatttattaaatcaggtctgtaaacagacttatttgcttcaatttcctcataagtaagccctttttctttgccgtaagttaattttataatatcacccattgcacatctgcgaaaatcaggcataaattcaagcattatttttgccgccgtatcttttcccgaatactgtttgcccgaaaatattataattctgtccgccataaaaacctcttttttcatttgaatattaccataaatcatataaaaagtctaaaacaatggtgtttgatgtatccgaaaaattgtgctattatttaagcaaaaggggattaacttgagtataatatctgatgacaatgattttttaaccaataaaccgcagaaaacgaaaaatcctgtggtaaaacccgatataaatgataatgacagagcatttgaaaacagcatccgcccaaaagatttcagctcttatatcggacagtcatcattgttaagtactctcaaaattacaattgaagcggcaaaaaaaagaaacaaaacccttgatcatctgcttttttacggacctcctgggcttggtaaaactacccttgcaggggtgattgcaaacgaaatgaatgttgcggtaaaaattacatctgcacctgcacttgaaagaccccgtgatatcatcgggattttgatgtctttagaagaaggtcaaattttatttatagacgaaattcacagattaaacaaagttgcagaggaaattctctaccctgcgatggaagatttttatcttgatatgacaacaggtaaagctcagactgtaaagactttaagggttacattacccaaatttacacttataggtgcaacaacaaaagcaggggaactttcaggtccgttgagagacagatttggtataattcataggcttgaattttacaccaatgaagaattgtcaaaagttataaaaagaacagccgacattcttgatattgagattgatgaagaagctgcatacgctattgcaaaacgttcaagaggaactccgagaattgcaaacagattgataaagagagtaagtgactttgcgatagtaaaacatgacgggaaaataaataaaaatattgcaaacgaagcacttgatatcttaaaaatagacgaattcggacttgatacaacagaccgtaatcttttaaagcttattattgaaaaatatgacggaggacctgtcggaattgaaactattgcagccgctatcggagaagattccagaacacttga

SEQ ID NO: 2055 - DNA, 5835 bp, synthetic construct
  misc_feature 1..5835: note = Synthetic
  source 1..5835: mol_type = other DNA
tgcttctttcaagtgtgaagattttattgacggttttggggaaaactctttcacagaagtattgttttgagaaaacaaaaacacccccaataaacctattaacagatatataattgaaactaaatcaaacctttttcttcttgccataaatatcattttaacatacaaatttatattaataataattttacaatgtaactaaaattttgtattatatattattataaaattataaatataaggatataataatggcaaaaaaagttttcgcatttgatttaggtaaagcaagtataggatattgtgttagagaagggcatgatataaaagaagcaaattctataataattgataaagaccacgcagaaaaagtatcttttcgtgagagaagaagaataaaaaagacacttgatgctcataaagcaagagaagaatatttggataaattatggaaagattgcggacaagaggttttagataaaaaagataaaagatttacgaaagaatttggcgggaagaatgataatataatttatacatcatgcctgctaaggatagccttgttacaaaacaaaccattagaaaaatggcaaatatataaggctttgcacaatgctattcaaagacgtggttatgacccgaatgtaaaatgggcgacaaaatctgctgatgaagaagataatataaaaaacattgaaaaatatactcaagaaaatggtattgaattaattaaatcagatgattataaatatccttgttattatgatgcaattagattaggtttatggtcagagaataaacatgatgaactaaaaacatatattcctttaacgaataacaacaaagtaagagcaaccgactatgttgcaccacgattgttggtagaaaatgaattaaccaagttgtgggaaaatgctcaaagtcaaatatcagaattaaaaaaatatagcgttgaagaatttttgtatggtgagtatagagaggcttatggctctttggttaaccctgattacagacaatatatgggtacaccaaacgattggcaaggagttttaggacaaaaaattccaagatttgataatagaataatatcaaaatgtaaattattgcctaaaagaaatgtttgtaaggctaatactattgaaaatgtaacttttgttcttttaatgaagttaaaaaatttacgttttactgatgtttccggcgaaaaattgagattaagtccaaatgaaataaaacaaatatatgaaaattggcttgaaaaagtagaaaaaaatgttgagaaagctaaagagaaaacattagagtttaataaagcagataataaattagatacaactattacaaaaaaagaaatagaaaatgttatagaacgtaaaataatagataaaatagaaccaatgaaagcaaatatttcaggtcgttcttctttttgtcgtcgtgcgtgtcaaattatgaataaaataattcttacgggggaattatatcctgcacaaatggacatatcagaatttgtagacagtcctgacgccatcaatgggataacagaagaagaaataaaaacaatgctttcaagagttggcgattggaataatttatatattcctgataatagagacgaaaatgcaaaaatggcaagtaattcaagaataaaaacagatattatgataggtaatataacaaatcctattgtgagaaatcgcttgcaaatattcagagatttaataatggatttagcggaaaaatatggtaaaccggatgaggttatttttgaatttgtaagagatggtgctgataattctttgttcgggaaagtaaaagcaagtaaagcagaagcatatatgaaattgcaagaaaaagaaaatgaacaaattaaaaaagaattagaagatgctgatgcattaaatggtaaatattttttaatgcacaaattattaaaaatgcagggtggcaaatgtatatatagcggagaaaaaataggaatatctgatttcccaaattgtgagattgaccatatatatccaagaacaatgggtggaaatgatgctttgtataataaggttgtctgtttccgttctcaaaatcaattaaaagaaggcagaacaccttatgaatggttatctcatgatgaagaacaatgggcaaattatgttaacagactgaacaaaattaaaggaagtttaggacaaaagaaatatgaacttttgacaagtaagcctgaggattgtgaaaaacttattgagagttataatgggcttgccgaaacaagtcatattgcaagagttgctcagcaaatgacagcatttatttttggttggggattgcaggttgaaggtgaacatcgtcatatatttgtaaataatggggcatcaacttttgctataagaaaaagatatgggttaaattcattcttaggtgatgatgcaaagaaaaatcgtgataatgataaacaccacgcacttgatgctatttgtataagttattcaagagattttaaatataataaagaattggataaagatgtaatagacggctttaatccgattaaagtaaaagaggtaatagatagcattatgccttatccttatgcgaataaaaaaccattcaaaggtaataccagacctgatgcgactatatatggcataagacaaataggtggtaaaaattatataaccaatagagttgacttaattaaaatagatcaaaaagagtcaaaaataaaaaatataattgacgaaactataaagagtgatttactttctaaattagaagataaaatgtctgtaaatgagtggaaaacaatgttagaaaattatgtccaccctaaaaagaaaacaagggttaaaaaggttatgttaattgtatcggaaggcaaattagaaaaagattctaacggcagagaaagaataggtgagtttgttgattttgctaattataagaaaggacatacaagacaccaatttaaacattcaaaaggacacaaagggcagatactttattataacgaaaaaggctctgtaaaggtcatgcctgtatattcaaataaaaagacgcaagaggtcaaagataaattagagcaaatggggtgtaaactctataatcgaggcgaaatgtattattcaggttgtttaataaatgtgccgaatgaattttttgcaggaaaagtaacttgtccggcaggtatttacaaagttcggacgataactgaggcagggcaaataaaattagaaaataatacagggaatgaaatattgtctagtgcagtgaatttgtccaatgcaaaattctcaaaatataaagattaatatacttgaaaaaactgaaaaatagattataataaaaatgtaggaagggtatcttccggtaaagataccctgtacagttcctacaatttttgtgaaataaaaatgcaaatgtgtcctactagccataggacacattttgctatttcacgccattgtattttcattagctccctcctttcatacaccccggtacagtcggatattgccgtgcgtataggaggtcgcatcaaaactgtcctacataatcattatatcatttatgaattttaatatatttatttgtaaataaaacttaataatttttgatttttaatatatattcattaaacatggcatacgatgagttatcatatattacacttaataaccccaaattgttctatatcaactgacaaaggacttttgttctgcaaatataaatcaggtgaaaccaatatgatttcacttgcagatattaaagtcataattgttgcaactcatggggtaacattcacaaatagtgcgcttgcaaaattgttagaatataatgttgttattttacattgtaatcattcttaccagccaactggctggagtttacctctgcaaaggatagtaagaccaaaagtgttttataatcagattttaagaaacgaagattttgaaataaaattatggaaaaatattcttaaatcaaaaatagctaatcaggctgattgtcttgatatgattgggaataaaaagcatacattatataaattaataaataaacctcttgtgagtgaatcaaatatagcaagacaatattggaaacattattttgacgagataggtaatccaataaaacgcgaacacgaaaatgctgaacaatttgaaaatatttgtttaaattatggttacgctgtcattaaaactttaatttatcgtgcaattattattcacggtatgttaccggaattaggaattcatcatttaggtaaatataacagtactcccctcgtttatgacttgatggagccatacagaccatttgttgattattatttttataaatttgttcaggattttgaacaatattataattcaaaaaatttgaaagaatgggcaaagtttgtatctatggctttaaaatgttatcgaataaaaatcaataatataagttataaaatagttgatagtgttgatttgtatatagaaaaaattgctgatgcatatttgaaatttgattgttcaaatatatttttacctgaattaaaagaacaatatttacaccttgacaaacacaggaaccgagaatatgaggagtaaatacagaatgggctggttaatagtatgttttgatttgcctgttggcgagaaagaagaaatgcgagaggcaaatgcatttagaaaatctttgttaaaacagggctattttatgctccaaaactctatttatgtccgttcttgtgtaacttatgacaaaacagatattcatataaaaaatctgaaactaatcgctcctgatacaggttcaataacagcattttatataacagacagacaatggagtttatctgttaatatagaaaaatcaaattataaaaaatcaaaatacataaaaaaagcaggcgaaaacggctacaaacaaatgacattctggtaattttatgatagaatgtctatatgatgtaatttaatttttaaaggtttagagaatgaatttattcgtacatactagcagaggaactaattattctcttgtcaattatgattggactcttaacttaaaatattttacttttttattatatcatgtttatttacttttgtatatcctattataacatattttaaattaagagtgaatcaaaacttagtaagtctgatatatcttcccttaacattataacatattttaaattaagagtgaatcaaaactattccaaatatcacaagtgcctgaccttattataacatattttaaattaagagtgaatcaaaacgtggacctgttcttcataatcaaattgtgaattataacatattttaaattaagagtgaatcaaaacgtgtattcatttattatcctttcactgcttattataacatattttaaattaagagtgaatcaaaactaattctttggtttattacaattgtcccatattataacatattttaaattaagagtgaatcaaaactgtatttcctgattattttcaatattctgattataacatattttaaattaagagtgaatcaaaactggtctgtatctgaatcaaacaaaacattcattataacatattttaaattaagagtgaatcaaaacaaaatcaaagttggagcttgattttgaaaattataacatattttaaattaagagtgaatcaaaacgagataaagggaggtttttatgcctgatatattataacatattttaaattaagagtaaatcaaaacatattctttatatttaccccatagcaaatttttttttcaggatacattataataatgtaataaaaatcaggtatattatgctaaaaatttccccaacaagaataag

SEQ ID NO: 2056 - DNA, 24128 bp, synthetic construct
  source 1..24128: mol_type = other DNA
  misc_feature 1..24128: note = Synthetic
taatttttcatttttcactttataatttaattaatgaaaacaggtcttatatattgtccgaaacgtgaaggattcaaatcaccagagaaacgatggcagaagatagccgcgtgcctcgaagaacacgggatcaaatacgatctcgtgcagagcgagaatgcccagagcgttgagcgactcgtctctatgctcatccacaacggatatgataacatcataatctgcggtggtgatgcagcattgtgcgatgccgctaactgccttatgagagaagagaaggaagtccgtgaccgcgtagtcctatcggttatccctaatggcgtaatgaacgatttcgcctctttctggggactaacagaaaaggacatcagacttgctgtggaatcgattgcgacaagacgcatccgtaaagtagatgcaggttgccttatctataccgacaaggaaggaaacaaacaaaaccgatatttcctcaactgcgtgaacatcggacttgtagccggtattcagcgactaagaaaagagactagaaagattttctggtcaagaaaggtgtcatacgtcatttctctcattcttctgctcttccagcgtatgttctggaagatggaatataccatcaattacgaaacagagcagcataggacaatgacgatgtgcataggtagcgccttgggtttcggacaaacacctaatgccgtaccatacaatggtatgatagacgttaccgtagtgcgcaactctgcccttacgcagatattctcaggcatagcacttttcctgcgcggaaggattctgaaccacaagatgattcttccataccgttgccacgacatcacgatcagagtgccgaagaacaccccggtaagcatcgacggtcatgcgttctccgacattgacacatccaccgacccaatgaagataatcgtagaacaagaaacaataaacttcatcattgagaagtaacatggttttggaatttaaagaaaacatcaaggatgtattataagttatggaagtctataatgcctggaaggcaatactatgaggactccgcgtagcgcctgaccatagggaagaaccgaggcgcatactcgacgaaggagaggatgccctcggacaggaaacagcctctaccctctgccagcctggaaggctgtacacaatcaatcttttcgcgatgtactgccctccaggcagtagaatgattacgggctttatcccccgcacatcctcgtttcactcgtatgtacggggttactaatagtattgccttccaggcaagtctaaacaccagaatcttatattatgtttttaaacatgagtacattcgaacaactcacgtttaagctgtgattcctatgtaattcccttgcaaatcccatgtaagtcccatttttcgcctattctaaggaacggacttgcatcgagtttggaacggattagaagcggattagaagcgaattagaagcggaactgaagaaaagccaaagaagagaccgagaataatgatttttgtaatgtgaagattacaagtgcgatttttttcagaattttgcacaaacatgtacatggtggggtaaaagcaggtataaccatctgtaaatcaacattttgaatccatgtacatgtttactaaacatatacataacatgtacatgacggattcacaattcgagcatgtcaactcatgtacatgtcatgtacatgtttgaccatcatgtacatgctcttaatccgttcattatcaacacatttagcatcattttcccctaccatgtacatgtttgtacaaaattctaaaaaaaaatactccaaccatacaggtcaaatcatttcgaaaaaaacttatcaaatgtctcatcaaaatcgagcgaagtacatttagcaaggattttcttgtctggggatatgaagataaatgtagggaaagcctcaacaccatatttagccctgatatcagcagaacatttatagtcattccactcactccatgaaaccttgcccaaaatctgctttagccacatattctttggatcatacgaaattgttatcaattccatcttatccgaatattttttgacaattccgtccagttttggtatcatagcataacaagcaccacaccccaaaccgctaaattcaagtatagtatatctatccttcacctcattaagatgatgctcgttaccttcaaggtcataaagtgtgaaatcaaccatcggatcaccaatcttcactacattaggaggatatacaagattctttatggtcgtagcgacaccagattctttaatatccgaaggaatagtctcatatagcttgcgaaccttctccttatgaaccacattaccagtagcaacagccttgcgagcaagttcctgaagcttatccaaccatatttcatttcgttctctgcctttcatgaactcaagcagattttccatatactcagaatcaaattccttcaattttacatcgatagaatctacttttttcttagcctgttccctttgctcgtcagacaaatctttattctgcctaaaatctctaaattcacatgacagcttagtcaacctatatctttcgggcatagagttctttatatgctcacgatattcattcaattccttttgaagatgattatcattttcagctctccaaaagtaggcgaacataccatctccctttatggttgactttgtaccaggtttagcatatatgtctattccattaccataatgcccctctattgcgatgctataatgctgtgttgcagttcttggaatacgttcaaaatggaaacacccgtttttaagggtatcaacatagtcaccgataccgaatccgccttcttgatcatataccatgataacactaccatcgggaacacctgtcaatgttccctcaaaaatacaagcctccaatttgtttgaggattcctgtgcctgacctgccatagagcatagtacaagcaaaaacatcaaaatgtttcttctcatagatttttaaactatcaattttataggtttcaatttattcaattacaaagatacaaaattattttatgacaaccaaaatttaactgtcaaaagcttctgtcagggaggacgatttaacaatcgttatcatacaattcccgagatagcaagcaattatgtttcatatcactataaattttgttgtttttctgaaaaaaaaccaattttattttgtaaagcggaaagtttttgctatttttgcagatgaaaaggttagacggttagaaggtttgggaggttatgaagtcagtaagtgaaatgcccaaagacctcaaaaccgaaaaaccagacaacccgatattccctaaatcgcaacctgaagttaaatacattatataccttaatatagcaactatgagttatctcaaatttgaaaaagctcagatgactaacttgcaagagtctttgcgtcgcgaactgctctgtacgaaccgttcaggagcttactcatgcagcacagtcgttgactgcaacacccgcaaatatcacggactgctcgttgtgccagtaccagagattgacggggagaaccacgttttgctctcctctctcgactgctcggtgattcagcatggcgctcagttcaatctcggagtgcataaatacgagagcggagtgttcagccctaacggccacaaatacatccgcgagttctctgttgaaaccgtcccaacaacaatctatcgcgtgggtggagttattctcaagaaggaagttatcttccaagtatattccatgcgcgtgcttatccgctacaccctactcgactgccacagcgccaccactctgcgcctgaagccattccttgccttccgcagcgtgaaaaactgtatggtggagaacaacaacatcaagagggagtatgatgagattgacggaggtatcaagaccaagctctacgagaactaccccgacctctatatccagatttcaaagaagaacaagtttatatttgatccacactggaacaagagcctcgtctatgagaaagaacaggagcgtggctatcacggagtggaagacctctatgttccaggatatttcgagatacaggcaaagaaaggcgacgaaatcgttatctctgcgggtatcgaagagataaagtcatcaactctgaagaaactcttcaacgaggaggtggcacagcgcacacctaccgacaatttctatcacgcacttgtaaatgcggcacaccagttccatgttcgtgtaagcgacaccgagcgttatctgcttgccggctatccttggttcaaggttcgtgctcgcgacacgttcatcgccctcccaggtctcacgcttgccattcaggagaatgactacttcgaacttgtgatggatacagccgctaagagcataagagacttcatgataggcaagccgctgtcaagcctcatccacgagatagagcagcccgacgtgcttctctgggcaatatgggctattcagcagtacgcacacgaggttggcaatgcccagacctacaagaaatatggcaaactgcttatcgacatactgaagttcattgagagcaacaagcatcctaaccttgaactgagagagaacggacttctccacatcgagggacgcgaagagccaatgacatggatgaacagcaaagccaacggccgtccggtagttccgcgtacaggctacgtagtagagatcaacgctctctggtacaatgccctcaagttctgtgcagaaatggcagaggctaacaaagatagcaatatagccgcagaacttgaatcacgtgcagctattgccaaggaggagttccaaaagatattcattactgatagtggctatctctacgactatgtagaagagggtatcaccgaccttagcgttcgccctaacatgatattccctgttgccttcgactactcaccacttgagccagagcagaagaaatcggtactcgacttctgtacccgtgaacttctcacgccaaagggattgcgcacgctgtcaccaaagtcaggcggatataatccgatgtacgtaggtcctcagacaaagcgcgattacgcctaccattcaggcacagcatggccttggcttggaggtttctatatggaggcattcctgaagctctacaagcattcacgtctcagcttcatccagcgacagatgataggctacgaggacgagatgcagtaccacgtattaggttctatctcagagctgttcgatggcaacccaccattcaacggacgtggtgcatcagcctttgccatgaacgtggcggagatccttcgcacttggagattgatagaccaatataattaatttaccattttactatttactatgtactatttgtttacaccctactcaaaagccgaaaatcaacgaacttcggaaatctgtcttctgtaaggataaaaatagtacatattactaaaaatagtaaataaatagtaaatagtacatagttaaatagtaaatgacacaatgaacttatgaaagtattaatgttcggatgggaattccctccaaaaatatatggtggactcgccgtcgcctcctatggtatcaccaaggggttgagtcttcagggcgacattgagactaccttctgtatgccaaagccgacgggcgaagaggagaaattcctcaagatcgtgaatatgagccaggtgcctatcgtctggcgcgatgttcagtacgatgatatcaaggatcgcttcgtagggcacacggtagatgactactatcgtttccgcaacaatatatacgctgatttcagctatatgcagggacttgacgacctcggctgtatgggcttcgcaggcggctatcctggcaatctgcacgacgagataaacaatttctctatcatcgccggcgttctggcacgctcagagcagtttgacataatccacgctcacgactggctcacctaccctgccggcgttcacgctaagatggtaagcgggaagccactctgcatccacgtacacgccacggatttcgaccgttcacgaggtaatgtgaacccaaccgtatattctattgagaagaacggaatggataatgccgactgtatcatgtgcgtatcagaactgacacgccagaccgtcataaaccagtatcatcaggatccacgcaagtgtgtggctatgcacaatgccgtttatcctctctcacaggagtatctcgacatcgtgcctcacaagaatcctaacgagaagatcgttacgtatctcggtcgtatcaccatgcagaaaggtcctgaatacttcatcgaggcagccaagctcgtgctccagcgtaccgacaagatccgcttctgcttcgcaggttcaggcgatatgatgaatgcgatgatagaactcgctgctgcctacggcattgccgacaaatgccatttccctggattccagagaggcaagcaggtatatgagtgctacaagaattcggatgtcttcgttatgccttcggtatcagaaccgttcggtatcgcaccacttgaggctatgcaatgcggttgcccaagcatcatctccaaacagtcgggctgcggtgagatccttaccaacgtcatcaaggtagattactgggatatccacgcaatggccgacgctatctattctctctgtatgaacgagagcctccatgactacatcgccgaggaaggcatcaaggaggtagcgggcatcacctgggagaaagtgggatggcgcatccgtcagtgctacgaccagcttctctacaagggttggttcaataacgaggaatatctcgagaatttcataaagtgagccgtccaaaattcaaggagtacaagacgaatgtctttctactccaagaaaaaagataaaaagcaatcgtcctgtactcaatccccaaaaatgatgatactatcgtcttgtactccttgaactccttgcactccttttactcctaaaataataaaaacattcaccacaatgaaaacaatatgcctttactttgagatacaccagataacacatctcaagcgttaccgtttcttcgacatcggtacagatcactattactatgacgactatgccaacgagcgtagtatcacctatattgccgaaaactcatacatgccggctctcaatgccatgcatgagatgatcatcaataacccaggctacttcaaggttgccttctccctctctggcgttggtatggagcagcttgaattgcatgccccacaggtactcaccaagcttcaggagctcaacgagactggtcaggtagagttccttaccgagccatactctcacggtcttgccggcctcatcaacgaggagagcttcaagcgcgatattgagaagatgtcaaagaagattgaggagtacttcggcaagcgcccaaccgtgatgcgtaactcatcactcatctataccgacgacatcggtgcacaggtagcatccctcggctacaagggtatgctaaccgaaggtgcaaagcatgtacttggttggaaatcaccacactacatctacaactgtagtctggcacctgacctcaagctcctgcttcgcgacgttaatgcctctgatgacatctccctccgcttcaacgactcttcatgggaacgctaccctctcttcgccgattcttacatcgcagagatagctaagtgtcctgagtctgagcaggtagtaaacatcttcatggagcttaccgccctcggcatcgcgcagcctctttcaagcaatatccttgagttcctcaaggcactcccaacatgcgcaaggcaggcaggactcgagtttgctactccaggcgagatatgcgacagattcgagagcgttggcgcactcgatgttccagattccctctcatgggttgacgaggagcgcgacacctctacatggctcggcaaccagatgcagcgtgaggcattcaacaaactctattccgttgccgaccgtctgcttatcgccaaggatcctgcccttcttcaggactgggattatctccaggcatccaataacttccgcttcatgaccacgaagccaagcaactggaatattgatcgtggcatctacgacggtccattcgatgcattcaccaactacatgaacatcctcggcgacttcatcagtcgtgtgcgtgctctctatggtggtatcgaaaacgatcagcttgagcagatgcttaccaccatcaccaacctcggcaaggagcttgacgttaaggacaaggagatacagcgtctccaaaccaagctatcaaagctcgatcctgataatgaagctcgtcagccggagaagaaagcccctgccaagaaggctacggcaaagaaggcacctgcaaaaaaggcttctgccaaggctaaagaggaggcaaagcctgttgaacaagaaactacacagaaatcagcagaccctaaagctgaataatgcacttactatactaacaacactaagaggcgctcccgagagggatacgcctctttttattaatatcttaacgtaaatctctgactttattttggtagaacacagattgcacagatctaagagattgtctcgcttacgcttgtgattaacatccctaaaatccccaaaatctgtagtcaattaacttcaaaactttcgtttattctgtgtattccgtgttcaaaaataaacatccagaaatctgtgaataaaaaattaatgcgatattaatgtgatattcgtgataattatagctgaacacagattgcacatatctaagggattttctcgcttacgttcgtgattaacatccctaaaatcccaaatatctgtggtcattaaattcttcgatcttgttttgactgaacacagattgcacagatctaagagattgtctcgcttacgctcgtgattaacatccctaaaatctcaaatatctgtggtcaattagcttcataactttcgttcattacttccctgtggtcagtgggtcttcgacaaatctctgtgtttttccgtgttcagaaaagaaactctgcgtctttgtgtatctgcgttaaaaatataattttttggaataaattttctggtcatcgtcgctaattttcttgaaagccccagcaccgcaaggtgcatttccgtgttcagaagatttttttttagaattaaacgctaaacacgtacacgccccataaaaatgcttgtaattatactgatgattaagaagttaagagcgtgtacgtgtttgtaaaacatgtacacaacacgtacacgggtcgtcacgccttataaatttacgacatgagcatcattacactaatatccaagcgaaagggcaaaaaacgtgtacgtgttgtgtacgacttgtgtatgtgttagacaaacacgtacacgcccctaaactatttgacacacaatttgttataccctcaaaaacacccccgtgtacgtgtttggcgtttaattctaaaaaaaacacacacttgtaatctcgacattgcaatttggaagtataaatctcgtgaatctttcatgccacttctatgactcttttgtgccttcgctttacttccgtttcaggttcgcttctaatccgcttctactccgctcctaagaaagggcgcaaaatgggacttgcatgggatttgcaacggaattacaacagttaagtctgtgcagaggtcccatcttccatgggacttgcatgggatttgcaacggaattacaacggacttacatggaagagagaaagaagggctttatagtgtcaatatcacacgcaataaattcatgaaataatcgggagaaaatttggagaaatgagaaattatgattacttttgcaaaaacaactaattcccacatataagatacaagtcaatgattatccatgaaatgcaagggcataaaaaagccccacgaaacgcagggcaaagatatcttcggcttatagccttattgtgaaaagtctttcacaaaatgtaccttatgggtgcaaagttaatatttatttctgaaaaaacaaagaaatatgacaaaaattgttggaatagacgttggtactaactctttgggcattactgtcagagatacagataatcctcaaggagagcagattatatatagcacagttcaccagttcaagtctggaataatcaaggagaataataaagaattctcgcttgctactcagcgaacaaaagcaaaagggcctcgccatcttaacaaagtgcatcgctatcgcaaatgggcaaccttgaaaatgctcattgagcacaactgttgcccattgactaatgaagaactatcccattggtctcactatgacaaggcacaaggtcgcagaacatacccaacggatattcagcagtttaacaactggataaagcttgatttcaattctgatgggaagccagatttcatttctccgtatgaattacgtgcgtggcttgccacaactccagacattgatttctctttgccacagaatcgctataaactgggcagagccatttatcacatcgcccagcgtcgaggattcaagagcagtaaaggcgaaacccttgcagaaaaagcagatcagtcagaagcaaacatagacttaaaggaatctgaaaaagctcgtagcggtaagttggacgaatttatgaaggacacctaccctaccgttggctgtgctcttttcgaattgtcaaagactcagcgagtaagggcaagcgaatatcaggcagtaaggagccaatacaaggatgaaatcagatatatttttgattaccagaaagcccttcaccaagaaaaggattttcttgaaaccatattgtcagaaaagaaaagcgatggcacgattttctataaatgccctctgaaatcccagaaaggcacgataggcaaatgtacccttgaaccaaacaagccacgttgccctcagagccgcccagagtttgaactgttcacggcatggagtttcatcaacaccatcaggttcggcaatgaatgtgctacggagctaacacttgaacagaagaacaggctgtataacgagaagttcattcgtgcctctgattttgacttcaagacaatcagaaaatggatagaaaaagagtatgacacagaattgctatactcaaagaatccatcagaacgtactgtgaactattctgatgacaccaaagtagaggcatgtcaagtaacaagtcgtttgaaggatttattgggcaacgactggcaacaatggcaatatcagccacagaaacagcatactacaggtaactcaaaggaaaaccgccatcctataacatacacatgggaagatgtgtggcacgtttgtttcaatgcagatgatgaagagccattaaaacgatttgccaatgacgcacaccttgacattactctgttaaagcgacttttcaacactatgtcaataggttatgcaagtctgagcctaaaggctatcagaaacatcaaccgtttcctgttgaaaggtatgctctataatgatgcctgtctatttgcgaaactccctgacatattaggcgataaatggaacgaaaatttgattgacgatgtaaaagccgtactctcaaatacgagagacgaaaagacaataatacacatcgtcaatgcactcatatcaagctataaggctgaggaaaaaccgtgggcatttcacgatcccacatataaactgcaagcatctgattttgatgatgtgcagtcgtttagtattgccgagataggagattacacatggaatggcatgaccacaaaagaacaggaagatgtcattactcgtgtggctagtctttatcagcagttctttgccgacaaagaccgcaaatatttcaaggtgacatctatcgaagaccgtctgaaacattatctcgcagagcgttatcctgaaataccaagcaataagctcagcaaaatataccatcattcaaagattcaattctacagacctgcccaggaacatagaataatcaaaggcgatgccgtattgtcattgaaacttttgggttcaccagtactttcctctttgcgtaacccaatggcacttcgtgtcttgcatacactacgcaatgatattaatgatttattgtacaatggtactattgaagaagaagacacccgaatagtcgttgaggtagcacgcgaacttaatgatgccaatatgcgatgggcaataaacgaatacgacaagcgtaggcgtgatgagaatactttctttgccagtctgttagaggattatgtggttacagatgaagctattgccaaagtacgaatgttggcagagcaatcaccagatttgcttactcatgcagagaaacagcaaatacgcacatataatgagtacatgagtaacctcatgaagcgatacaaactatggaatgaacagaaagggttctgcatttacacaggaaagccaataacacttacggaagtgcttagtggtaatggtgtggatatagaacacaccttgcctgcaagtcagtcttttgatgattccttagcaaacaagactctttgcaagtcgttctttaacagaaacataaagtgtaatcgcttaccgtcacaacttgataattacgatgaaatactccgtaatatccagccttggatagaaaaggttaatagactgaaagataatatccgtttctggcgttatcgttcaaagaaagcactcgacaaggatagtaaggactatgctatccgtcagcgacatttatgggaaatggaatacgagtattggaacaagaaagtaaacgctttccgaatgaaggaaataaagcaaggtttccgtaacaatcagttggcagatacaagtaccattgcaaaatacgctaccctatttctaaaatcactctttacgagcgttgatgtggagaagggaactgttacggctgctttccgcaatatcatgcaagtacctcaaaagaagcgtgacaacaattcacatcatgcggtagatgcacttgtactgacatatattccaaaggctgcacaaagggaaaaacttctcaaattgtattacgagcgtcaggaacttgaaaacgtaggtcacgacgcttcacatatcataaaggaaatagaacgcgaaaaacgcttgtgtgggcttgatgtgaatataaacccaacgattagtttcctgcgctctaccgttatttcccgctattcaagccatgagcagataattactccagccaaacgccgtatgcgttcggcaggtaagatagtgccacgtcttgactcaaatggcaataaaatatatgaaactgacaagaacggagagctacgccttaacaaatacggcaacaagataccacaagctcgtttcatatctggtggcgacagcattcgtggcaaattgtttgaagataatttctacggcaagataataattgacggcgaggagaaaaccgtgattcgtcgtggtggtggaattatcaaattcgaagagaagcatatcaaggatattattgacaaggatatccgtgaggcaatacagaaactcacagacgaaaagggatttgaacaagcaaagaaagaagggttctatatcatatggtctactggcaagcgaaccccaatccgtcatgttcgttgtcaaataaaaacggctgttgtgcctgtcaagcctcatgcctatgtttccgacaaggagtataaacgctatgcctatgcagaaaatggcaaggtggtactctatgccctgtatagtgacggaaaggcgagagcacatcgttgcgttactttacaagaagtagctattgccaacagacaaagtaagctaaatcgcatagaagagttgctgccaacctcagtcaccgagaagaaaaagactcttccattggcattcgtacttcatagaggtgatttggttatactcaaagatgcagacgaaccactatcgtctttgtctgaatcagaaatatcaaagcgtctatatcgtttttgcgctttacatgatacagatagaggtaggttaataatacaacatcatctatattcacaatctggagatgacaaggccaaggcaaattcaacatacaaagttggtgatgctcaacctctattgcttgtttcaaaggaaaaacaaaacttttggatagagcatgtagatttcaaaattgaaaagggcaagatattccctataaaataaacgataagctgcattcccaaaatgggaatgcagctctttttatagtcatctttctcgttttttgtagtcacaaacaattagtttacagatcattatacagagtctgttgttaatgactatattttggtacatctttgaaagctattcacaacagccaagtggcagaggtgagcgcgcgcatcgttgttaatgactatattttggtacatctttgaaagctattcacaactgtttaactctaacactatttctattatgggttgttaatgactatattttggtacatctttgaaagctattcacaacagtgaaggtctgtgccttccttctgtggggttgttaatgactatattttggtacatctttgaaagctattcacaacagaagcccctttgcgcctatcaagcagcagttgttaatgactatattttggtacatctttgaaagctattcacaacatgtaatgatgtgaagactgagttatgttgttgttaatgactatattttggtacatctttgaaagctattcacaacagactcccgacagtctttttgccaacatagttgttaatgactatattttggtacatctttgaaagctattcacaactacgcctgagtattttttttttgagcgatgttgttaatgactatattttggtacatctttgaaagctattcacaacaggatcttgattatcgtaatcgtattggcgttgttaatgactatattttggtacatctttgaaagctattcacaacttagcagctgccagctcgtcgatgatgaagttgttaatgactatattttggtacatctttgaaagctattcacaactagaaccgccgtcgaatttccattcaagtcgcaaatacacatatttctgtacatttattttcaaagttcatcaagattaacctctattcctttgccgtcctttatatcttgttcggctttacgaatatcagtcattgtctctggtgaggacataatatatagtgtctcttcgagagatgatgattttctcatacttctcataattcacaaaattaatgacgtgggcaaagatacaaataatctcagtaaacaccaaattttcccatatgtttttgtgattttagattaattcgattgctgaatctctgctaatcctctgctatgtctctgctacacctctgctttttctctgctaaagctctgcttccgtagcagaggaatagctttttcagagcgatggaatagcgttttcacaatagaatttcaacgagaaatagttaaatttcatatagatattagaaaaaggcaagtcagaattttgttaatcgcgagaaaatttgtaattttgcaccgtcacttagaggaattcgcagaaaggatgataacctttataatccaatagatggattgtttcgagcctcaaagcataagccactcctttgggagtggcttttctttttattattgtcgaggaactgttatacaatactgtacataatccttatttgttcgttgaagcccaactgttaatttgatgttcttatacttcatatagagtatcttatcatattgtttctggtttttgttgttctttgggataacctcgtcaaccagttccgcattttccaatatttctgtcaactgaaatactgcaagtgtggaatcgtatgtgcgtgaagcttttgaatacgtttcgtttattgactgatacttaacaagaatattgtttttcagccacttgttcataatagctttcttaggatgctcggctatccattttgcatagaaatcttttattattttctcacgtatctttatctcttgcttggatctgcccattggaatcccatcagcatcatattctatttccttgtgttcattatcatgcgatggtatatcttcgctgacacgccatacaacatcatcctctggcagttcatagccttgctcaaaggaaatgtcaatcaattcatattcgaatatgtattcttgctctggcatgattgttttgattatttcactttaggcttcagctcatctggtgagtctttggtaaacatatccaccttctgcgcctccttctcatagagattatgaatcacgctctcatcaagagtaatagacggcttgaaatccgcactcttcatatagtttataatactcttgcgaagctgacgggcaacgagtcggttcctgagattcgaggtgatatcaatagtagtcataaggagcttgccgccaagcacgtttgcctcaataatcataccgcacttacgacttacatgccacgtatctatcggctgcataggtggctgatagtcagcaggaaactctgagagattcattacctgagcacgattaacgagttcccaccaaagaaggttagtccagtcgtcggtaggaaaatcgcaatatatcgggtgagtgctgtcgatatatgcacctgtgacatgaggcggacgcatcttaaaccatgatgtattccagaaaacaggcagatagttctgccttatgtcattgccataacgcacctttccggcagccgtgagaagcaccttatgccctctcttcaatgtctctatagccaaagcatcaagggtatcagaaacatacacgccatcaacaaatcccttcttcagttccacttttgccttcacgctttccgcttccctatcatgtgacggtatcacccaaaaatcccagtgattcttccatttcctttcaccagaagagagagtgacggtaagcgttatcttacttggatcaacgaccgaggtgagaggatatgtaaaagtgcctaagtaatggttcttgccaagtggaatggttaatggaggtatggtaaatgatgaggaatactccaattcttcctgtccgcttgccattccgattctatccttcacgctctctgttacgctgtactccacctctgcatcctgaatatcaccagcagaggcattatatacctcgataggaactctgagggtatcagaagaagaatagacgaactttgggaatttagccaacggaaccacatcattgcagaactccgtccactccgctgcattcacatagcctttctctttccaatgcacgttgagaggtccgacaatggctgttccctgaccgctataatcgttcaagccaaggagcacgaaacctgtatatccgttggtgcggaaattacgctctatctcatatttatatgctagggtctgcaacctaccgctcgacataaggaacttatcagcctgtgatgccattccgttatcacgcagcaggtcttcgaagatatcaaaattcttcgccttgtatgccccagtatattgtgaacgttccttcaaatcagggaaggcacaccattgcccttgctcatgcgagataataggcgaattgtttggcacgctatccttgtaatggcgcggaaagagcacatccttgctgtaatcatcgtcagaatgaggtgcgcgacggttccagtcaaggccacgtcccccacccttcacatgatattgcgaaccgctatcccaagcccatccgcctccaacatttgcaccgcaatagatacggcgtgagtctgtctttttccaataatccacccagtcgttgcaccatttcacccaatcgccagccggctcgtttccggcactcatcataaggaaagaagggtgattgccgtaagcctcaaccatacgtttcgtttcatccatgagatactggtcgatagccataccacgcccaagcttcacaccatgattaggccacgaaggtccttcgggctgtagatagaagccgagacggtcagccacacggaaagcggcatctggaggacaataggaatggaatcgcatagtgttcaagccatactccttgcacttgcgtatgatcttttcccaagaagcatcatcggttggaggatagcctgtttcagggaaacagcagttgcccaccgttccgcgaacgtatataggctttccattgagaacgatatccgtaccttctacctttatctctctcattccgaaggtggtagcgacggaatagccattggcatccttgatctcaagagtgtagagattagggtggaactcatcccatagtttgatgttctcgccaagagaaatgacatacgagccgtctttctgagcctcggcattatgctcgatgccatctattaagaaatgtagtcctgaattaggggcattacctctgataacaagacggatgctataggtagcaatatcgggatatacgtcaagatgctcaatggcattcacaggacgagcagagagcgagatctcacctacgataccgttccagttgccttgcgtctgatcggtaacggaatgcgaatcctgtcctacacaaacgttctctattccattatacaccttgattgcaatcgtgttctccttacctatattgatgcaatcggtaacatcatagatatggggagcagacagtcccatctgatgccctgcctccttaccattaacgtaaacggttgtctctatatgagggcgctcaagagtaagaatgatacgttgtttcttccattgcttcggcacgagcacggttctgcgataccacgcattacccacgtagtgacggtcgggagtaagaaagaacgggaatttcatctgcccctctatgcgatatttctccatatagggattaaaatagaaagaggagtcgtatagcgagccagtccattgcgtatcgaccgacggcagatcgccctttcctcgtgtaatcatggagccaggcaagagtatgctatcgccataaacagatattggcgtaacgacattctcgctacgctgaatctgaaactcccaaattcccgaaagatctatcttgttttgggcagaagcagaaaaggctgacgttatagctattaaggcaaggattctcttcatggtgcaaatatagtgatttttttagagaaaaaagaattaactccaatttttattgaaataaaatgcgataaaagcacgtttaataaaaagcaaagaggaaaaaaagcaaattgtaaattgtaaacgacgtgaattcggtgaattcaaaatatcctataaaagcaactccgttgcctagttttggaacaaaaattaccgacgatgaccagaaaatttgactcagaaaattataaaaatattttttgggaataaattttctagcaattttggagaacttgctttagcttgttgagctttgcgaaaaatttttgttccgtaaacagcagcttgctgctaaatctgcattttttttcatcgaactggcgttaaattgtaaatagtaaattgtacattataaattgcgataccttattgatgataatatgactccaatgactgagggacagtttaacgactgcctctcaaaggtcagtgagcaacgccgccaaaaggtgctgaaatataagttccaagcaggaagggaacagagcctcagagcctatatgcttctccagagattaataaaggaggaatacggaatcacggagccacctgttttccgcgaactggagaatggcaagcccgtcatcatcgggcatgaggacatccatttcaatatgtcgcattgcaaatatgccgtagcatgtgccgtaagcaacgagcccgtgggcattgacgtggaaagaattcaggagaaagtgaacgatgatctcgcaaagtatgttcttagcgatgatgagctaaaagacatcaccccactaaagttcactcgactatggacgatgaaggaagccgtggtgaaactcacgggcagaggtatcacgggcaaggaacagctccgccccctactctccgatttccataaaggaaatagcccttggcagataataacgaaggaatttccagaaaagaaatatgtagtaagcatctgctcgaatgcgaagtaacgtgagttcgaccaactgtaattgtctggcagcaagctgcttttaactgacaataattaccaatcttaccaatctttacccaataagaaattatattttatggaaaaagattgcgcagattggtaattattgtcagttcaagcaccaaaggtgcgcattcgtcgagatttgtcgcagatacactgaccgcaaggaggtaactcacattacattactctttactctcccctcccccctatctacattacccttttccctttacactttactctttttatagctcctttttgcaaacgtttccacaataaaaagcgcaatatttttgctaaattattctttattttgaaaattttctcgtaaatttgcactcgaaagtaaacaaatattaaatttattaatcaaaattattaatcataaaaatcacttattaaccctatataactatgccacacgcccaaattacaatgaaggatattgccaaggcactcggagtgtcagtggcaacagtatcacgagctttggctgatcacccaggcatcagtgagaaaaggaggaaatcaatacaggagtatgcaaaggagcataattttgtatccaacgttcttgcggaatcattacgtcattctaaggcaaggtcacagaagatcataggcgtcatcgtgcctgagattgtgcattacttcttctctaccgtcatttctggcattgaagaggaggcattcagtcgcggctattccatcatcgtcgcacagagcaaggagcagtttgagcgcgaagtgaagatctgcgacagcttcatcaggacgagagtatgcggaataatcgtttcgcaggcaaagaacacgaagacgtacgatcacttcatccgcatcatcgacaatgagttgcctcttgtcttcttcgaccgtatctgcaccggtgtgaatgcctcccgagtggttatcgacgactatcacggtgcattcacggcaaccaactatctcatcgattccggttgcaagcgcattgcattctgcggcagttccatgcaccttgagatcgtgaagaaccgtatgaatggctacaaggatgctcttcgacttcacgaaatgagtatcaataacgattgcatcctggaatgcgactctcgcgaacttgcagagcagcagattccgaagatcctgaaacgtgaagaccgtcctgatgctttcttctgcataaacgatgataccgccatcggtgttatccatgccgtaaagcgtctcggtctcaagattcctgatgatgtaagcatctgcggtttcaccaacggagagcgtgctttggcttgcgatccgatgctcaccaccatggatcagcgaggcaacgaaatcggtcatcaggctgccaacatccttatcaataaggttgagggcatcactccgctcaatcgcgttgagaagcagatagtaagaaccaatctcgtagttcgcggaaccacaaggattgcgatgccgtaagattaattacgaattaccagatatcaattactaattacaaagtacgaattacctggtttcaattacgaattaacgcgaattcaacaaatgcgcacttttggtgcttgaactgacaataatttttcgctaaagctcaacaagctaaagcaagttcccaatcttaccaatctttaaccaataaaaaataaaaatttatggaaaaagattggtaagattgggaattattgtcagtttaaagcagcttgctgccatacagaagatattcatcaaactcacgttaattatcaaatcgtacatagcaatcgaaaacaagtaattcgtactttgtaattcgtaattgaaacaattcgtaattgaaaataggtaattcttaattagtaattcgtaattaccccacgcttttttgctcaaattgtttggcaatttgaaatattttttatacctttgcaatctgtgaggcacgtgaacaaaaaagaacgggcattcacaccacaaaaataagttttacacttaacttatccatcatggaaaatatacgtcaaaatgctatattaaaacatgacataccccctaaaatctggcacatacattcggagattcacccaatccccgacttccctcaaagcgaagaaaatgcctgatattttatcaaaccactaacaaaaaaaaacataattatgaatacaacatcatccacgccgttatggctcaatctgaaaaaagaatacattgacgacaactttgaaaatctgcttgaatacctcagaggcaagcacgatcctcgaagcaaagacagtttctatcacaccacaataaatctgctgaaagaacgaattgcagaactggtccagcagatcgcttcccgacctgtatatggagaaaaccctgaacgcgagcaggttaagttcaacgcacgcttgcttgccgcctacctcataatcgaaaacgaaggaagtctggctctatccgcgtatgtcgcattcatccgcgaactgatgattctgtcaccacgctttgccgaccgactgatacaaacggcaatagaaagactcaagcacgagaaaataatcaaactatcattctattggcatgaaataaaggacttcaagactgaaatgttcatctacaacgtagtcaacaattcacgttttgccaccccaataaaaaagccgttggtattcgaccattgcggcacggcattgctgtcagaaaaaggcctatacctcaccggcgagaagaaagccgaagccataaaactgctcacggcaggtgccagctcgctcgatacgaagatcggcatttccatccgaacggcaagcagcgaaaagtgccgccaatcgtacgaaacgaacatccctctcatggacgagtacatcaaggatctgctcctacagctatggaaaaccaagaagaaagaggcaaagccggtgctgaaacacgttgatggcgatgatgtatttatcaaggtcgtgtccatagacaacaaccgcaacattacagtagaaacggttggcgacaactacgtgcagatgcgcggcatcatcaaatttgatagggagaacatcatctactattacacaaacgactttgccagataccttcgcgtaggcgatgttctcaaggcgaaggtgaagaatgcggaaaacggatacttcggcatagaggattcgtttatcgcatttgtcgtagaagattgtcgcgaacaataccagttaggcaccaccgatgcaaaggctatctacaaaaccctcaactccatcgtgtggatggacgagcgaggcataccattctacacacgtctgaacgagaaatatgccataggcgattgcgccctgctgcaaatcgaggaatattgcacgggcaagcaatacggcaagatccatgccctggtcgttgagcctatcgacgattgggatattgacatcaaggatgtgcagagagattgcatagaagactttgcaaaggctatctccgaatccgacaacgtgattaccgaaaacggacagatgctcagcgctaacattctctgcatccttgcaagaatgctctacgaatatcagaaacagcttctcaagccttccgagcgctaccactaccttgccaatgcccgaatcatgtccgagataacggcagacgtatcagcagccacctacatcggcttctgctccacgtatctcaggcttctcgttcagtttgtcaacaacgagtcggtggctaacatcacgcttgaggcagatgaggaattcaaggaggcaaaggacacgctcgtccgactgtcagtactgaaaatcctcaaggaatatggcaagacagagaactccgaggtccttgcaaaaacaatcagcgacttcgagaacaagataccaatactcgcccgattggcacgactcgtacagacagccaactcacttcgcggaaacctctcggatgcaggtatcaatgtcatcaagcgagagattatcaagaccctatccttggaaaccgttaatgatactgaccttgaggctgatagcggcacatatctcggacttgaaagcagcacgcaggagttcaagacatcgttcgtatatccttcgggcaacaatatgcaaccagccgagaagacacaggaactcaacg

SEQ ID NO: 2057 - DNA, 24104 bp, synthetic construct
  misc_feature 1..24104: note = Synthetic
  source 1..24104: mol_type = other DNA
acaaagcaggtttggcttttgttttaggcgtatctatcagcgatgtaattttcgtaactgtagccaacgtggccactccctggctgcaatggctgcatcagtttgcccgtccgttagcatatagcgcatcagcattactcattgtagcggggctttatggtgccattaaaaagcaaaaacccaaaaaagatactgagcaaattcttaaagtcagtaatgcccagtattttaaaatattgatgagcggttttctgatcaacacattgaatcccgctcttattttccaatggatagtagctgctaccggcatggctgcggaaacaggtgcgtatcgtttcgtgttttttggttcttgtctcggacttgtattgggtatagatgtgcttaaggtttttctggcagataaaattcgccggagacttactattcggagaattatgttgctgcaaaaaatatccgccttaatgatttttgcttttggggtaggactgcttgtgctcaccatcatgaatgtggaattacagcctccaaatgccagccaatcgggcgataagatttatccaacttctactgccttaaacgtagttaaagcttagtatctttgccgcctcatgtccgacgctatacgccacgaatgtggactcgcatacatccgtcttttaaaacctctggcatattaccaccgaaaatacggaacggctttctacggtctcaataagttgtatctccttatggagaagcaacacaatcgtgggcaagacggagcaggaattgctacagtaaaacttgatattgcccctggtcatcaattcatgtatcgccagcggcaaagcggcgcaggagccatctcccatattttccaaaatctcaatcaggaagtaagtgagatggaaaaaatgtatcctgattttcgtaagcatccgggtttgatgaagggatacatgcgttttatgggagaagtgatgttagggcatctccgctatggaacccagggaagaaataacgtagaattttgtcacccgtttctgaaaacgaatattaatccaacgcgtaatctttcgatggcgggcaacttcaatctgataaatacagatgaattatttgctattctcgatgcccatcctactacatccattcgtgaaagtgatttgggcgcaatgatcgaaatggtgaattactatttgtgtcttgccgatgaaactgatccgcaaaatctgaatctggaaggtgtgttgaaacaagctgcttctcattttgatggtggttatgtatgtggtggcttaataggcaatggcgacagctttatcttgcgcgatccaaacggcattcgtccaggatatttttataagaacgatgaaatagctgttgcggcttcagaacgtccggctatcatgacagcatttaatgttgcctttgaagatgtgaaagaaatatcgccgggtcatgccataatcgtaaaagcaaacggagcatttagccatgccgaaatattggctgaacgagaaagaaaatcctgcagtttcgagcgcatttatttttccagaggcagtgatgcagaaatatacagggagcgtatgcagctcggcagaaaccttgccgacaaagtgctgcacgcggtggacaatgatttaaaaaacacaatcgtttcctttattcccaatacagcagagaccgctttttatggattgataaaaggtttggaagattatctgaatgaaacaaaaattcagaaaattaccacccgcaatctttctgaagaggaaatgaaagaattgctacatcgcagagtgcgtattgaaaagatagccatcaaagatgtgaagatgcgcacattcattaccgaagatgcttcgagagatgaaatggtacagcacgtttacgacattacttacggtactgtgcgaagcggagttgatacgcttgtagtgattgatgattccattgttcgcggcactacactaaaacaaagtattattaaaatgctcgacaggcttgggcctaagcgcattgttattgtttcctcagccccgcagattcgctaccccgactgctatggaattgatatgagccggatgggagactttattgcttttcaggcggcagtagagcttttgaaagatcgcaacaagcaaaatattctggaagaagcttaccaaaattgtttgcaggccgaagccgataataaactaaacgaacaaaattttgtaaaagcagtttacgatactcttactcccgaagagatcagcaaaaagattgcattcatgttgtgtcctgatgatgtgagtgcaaccgtagatattatctaccaatcaatagaaggactgtatgatgcttgcccgaacaacaaaggcgactggtattttaccggaaattaccctacacctggcggcaaccgtgtagccaatcgtgcttttatgaattatatggaacggaaagaagggaggggatactgatttggttggaagggttggagatagttggaagtgttggagaagttggaagtgttggagaagttggaaaggttggaaaaagttggattgttggagaagttggaaggctgttttttagtttaacatttaaagagcataataaactggtgattggaacaattgtttttgttttaaccagaaataacaaaatagtgcagggaatattagccttgctgtgaaaaggaggaagaagatgttgagtatcacaaataaagagcaggaagaatgtaaggtgtgggtgattgattgccgtggttacattcattatcaggcagacctgaagcccaatgaaaaactcgatttagatttgaagggattagtgtttggtatttatagaatgatctttaaatcggaaaacacaagttttattcaggagtttgtgaaatactaatacacagctttgctacaggagcaattttgcaaacgaaaatggagtgggcattatttcttttccgccagttttttcaattccacttttatctcgtacaaagatcgcgacatttcctgcaagggaatttctgattgaggaaggctatcgctgatataattcacaaacccccaaacttccagaatgtcggcaacatttacctcatacggttggtaaatagaattgagtgaacgaagcaaaaatgttctgttggtgctgattaaattggttactaatttgaaaacaattccttcatctttcgtaataacaatacacggcgtttcatcttttatactcaaccaatcttctaaatactttccgattacaagactgttttcaggaatgggatacatagaatcgccggaagtaggaaacatgcgaaactttttatccttgggcaaatgtggcaaatgaaagaccggtagtttacttataaattcaggatcgctgaagccggccagataacccgcccgtgctttttgcggcacaaattctatgttatcattattatcagcatcaacagtggtagcgagtatttttattttcttgcccgttataaaatcattacttgccgattgtagttctattaactgctgttctttaagtttagaaagatccgttcttaacaaggcatctatgctgatgcggaaatagtctgagaaacgaaataaatcttctacgggtggatttacagtctgtccgttttcatgtgcatttagcttagagcgcgaaatattcaattcagcagcgagttcttcctgatttagtgcaagcctgcgacgaagcagtttaatattcgatggccagtagcacgtatttgttgacactattggtagtttttggctgtttatcaataatgacaaagctaagttatttgaaggtatggtggtgcttggtgaaacgcaaataagtaaaacctaaaacggcagaaatgagtgaggcgatcatcaccgccaccttagcaacaatttgcacagcaggatcgctgaaggctaacgtggacatgaaaatggaaatagtaaatcctactcctgctatcattcccgcgccaagcaattgtttccattttattcccgtaggcaatataccaatgcccaattttacacacacaaaagaaaacaggaaaataccaagtggttttcccagcacaagccctgtgaaaataccatgatgcacaattgagttgaaaacggaagagaatgtttcaggcaaaacaattgcagtatttgcaagcgcaaagagcggcatgatgagaaagtttacagggtcgtgaagggcgtgttccagcttttcaattttatgaagaggaatggtgaatgcaagtagcactccggcaatagttgcatgaacgccggagttgaaaatgaaataccagagaacgatgccaagtaaaaaataaacaaaatatggtctgaattttaaaacatttaaaagtgtgagcaacacgagtagtcctgctgcaaacagcaaataattccactgaatatttccggcataaaaaatggcgatagtaagaattcccccaaggtcatcaataatggcgagcgctgttagaaaaatgcgtaatgatagtggcgctcttttaccaagtagcgagagaatacccaaagaaaaagcaatgtcggtagccataggtattccccagcctcttgcatattcagttccgccacaccatagtaaaaatagaaatgcaggaactaccattccgcctatggcgccaaaaatgggtagcatagattttttaaaacttgccagttctcccaccagtaattccctttttatttcgaggcctaccaggaaaaagaagacagtcattaagccgtcgtttattaaatgaagcacgctatgaggaagatgaagcgttgcagacggttggaaaatttccctttcccaaaaatgtaaataattttctccccatgcagaatttgaaatgataatagaaactacagtgcaacaaatgagcgtgatgcccaccgaacgactgtcgtgaataaattccttgattggcgaaatgattcctttcctaatgatatgctttggtgacagctttgccatagcctaaaaatataacttggaaaataacggatcggattgattaaaagctgtttcgtagaagcttaactttatgacgataacaaccgcaacaactcatcagcccgccttttatgaaattattgcagcctttacaattcttaattctgttttgctttttgatagcaacaggatgccacaagcctttgtatatacaagagcgctccactcagctttatacggttagtaaaactgacccggttgacagcgcaattgtaaagatgttagcgccttataaaattggggttgatacgcagatgcaaacaatattggggcgcaccgatattccacttactaaagcacagcctgaaagtacgctcggcaattttatggctgatgcacaaatggtcgctgcaaaaaaaatagacaataaagttgttgggtcggttatgaattatggaggaattcgtcttagttatatagctcccggaatacttacaagaggtaagatgtatgaattgatgcctttcgacaatatgcttactatagtggatgtgccgggtgaagtgcttaagcaattttgcaatcacatggtgcggtataaaggttggccgataagtggcattagctacgtaattaaagataaagaagcaaccaatattctgataaatggatcgcccataaacgaccatatcgtttacaaaattgcaatgagcgattacatagcgcgtggcggcgacaactgtgattttctttcaccattgcgaaaacgattcacaacgatttttgtgcgcgatgccatgattgagtatgtaatggaattggaaaaacaaaacaagccccttcatcctaaccttgaaaacagaatacagtatgctgaatagaagaagcttcttgaaaaaaagtgcaacaggttgcggactgatgattgcaggaggttttccttttgaaagctttgctggggaaagcgtaaagcgaatcacaatacttcataccaacgacgtacatagcaggttggaagcttttccaatggatggtggcaagcatgaggggcaaggtggtgtagccgcacgcgcggcgcttatcaataagatcagaagcgaagtggaacatgtcttactgcttgatgccggtgacatttttcagggaacgccttacttcaatttatataaaggtgaagctgaaatgaaagcgctgagcatgatgagctacgatgcggttactatgggcaatcacgattttgatgcaggtgtggaaggatttgcagcgcaattagttcacgcgaagtttcccgtactcaccgccaattatgattttactgaaacagttttggaagggaaaacacggccttacacaaccataaaaaaaggcgatatcaaagtagggattttcggacttggtattcaactgaaaggcttggtaccggaagatgcttttggtaaaacaaaatacctggaacccatacaaattgcaaatcgcacagcagaaagactaaagaaaaaggaaaaatgcgaaatcgttatttgtctctctcatcttggctatgaatataattataacaaggtgagcgaccttattcttgcaaaagaaacggagcatattgatctgataattggtgggcacacacacacttttttagacacaccaactgtaatgaaaaacagagcaggcaatgaagtagtagtcaatcaagtgggatgggcagggctgcgtttgggtcggttagatttcattctcgatagcaaaaaaagctccaaactttccaacgcacaatctgtaattatcaggaaacaaacaaggggctaacgattttttttttcaacaaaatgttggcaatttcgtcttcctgttaacgcaataacagaaactaccaaacactgtgctgataaaggttttgaggcgtcggaacaaataatattttacggaaaatgtagtgagtggcgtgcccggattttatagtcgaatgcgggtaataaaattgtcacctccatacttttcgggattaatgaaaaattggtattaacttgatgaacgagtaaccaaaacatggataaccatctctacaatacatctaattcaatcaacgaagcagaagctgtttggaacaaatgtttgagcatcataaaggataatatcaattggcgtacttatcaaacctggttcgaaccaatcagagctgctgcacttaccggagctgttcttacattgcaagtgcccagccagtttttttacgaatggcttgaagaacattatgtagaactacttggcaaaacaataaaaagaattttagggcgtgagggaaaattggagtaccgtattctgatggagagcagcacatcgcagcgcaaccccgcatctatcaatatgcccgcgagcaatcacacaaagccgtcgaaagacagcaactatgtagatatgccgctaaaatgggacgatcctaccaacataaaaactccttacgccattcctggtttaaagagaatgcaaattgatcctcagcttaatgctaactatctgtttgataactatgtggaaggagattgcaatcgcgtagctcgttctgccggtttgcatgtagcgcaaaagcccggtgcaacttctttcaatccgttggtagtatttggtggagtaggctggggcaaaacgcatttagtgcaggcaataggcaatgaagtgcggcgtttgcatccaaataaagctgtcctttatgtaagtgcggaaaaatttatcaaccaatttatagatcattcaagaaataatgaggtcaatgatttcattcacttctatcaattaatagacgtactgattctcgacgatattcatctgtttgttcctgctacaaaaacgcaggatgtgttctttgccattttcaatcacctgcatcaaagtggcaagcaaataatcctcaccagcgatacaccaccaaaagatatggagggtatgcaggagcgtttacttagtcggtttcgctggggattgaatgcggatattcaggcacctgattttgaaacacgccagcacattttgcatgtaaaaatgaagcaggaaggtttggaaattcctgaagaagtggtgaaatatgtagcctacaatgtgcagacaaatgtgcgggaacttgaaggcgcattgattgctttgtttgcacaggcaacgctcaacagaaaggaaatagacatagatcttgcgaagcgggtgatgaagaattttgtgaagactgccgcccgcgaagtcaccatagaaagtattcagaaaatggtttgcgaatatttccaccttccgtatgatcgtttgctggcaaagacacgtaaacgcgaggtagtgcaagcgcgacaaatcactatgtatctcgccaaaaaatttaccaagagttcgttgaaaaacattggcgagcactttggcgggttcgatcataccactgttatccactcttgccaaacggtagtaaacctgatggatacagatacagaatataaggagcatctccttgaattacagcagaaagtacaactcgcaagcatttaagaaagacgaaaaattattttgaattatctgcaggaaaactatctttgcagtcccttaataatagggtgaaaattcttgaaaatggctacaggcaatgcttgtagaattactggtgaggtgggtgagtggctgaaaccaatagtttgctaaactgtcgtacgggttaaactgtaccgggggttcgaatccccccctcaccgccggaaattcgggaagtagcgcaggccggtagcgcatctggtttgggaccagggggtcgcaggttcgaatcctgtcttcccgacacaaatacaaaatgcctcagcgaaagttgaggcttttttgtgggctgtcaaggctttttttcatcatgccttcggtttccatctctccttgattccgaaaatattatttttgaaacgctgcaatgagccatacaaattcatatatcatagcgggtggcgcggaaggcaaggaacggcttaatgttctggctcggatacttgaagaaagcacgaagaaacttattcagtctcacggcaacctgaaaggtaaaagctttttggatgtgggttgcggtggtggacatgttgcgctgatgaccgcagcacttgtaggcaaacaaggcagagttacagccatagattttgatgaaacaatcattgggcttgcccgtgcagatgcagcgcaatcaggcgttaagcatgtcaccttccactcaatgagcgcctatgatcttgagcagaaacatcaatacgatattgcctattcccggttcctattgtcgcaccttacccaaccggaaatagtattgcatgcaatggcagcagccgtaaaaccaggcggtgcagttatcatcgaggatatagatttctcagggcattattgctacccgcaacgaaggagttttagcgcttacgtgaatcttttcaccaaagcagcaaacaacaacggacacaatgctaacattggtttgtcgctctacaaaatgatgaaagatgttggtctaaacaaagtgactttcaacgtcattcaacccgcatttctttcgggtgaaggaaaatggatggcgttctatactttggacaagattagacgaacagttgttgcccaaaagatagccacggaagctgaagtaaatgaactgcttgaggacttgcagcgtttcacagaagataaggactcaatcatctccatgcccaggatatttcaggtagtgggctatcgggaataaacgaccggattgttatacatcacgagtaaggaattgaaaatggatagttgaaatgatgcagcgcgtgagcgctgttttttttaaaactaaagccgacctgacctggcagaggattccttttaatttcagtatcacttgacaatagagattattttttggatattgagaaatgaaaaaagcgacttgcgccgctttgaatatcaacaataaataaaaaagccccgggataaccaagggcagggcttaatcgcctaaggaattatccttgttgtgataagctttcggacataaagataatgaacctcaaaatattgccaaatgaaatttaaacatgttcttggtttagatattggaaccaattctctcggatggttcttgataaaggagttcgaagacggaactatagagatggtgaaatctggtgtacacgttttcccgattgggacgatagtagatgacaaaagtaataaagaaactacaaagaacgagcaacggagaaagtacagaggggcaagtagattgcgttaccgttttaaattaaggaggaagaatctgaaagacattcttgagagacttgggatgctgccagattattcaaaactgttcaagcctttgagttctgaagaaaaagagcagattcaaaatcatgaaagaggacaatcataccttctctacaagcttcgatcggaagccatcaactcaaaaatccctttagacgaaatcggtagaattttcatgcttttaaacaaatacagaggattcaaaagcaatagaaaaaatcaaaaagaggacaaagaaacaggagaagtaaaaaaaggcatagcgaatcttcaaaagctaattgatgaaagtggcgcaagaacaataggggagtattttttcaaaatgcacgaaaaagccaaagaatggtatgatgagaacaaatggcacaacccaaacgaacctgttgatgaaagagccctaaataaagaaacaggtgagtttgtcctttttaatagcaatggcattagaagacatcatggacgatacacgttgcgcgatatgtacctacatgaatttgatttgatatggaaagcacagaaggaagcttacaaagaggagaagccagagatatttacaggaagtaaggaagagtatgatgcaattctttctcttccacataccgaaaggattaaagcactgaaagaatttcggaaaacaaactactggcacatccgtgaatactgcatttactatcaacgtcctttgaagtcgcagaagaaatttgtctcaacgtgtcaattcgaacggggagaatattatgtaatgaatgaaaaagtcattgggggagatacagaaaaaattgtgcaaaaaagaaaatggaaaaagaagtcaaaaaaggcttgtccaaagagccatccattgtttcaggagtttcgaatttggcaaaaacttcatcaaatatgctattcaagtagttccgaagaggtttataataagccattaaagacagggtggttcccggtaattgccgactatttaatgcagaataaagaactaaacctttcaaagccgggaaagaatagtcaagaagatgtacaatggatgagtaagttgttgtatcaaaatggcttggttgagaatcatgagggttatacgttctttatcgataaagcagatgaagatgttgacggtgatgataagaatgtcaacaaaatagctggaaacattacttattcaagcttcaaagaagctctgggagaagaaacctttacacaatttctaaatgaaaaaataacgaggatagagaacatcaacaaggaaactgaaagtcaggtagaggaaaatagattgttccttttgtggaatgtactgcatcaagcgaaggacggtttgtttaaagaagatgtttggctgctaagtattttgactgacaaatggaagcttaaggttgaacaagcaagcgcacttattgaaaaaggactgcaacctgattacggatcgtattcaagtaaggtgttgaaagcaatactgcccttcatgcgaaaaggactgaatgaatatgaggctttaaaggcagcaggaagaggatatgtaaattatgataacacagttgggcttaaggtacagataaaagaaaaaatatctcagcttgcatatcaggaactgcgcaatcctgttgtggagagagctttatcaaaaacgattaagctagttaacgcagttttggaaaagtatcgccatgaaataaatagagagacctttgaaataaggattgaatctactcgcgcattgagaaagccgcggcaggaacgagaaagcgaacggagaaaaaatgccgagaaggataaacttagagagcagtatgcagcatttctgacaaagaacaaagataagcttggctttaaaagagacatctacaaatacaattccattgttgcaaagtatgagctatggctgcagatgaacatgaatgaagacgatgaggttttcatttcagggttcaaagcattttcgaaaattattaagcaagaggataggctcaagcacaaattgtggcttgagtgtggcagaagatgtccatacacaggggcggttatcaatttcacagattgctttagccccgaggtagagattgaacatatcatccctttaagtagaagccttgatgattcctttaacaataaaacgcttacctatcgagcaacgaacgtgcttaagggaagtaagacaccgttggagtttatttccaagttgggtaaagaaaaattaaaagagtttaggagtcgaatgaatagcaaatatcacgggtttgccgacagtaagcttatgctattccttgcagatgatataaaaagtgtacaggaattttcgaacagccagcttagtaatacctcatatatcgcaaggtatgcagtgaaaaagatgcaggagatttgcaaaaatgttcagtttacgaatggagcagccacatttcaactgaggtcttatgattggtcattgtcagccctgttagataagatccgttatgaagaagaaacaggcgtaaatatcgatgaattctataaagaatataatggcatcaaaagggattttttaaactggtacagtaaaaaagtagagtcttctgacttcaggcgtgtagatgctttaaacagtgacattgataaagcaacttatctccaggagacaaacaacgacttaacctattgggaaaaggaaattaaagcgttcgaagagttccgaaataaatcgggaaagaaggatcgaagcgaccaccgacatcatgcggttgatgcatttatcacttcatgttgttccccagctatagttaagttgatgagtacatacaatgctgtacgtgaagaaaatgatttacaaaacagggataaaattttaagacggtttgactacgaacagctcaaacaattcatatcaaacattcttgtaagtcattctgaaaaacaagcgttgatcaaaaagcggaagaacagaataaaaacgaaaagcggaattatagaagatgttacatatgctccacaaggttctttgcataaggagactttctacggtaagctaaagcagccacaaaatcaaggcttttcaaagagaaatgtgtacgtaagtcgaagtcctttattgagtaagaatggaagcacagaggcttatctttttgagtctaaggaagctatagaaagggatgtatatgagccaagcaaaaaacaagttcttcgaaataggctggatgttattgctgggctggaagatgagaaaggtaacaaactaaagcccttttcagaaaaggcaatgaggttgtttcctctttatacacctactgccaatgaggataaaacgaaaagtagaaaagggaaatcattaccagttataaaaagtgttaggactcggtaccagaacgcgcggagtgtagtagaaatttctgcaaggaagtacgcagataagggtggaaattttttaatggtgttttatgaaaaggagcagtttgacaagaaggggaaaagacgaaagccagtgaaagatttcagattgctttcgttctgggacgcaaccaaatcaaaacggcaaaacgagaagttgtttagtgatgagattgaagatttaacgctttgtaagcattgtcaatggttaaaaaagggtgacttgatttttttgggtgataaagaagacgagtttgaaaaagtagattggagcgatacgctaatgataagctcaaaactctacagaataaacgaattaggatataatcccactggagagggttatgctgtgataaaggttgaacctcataaaaaaatgaaaacatctaaagataagtacgctgccaatggcaaatttttgaaattatccgaaagcttaaacggaataaaggttcggctgaacattctaggggaaatagaagctaaaggtgaagagtgttttgaataaaacagaagcaccatgatcaaacgcacactctacttcggcaatccagcctatctgaaaactacaaacgagcagatggtaatagaactgcccgaagaaaaaggtgtgagactaatcgccgaaacgaaacacacgcccattgaggacattggtttagtaattctcgatcaccagcagatcaccatcacgcaggcactgatggcaaaactgctggaaaataatgttgctgttataacctgcaatcacactcatcatcccaccggactaatgctaaaccttgatggcaacagtttgcaaagtcaaaagtttaaaacgcaggtagaggcttccgttcctttaaaaaaacaactgtggcagcaaacagtgtctgcaaaaattgccaaccaggctatcctcttgcaacaggagatacgtaaacataacacctcccttcccgtcggagagggtcgggctaaactactggagcgatatgcgcgggaagtgaaaagcggcgatagcggcaatcatgaagcaaaagcagcagcttattattggaaaaacatttttcctgagtttctcagttttacaagacacagagaaggtgatccacccaacaacctgctcaactatggctatgctattctccgtgcgctggtagctcgaaacattgtaggctcgggtttgctgcctacgctcggtatttttcaccgaaaccaatacaatgcttattgccttgcagatgatattatggagccgtatcgtccgtttgtggacaaagtagtgtgcggtattgtgagcatgaatggaaagtttctggacatgacacccagcatgaaaaaagaactgcttggcattcctgcaatggatgtaataatagatggtgaaagaagcccgctaatgaatgccgtgcagcgaacaacagccagtcttgcccgatgctttgaaggaaagacaaaaaagctgttgtatccacaactgcaatgagaatagattcttttcatagtcttcaatacgccccctcgttcggaggaggctggggggaggcacttaacgcctatcgtattatgtgggtgcttgtgatgttcgatttgccaactgaaacaaaaacagacaggaagaactatacacagtttcgaaagaaaatgctggcagacggttttcagatgtttcagttcagtatgtacctgcggcattgcagcagccgtgagaattctgaagtgcatattaaacgtgtaaaaaaaatacttccacccaagggtcatgtaggcattatgtgtattacagataagcagtttggcatgatggaaatttttcggggacaagagcaagtggaagtgccagacacgatacagcagttggaacttttttaaagtaaaccttttccaaagttccaaattttgggaaagttgaatggtaaaagcgtctttaaaataaaaaaacggactggttgttgtccgtttttttaaattcagtaacatggctgaaaccctttgtagtagcgatttttcagcatatctgttgtcaaagacctaagctactgaaaagattgaaagcaaatcacaaccatcggttttgactcttgcaaccgaaatcggttgtcaaagacctaagctactgaaaagattgaaagcaaatcacaacctgtctgcatcgcctatctgtaggaatgcgttgtcaaagacctaagctactgaaaagattgaaagcaaatcacaactactccgttaaccaaggattcgttgaagcagttgtcaaagacctaagctactgaaaagattgaaagcaaatcacaaccaacgctggtgtaacgagcaccatctccaggttgtcaaagacctaagctactgaaaagattgaaagcaaatcacaactttcgttgacaaggggaaaatactggcggagttgtcaaagacctaagctactgaaaagattgaaagcaaatcacaactcatcatcaggtatcagttagccatactggttgtcaaagacctaagctactgaaaagattgaaagcaaatcacaactgcaaactgatggcatataaatgcccgcgtgttgtcaaagacctaagctactgaaaagattgaaagcaaatcacaacaatgtttgtagtatagatgcttgagacgttgttgtcaaagacctaagctactgaaaagattgaaagcaaatcacaacggggaacacatgaatgcgcgaggcatttacgttgtcaaagacctaagctactgaaaagattgaaagcaaatcacaacaactgaataattgttgctgtgttggtagtcgttgtcaaagacctaagctactgaaaagattgaaagcaaatcacaacttgatagggttgagggttgaggattgggggttgtcaaagacctaagctactgaaaagattgaaagcaaatcacaaccggtagccattgcgcttgtgggtagctttgttgtcaaagacctaagctactgaaaagattgaaagcaaatcacaactatgtatctaaaagaggtacaaatttacccgttgtcaaagacctaagctactgaaaagattgaaagcaaatcacaaccgtggtctatagggtcagttatgaaatgacgttgtcaaagacctaagctactgaaaagattgaaagcaaatcacaacgggcgtgacgtagaacagattgccggtatcgttgtcaaagacctaagctactgaaaagattgaaagcaaatcacaacggacgacaacatatacacgttgaagcctgtgttgtcaaagacctaagctactgaaaagattgaaagcaaatcacaacttgtaaccatgaggtgttgttcattccttggttgtcaaagacctaagctactgaaaagattgaaagcaaatcacaacaacaaagcaagtgccttcatagttttaatgttgtcaaagacctaagctactgaaaagattgaaagcaaatcacaacaatagccgcatcttgcgtcaggtgatagcgttgtcaaagacctaagctactgaaaagattgaaagcaaatcacaaccaacacgatggaaggtgcggtatatgatcgttgtcaaagacctaagctactgaaaagattgaaagcaaatcacaacgaccgcagcaccatttcaaattctcttaaagttgtcaaagacctaagctactgaaaagattgaaagcaaatcacaacactcgccatcttcgctatatatctcgccaagttgtcaaagacctaagctactgaaaagattgaaagcaaatcacaacttttgaaaagctatatattgtgcataggttgttgtcaaagaacctaagctactgaaaagattgaaagcaaatcacaactagaagtaaaggctctgtgttccacgtccagttgtcaaagacctaagctactgaaaagattgaaagcaaatcacaacgtttggcactaattttagtgtttcgtttggttgtcaaagacctaagctactgaaaagattgaaagcaaatcacaacccgtttttttgactttcggcacgccagatagttgtcaaagacctaagctactgaaaagattgaaagcaaatcacaaccattcttcggcaatacgccggacgtgagtggttgtcaaagacctaagctactgaaaagattgaaagcaaatcacaacaaattgcatttcccgccgtgaagccgtcaggttgtcaaagacctaagctactgaaaagattgaaagcaaatcacaacatagataaaccaagtgctcatatagagtgggttgtcaaagacctaagctactgaaaagattgaaagcaaatcacaacaatggttgcatatcttcttcccattcgtttgttgtcaaagacctaagctactgaaaagattgaaagcaaatcacaacatcattgtttgtcttcgcgtattcgagagttgtcaaagacctaagctactgaaaagattactggcagagccagtgagagaagttgaaagcaaatcacaacaaggtgaactacgtggttttcactttatcggttgtcaaagacctaagctactgaaaagattactggcagagccggtgagagaagttgaaagcaaatcacaacggatttacggtcctcgttttgacgattaagttttcaaagatccaagctataatgaagacttcatttttgagctttttcagatgtacaaacagggcatttaagacggtttttttcttaaaaaaacaaaagtgttttattgaaaccattttcaatgaaacaccttgcaagccaagaccgtaaagaattacagccatttttgccaactatttttgcccactatgtcgaagcagtcttgcagcttcgttttcatttaggtcatcgaagtaaagtcacatccccttttagcgttattgtttctcctgttgtgcaagctgcttcaatcatatacacgaatacatcggtcggcaggcggtcattcttgaacgttccatcccaaccgagtctttcgtcattgggtggaatatttattgcttcaaaaaccctttgtccccagcgattgtaaatgataaactttttcagaatggcaatgcctttgcctgacgcaaagaaagcatcattatttccatctccatttggggtaaatgtgtttggaatgaacaaggctgagttgtcgcagccaaccgtgatattgatcttgtcggatgcctgacatcccagttcgttggtaaccgtggctacgtatgtgatcgtttcaaggaaagtggctattgggttaaaacaatcagagcaattaaggttgatcggtggtgtccagattatacttgtcgcatttgtggtttgcgcattaagttccatttgcgcacccgcaatcgcatttatgtctgtgccaagatttatagtaggaagcggatgaacaattaccatctgttcaagtgtatccttatagcattcattctctgttattaccaccttataacttgtagttacagccggacgcgctgtaggatttgggatttcattgttgctaagattaatggagggagtccagtaataagcaatgccgcccgatgcaaataagtttgcttcttcgccttcgcaaatctcaatttgttcgcccactgatgtgggtacgcgatttgccaccgtaatacttatatcatcggtgtcggaacagttgtattcattggtgccgacaacagtgtaagaaatgtctgaattaacctgaacgaatggatttgcacaattcgtacaggacaatccggttgggggttgccaataataatttgttgcacctgtagcttgcaattgaacgcttgaacccctacaaagttttttatcatttcctgcattcactatcgggctttggtggtttggaataacaacattggcattcttactacagttatttgcatcggtaacagtaactgaataatttccggcaggtagttgcttaattgtatcagttaattgtccgttactccatgacaagctatatggaggtaatcctccggtgacggaggaatatgcaatgccttctgacattccaatgcaggtaggtttaaatcctgggttcacaattaggtcagaaggttggttaatttgaaccgtatcctttttcgtgcagccattactatccgtaaccgtaactatataacttcctgctgcgagattgctggctgtcgcggtggtttgtacgggtgaagtattccacgagaaagagtagggttgagcaccacccgtaacgctaacagttgcacttccatcattaccgccaaaacatttgcttgcggttacattattcatcgtcacaatgatgggcggagcattatttatggtcacgttggttatagcactgcatccattattgtcggtcacagttacgttgaatgttccctgcgataaacccgtagcattacttacattctgaatcggtgtggtattccatgcgaaaacatggggaggtgtgccgccgttggctattgcatttgccgttccgttgttcaatccaaagcacgtaatgtctgtcttgcccgatatgcttgcaatcagttgggttggttgtgctactgatacatttgcgttagttgtacatcctttactatcggtaatggttgcagtataatttcctgctgaaagattagtagcagttacgcccgtttgaggaggagttgtattccaggaatatgtgtacggaatggtgccgcccgatgcactgattgttgcacttccattacttccaccaaagcacgtggtaccggttgagttgagagatgcagataatatagttggctgaacaatagtgacggaagctgtgtctgtacaacctttgctatcggttgcggttacaatataatttcctgcggacaagcctgttgctacaggtgtattttgagcaggagttgtattccaggaataagagtaacccggcgttcctccgcttactgaagccatagcacttccgttactgccgccattacaacttacattcgttatgcttgctattgttgcagaaagttgcgaaggttgcacaacggaaatatttgcacccgctgtgcagccaagattatctgtaatggttatggagtaatttcctgctgtcaaatttcctgcaacggccgtagtttgaatgggtgtcgtattccatgaataactgtaaggagacataccgcccgaagcagtaactgaagcactgcccgtatttgttccgaagcataaaacaggtgtacttgaaatattagccgttaacgcttgtggctgagtaatgataacagtgtctgtggctatacatcctttagcatcggtaacagtaagaatgtaaatgcctgccgccagattgtttgcgatctgtgtattctgtgcaggcagagtgttccatgtataagtgtaaggtgcggtgcccgctgttacgattgctgatgcacttccgttgtttcctccattacaactaacatttgttgcattgtttattgttacgtttaaaattgtcggttgggcaatgttcacggaggtgctttttatacaaccattgtaatcggtaactgttagtccataaattgttgaaataagattgttgactgctgatgcagtttgcggtggtgaagtattccacaagtaggtgtaaggggatgttccgccagctacactaacagtggcggatccggtgttccctccaaagcaatttacatcactggttttaagtgtgagagaaagactatcgggctgaagtacagttgcaacaatgctatctaagcaacctttattatcagacacaacaacagtgtatgatcccagagaaaggttaaccgccgttgctgtagtctgcaaaggagttgtattccatgtataagaataaggcagcgtaccacctgtagcaaaagctgatgcacttccattgttgcctccgtagcataaaggctggataacggaagaaatacttgcatttagcggcgcagaaggttgaataattgttgtggtatctatggttgtacatccgttgctatctgcaatggttacatagtaagttccagaaaaaagatttgtggcagtaactgttgtttgtgtgggtgaagtattccaggtatagaaataaggtgtagttcctcccgtgggaaaaactgtagcgctaccgcttgcattgccaaagcaatcaacatttgttgcgataaccgaagccactaacgttggtggttgtgcgatgagaacgtgcccagtatctgaacaaccattgctatcagtcacggtgactatataagttccagcagcaagtcctgtagctgcgagagaggtttgctggggcaatgtattccaggcatacgagtaaggagttgtaccacccgacacgcctgtagtagcacttccattgctcccgccgttgcagctaacattggtcgcgctggctatggtcgcatttaatactgtaggctgagtgataactacagtatccaacgctatgcaccctttactgtcagttactgtagctataaaaattcctgcacttaggttagaaattgcagcagttgtttgcaccggaaatgtattccaactgtaagaataaggtggagtaccgccactcgcaatcactgttgcagttgcgttatttcctccaaaacaactcacatttgtatgattgattgttgcaagcacaggcggtggttgcgctatcaaaaccgaagccgtatcggtgcagccattcgcgtcagttacaaaaacattgtaggctcctgctgacagattgtttatgctgtttgtgttttgtatgggtgtggttgtccaggtataagtataaggtaaacgtccttgtgtggcagcaacagaagcgtttccattattgccattgtagcaggaaacattgcccgatgttgcaattgcaattggtccaacttccagttttacagtgtcttttttgatacaattatttccgtcggttactgttagaaaataggttgtgtttacagaaggatttgcggaaggatttgcacaattggtacaacttaaacccgtggaaggtgtccatgaataattgaaagatgttgaagttcctgtagctcctgctctcagttgtatgctgtttccgttacaaacaaaagtgtcgttggtggcttttacattcaggctcgaaacggaaattgtcgtagcaagcgtgtcagggcaaccataacctgtgtaaggtgttagcacaacgaaatattgactcgtgatggcaggcgttgcaacatttacggtttgtcccgttcctacaagtgtatatccggaattgtaccattgataagtttgaaatccaggtggcgctgtaagtgtagtggtgggagcgccggtgcaattcacacttacaatttggaataaactacaattgagatcaagatagccataaccaaaatgcccgctaagatcacaatcaccacttgcaaaatctactgctattgtttttcctccttgcccggaaagatcaatacttgctgttgaccaacttttataataaacctgagagccgaccgtggaaagtgcgaagcctggaagcgaggaagaagaaacatagttgaattgcccgcaggggagagcggcacctgtggctgaatcaaaaacctttacttcaaatcggggctgatccgcagcctgatgatttggattttggagtacaactgcgtagcgataaataagactgtagttattaagaccagacggcacacgcacataatacctagcacgttctgcctgcgcacccgtgctgttatttccaagttttagagagtattgtccaccacccggcgcaacgataggaaatccgccatattgatcgttggtagttccaaaagtcaaagtgtgtcggttgatcatagcgcctaccgataggttaggtgtgctaatagggcagcaagtgccggtgtaaaaaatccaattatttgtattgccctgctcaaagtcaatattaggagggcaagatgtttgagcatttgcaaactgatcgcctaccagcagcactaatagaattgcaaatcgtacaaaaattttctcagttttaaacatgcgcattagaaaacctgacggagtatttttaaaataaatgaacgtttgagtagcaacatgctaccaccacaattacgggagtgacaagaggggtaatgaccaaaatataaataaattaggaaggaacgatacattgttttacctattaggttttgacgatgaccaaaatgacgtaaggagctgaggaaataaacgcacctaccgtctggcacaattttgtgaaaatcataaaaactatgaaatctctttacttcattgttgcaatattttttgcaggaagcacatttgctcaggaggataattcagatcggtcggctatagcgcaggttgtagatacgatcattgaacaagatcagaaaacacctcataaatatcggatgaattactggttcagtgcgggtttatccgttgttgcgactgctgctaatatttatgcgatacccaacatcatcaaagcaaaaccacaacttactgatgaggaaataaattcgctcaacacaaaagtttttaacggctttgatcgctgggcattggagcaagatccgtcaaagc

SEQ ID NO: 2058 - DNA, 17931 bp, synthetic construct
  misc_feature 1..17931: note = Synthetic
  source 1..17931: mol_type = other DNA
atttgattatttcaattcatattcttacatttacaacacaaaaccgcttatttacaattcatcagaacctaaatgtaatctcataatcatctttctaaaccgatcaacatgaaaagtgccaaaagtccgctgatctttattgttgaggataattcagtctataataaacttattgtaaatcatcttcggactcataaactgatccgtacagagagttatctaagcggtgaagagtgtcttcaaaacatcaatcaaaaaccagatatcattattcaggattatctacttgaaggaataaacggactcgaagtgttgatggccaccaaaaaaagatcacccacatctgaatttatttttttatccggtcaggatagtattgaagttgcgatcaattgtatgagatttggtgcttatgattacattgtcaaggatcaatatgcactgataaagctctccgacaggattaacaagatattgatacaccgtgaactgatcaacagcaataagcgatttaaacgaggaataacgctgttttttttcgctctggcaatcatcttactaatttttattgggctttcgattctattccctacaagttttaaatttttataaaaagaatccctgacggggcattgaaccctgtcagggattctttttatttactttttcgctgcaggaagaacagctgacggcagcaatatctgagaatattccagtggtgcatggaagattgataatactcgcttgatctcattgtcgctatccagtgaagagatgattgcccctttctggaagtaatagcgggctactatttcatctttaagcagttccctgatttcatcgctaaattttcccaggtcgacactcagattcaacgttaaccctttctcaagggctgcaaattcattctgtgccccttcataatagcgttcccgcttggccgtttcaataagggtttttagtgtttgctcactcctggattcatacgaaaatttcttttcggcaagaaactgatgaaattcagtataaatatcgtcgccaattacaaatttgtcgggaggtgcaatcgatttatgcttacccgcaaattctgtagcgaaatcgaaaatcatataatcctgaaccagcttataagctaaagtactcaatgtatcctgaacatttcggatatccggggtgacgcctccgccatcctttaccaatcgtccgcttttagttttaaacaccgaagtgagggaatcggggatatgtcccacactaccgtctgcattgcgatgggaataatcgagagcctggatacaacgtccgctcggaatataatattttgctgttgtcaccttcagctttgtgttataactcagatcgcgcgttgtttgaaccaaccccttaccaaaagtgcggtttcccaaaattacggcacggtcaagatcctgaagtgcccccgcaacaatctcggaagccgaagctgaaccgctgtttaccaaaacaaccagcggcataaccgaatcaacgggttgctctgtggcccggtatgtcttatcccattgggagaccttcccctttgtacttactatctcttgtccgtgattcacaaacaggttggtcactttcacggcttcgcctagtaaaccgcccggattaccccgcagatcaagaatcagggaggttgctcctcttttatccctaaggtcgagcattgcgctacgaatattttcagagcacccatcggtaaaactggacaacctgatatacccggttttgccatcaatcatgccgtaataggttaccggatcaatctggatctcttcacgtactatatcgattgtgaacggcttcttctctccgggacgctgcatcttaaccttaaccggctttttggcaggaccctttaaaatttcagatacgtccgagaccaccattttatccaccggtttatcatcaacttccaggaaaatatcacctgccctaagaccgcttttctgcgccggaaatccttcataaggctccgcaacaatgatctgattcctccgtttactgatcattgcaccgattcctgcatactcgcccgttgtcatgaacttaaaatcatccatctccgattccggaataaatacagtataaggatcgagggtttcaagcatttcatcaatcccttttttgatcagcttatcaggctttacttcatcaacatagaagaggtttaattcacgaacaagtgtataaaagatatccatgtttttggaaatctcgaaatttttttgatcacttttaaatccccaaacagatagtccgataatcactgctatcgaaaccccaagtgctgttttcaatattttgttactcattcgatatgaaaccgttaataattagtatgctcctgttgagttgcaaaggtaataattcaggagttattccgctaccgcagatggtccatttggcaccttctgatattttaccttataactgcttaccagctaaccttgccatttaagattagaaggtattcaatgcaacaacggtgtgggttcaaaagtttaacgtatttttatccctcaaataaaaacaggtgaataaagggttagttattcggtcaacaggtagctggtattcggtaaaatcggataccggcgaatttattgattgtcgtattaaggggaagcttcggatgaaagaggttcgtaccaccaaccccgtggcggtgggtgatcgtgttaaatttgagcttcagcatgatgaaacgacaaaagaaggggtaaccggaattatctcagctgttgaaccaagaaaaaactatatcatccgcaaggcttcaaacctttcgcgggagagtcagatcatcgccgcgaatatcgaccaggcattcattgttgtaaccgtgaattaccccgttacccttaccggattcatcgatcgctatcttgtatcggctgaagcctacagaatcccggcatcactggtcttcaacaaacttgatctatataccgaaaaagattacgaaaagctggaggaattcctgcaaacctacgaatcaatcggatacaaatgttatcaggtctcagctgaaaagaatttcaatattggagctcttaaggaggcgattcagggaaaaatcagtctcttctcagggctttcaggagtgggaaaatcgtcaatcctcaattgtatagacccaactctgacgctaaaaacgggaattatatcagaccatcatcagcaggggaagcacaccacaacatttgctgaaatgtttgagatttctgacgggacctttattattgacaccccgggaatcagaggttttggggtaattgatatggcgaaggaggagattgcccactattttcccgaaatattcggattgcttgatcaatgcaggttcttcaactgtacccatacccatgagccgggttgcgctgttaaagccgcggccgaaaagggggaaattccggcatcaagatatgaatcatacctttcgctgataggtgaagacaacggaaagtacagacagggataaacaatccttactttattatcacctctttttcatatatcccgatttgctccttccagttttgaggcatcgtagtaattctgatagactgtatttgaaacatgccccatcatgtcaacatcgctaaaccgtacctgaatcggaatactacttctaaattgcagtttgctttccataattcccttttttccctgcaaatatacgataacccaagcttgcgttgctcttccatgctgatgataacctgaccggaagctccccatgggtaaacctcagtccgaacctgttaaaactgacaaatatcatatttttgaacaaaagaacgactaaacccttttattttcaattattatttttatttttgcgccggaaataaaagtttagaatgattcaaaacaatactttttacttttggtttggttatctcggccttcgtatggggactggacggtaaggtattgtcaagcaaacaatattaaatcaaaaaaaggtctccaaattcggagaccttttttttgtcattaaaaattaattaataacggatgaaacttgcagtaattgggcttgggcttatcggtgggtcgatggcaaaggatttgaggaggagcaaatttgccacagagattattggagttgacagccatccggcaaatgcgcgcgttgccctggagttaggtattactgaccggattgagacgctggaggtagcagtcaaagaggctgatattgtgctggtagcgattcctgtagacaagatcgttcagttacttccgaccattctggatcatatctcctcgtcgacaaccgtaatagatgtcgggtcaacaaaacgtgaaattaccgctgctgtcaaagatcaccctcttcggggtaattttattccgtcgcatccaatgtcaggaaccgaaaacagcggtccgtcagcggccattgaacatctgtttgagaataagatatgcattgtttgtgatcatgaactatgccggcctcaacatctggcactggcagaaaaaatgtaccagtcactgggaatgcctatcgcctacatgtcgagtgatgaacaggatcacaccacggcgtttatttcacatcttccgcacgccacttcgtttgcactggcaaacgcagttctggcaatcgaagatcggaatataatattcgacctggcttccggaggttttcagtctaccgtccgccttgcgaagagttcaccgcagatgtggtcgcctatcttctggcagaatcgcgattatatttacgaggcacttgaggtatatatccgacaccttgaagagttcaaaagatcactcaaaaagaatgatcatgaagggctcaccgcgttgattacaaatgccaacaagatccgtggtgtactcgaaggggagaattcatccctgacaaaaaacgaagaaacaataattaaattttatacaaaataaataaacatgggatcactattagacattaatccgatcagtcactggttgccaaatatagataatccactcttaatcagtggaccttgcagtcttgagtcggaggaacaaacaatggcaaccgcccgggaactcgcaaaagataaacgggttatggtattccgcggaggaatctggaaaccgcgtacccgccccggctcatttgaggggatggggagtattgctttaaaatggcttcagcaagccaaggaggagaccgggttgctaaccggaactgaagtagcaaatgcacagcatgtcgaagagtgtctgaaagccggagtagacgtgatgtggattggagcccgttcaacagcttccccttttgtggtgcaggaaattgccgatgtccttaaaggaaccaaccagattgtgatggttaagaacccggtaaatcccgatgtgcaattatggatcggggctattgagcggcttcatcatgccggattgaagaaccttgtggcgattcatcgtggctttaccccgtttggggagtcaaaataccggaattatccaaactggaaacaagtgattgagctaaggcagttaatgccaaatctgcccatcatctgcgatccgagtcatattgcaggaaaacgggaatacctgttcgaaatttcacaaaaggcttttgaccttggactcgaagggctgatgctcgaatcccatatcgatccctcatgcgcccttagtgacaaagatcagcaggtaacaccagccgaattagggaagatccttgataaactggtgatcagatatgccagctctaacgatcctcagttcgaaaatatgcttgacgtacttcgctcaaggatcgacgggattgaccatgagatcatggaaattctggcctcacgaatggagattgtaaaacagatcggcacttacaagaaagacaataaggtaactgcacttcagatcaaccgatggacccagatcatggaagatcgcctcagcactgcccgtaaactcaacctggatgagacactggttaagttgatattccagctgatccacgaagattctgtgcgcatgcagaccgagatcatggatagggatttatagttaaaatcaatagtgacagtgaccgggtgacctgaagtcacccggtcactatttttaaagtagaagtcagccgattttttttatttcctcatttgctttaaaccgctctattatttttaccatcgctttatcaatctgaacaaagtccagttgctccttcgcaatatagacaatcatcattcccatttgcttcccctccccttcaagcaactggtatagctcatgtttatgaaaccggtatgcttcgcgcattctgcgcttgagcagattacggtcgtgcgcccttttaaaaagccgttttgggacgctgaatacaacctgtgcaggatatggggccaataattcatcgaacttccagactactttaagcggataacagagaaaggaagaaccgttcagaaacagatcaccaatgatcttctgactgcacagtttttcctctttttgaaatgtaaaagcaaccataaactgaagcggacaaaaaagaggttgtcaaaagccatttttacttttgagacaacctctttcagatgaaaatgctaaaatctcctatttattattcttattgaattcaataatatatcgttcgattgccgcaggcattgaaggggcttccggcatcggggcctccacatcgagacgtaaaccggcatccctgacagcctgtgctgtagcgggaccaaatgtggcaatctttgtctcattttgttcaaaatcgggaaaattctgagttaatgattttattcctgccggggtgaaaaaacacaacatatcgtaattcacatcctttaaatcggataaatcgctgctaacggtacggtacatcgtggcctgtgtaaaagggattttggccttttcaagcagggttggaatttcgtccttgtgaacgtccgacaacggaaccaaaaatttatcctccttatgtttcatgagaatatccatcaaatcggctaacttaccatttgcataaaatatctttcgcttgcggtaaacgatatatttctgcagataaaaggcagtagcttccgaaatgcagaagtacttcatactgtcagggatggtcaggcgcagctcctgcgatattctgaaaaaatgatcaatagaggttctgctggtaaaaataacagcagtatgatccagaatagagatcctttccttgcggaaatccttggcaagaacaccctcaacctgaataaactgacgaaaatcaattttcagattgtatttaaccgccaaatcgttgtaaggagagttacccgggtttggctctggttgcgaaactaatattcttctaattttcaaattattcacttttaaatattcatccttctcaaaacccccttatgatgcaattacgagtttgaaaatcaaaagcaacggcagaatttcaagggtacaaaggtacaaaatcaaatagaaaattgaaatgcctttttgatatcccatataaatacttcgtatcactgtggcgatatacattaaaacaatcaggatcgccatcacccaaatggttataaaatttgtaatggggagtatcgcatggatggtaacaacagggagcagaattgcccctaatgacctataatacagtcttatattaaatattaattcttctgtttgatccttcagcatggcaatagaacccaccagccgatgaattaaaatcttgataaaaaaatagaaattaagaactaataataatgcaataaaaaggagtacagaggggtatcctgccagatcaaccttaaaaaactgggcaatctgaaacactgaaaggggtaataccaggtaaaaaatcacgtcaagacgcactgtcccgtacatcattttatagccacgctgacgaaataatcgcatggctgcattaatattcacaagactcgaaaagatctgagccaggtattcgggaaactctaccctgacagaggcaaaaatcatccataagatcagaataaggcccaatacccaatcctgtccggaggcaatgcgctcttttccaaccatcccatagggcgtcagagataccggaacaacggttcgaagggactgcaaaaaagcagaatctgaaatggcgggtaccgttccaaaatagacagtatctcccgctgtagtataatatcccgggttacccgtataaatattcagtccctctttggactggggttcctcagagtacgaattcttcagaaaaacctcttttttaattctgcttttagctgatgcacctccggaaatggttttccgcgtacttttcacccgatggctgtcaccaatactaatttggtcttgctgagatgacaatccactctgtgcctgtaaatcagcaacaaagttagttggaatctcaatctcgaccggcacggtaacaaacatatatcaaacatttttggcgttgcaaagataaaaaataaaggaatgatacatcccgatctcaaaaaggaagagtcaatattgagttattattaaatgacgcgagatcactacctttgcagctatggagaaaaactcaactttcaaaatctactttgctccccttcaggaatcgaccgatcacatctaccgcagtgcgcatgcgaaatatttcgggggtgtggataaatactttgccccctatatcctgcgtcagaacgacggaagtgttaagccctcccacctgcgcgatatcaagcctcaaaacaatgagggatatcggctcattccgcaaatacttgccgggaacgcggccgattttatatttctcgtccgattactggaagagaacgggtatagcgagatcaactggaatcttggatgtccctacccgatggtgaccaataaaggacttggctcaggattgctcccttaccccgaaaagatcaaggcaatacttgaggagtcgctaccacttgttcaaagtacgatatcggttaaaatgagggcaggactccattctatggaggaagtttccccggttattgatgtattgaatgattttccacttaatgaggtgatcctccatccaaggattgccaaacagctttaccggggtgtccctgacgaagaggtgttcgccgaagtatccaaaagggtaaagcacccccttgtttacaacggggatatcgaaacggcagaaaaccatcaccgcttaaccgaccattttagtgacacaacagcgtggatgattggtcgcggaatactgaaaaatccatatcttcctgagcttcttaagacgggaagcctgccagaagataagaagcgggcagaatcgctacgaaattttcatgatgagatccagctcaattattcaaagatcctcaatggcagcagtcatttactgatgaagatggagaaattctggagttatttttgttttgcctttcccgacccacacaaaacctttaaggcgatcaaaaagtcagccaatatgaacaagtatgagctggcggtgaatgagaactttcggaaaatatattaactccgggtgccggagtgtttgaagtgaccgggtgactttcagagcatgaacatagtcacccggtcactctgcttagaatcattattgttagcagattcctcccatttccggaatattttatgtaaatttaaggacctaaaataaagattgattttgaccttaaaccatttacctaaaacttctccattatcccaaaaaccggattctataaaagttggaaagagtgcataacaaccagttatgcagcgaataatcttttgtctgagggaatcggttccctgtttcaggcaaaaaaatacccccgtattgtaagacgagggtggcttaaatgttttcacaacgcattaataattaagatctttaaattaataaatacaaaaaaaagccccgggagagtatccaagggcagggcttaagcgcctaaggaataaatccttgttgtgataagctttcgaattcaaaattaatgaatttttttaaacaaaattacttgttatgaaatttaaattcgttctcggacttgatgtaggtactaactctcttggatggtcattaattaaagaattcgaagatgggagtgttgaaataataaaaactggagttcacatcttcccaataggtacaattgttgatgatgttagtaacaaggaaaaaactagaaatgaacaaagacggggttatagaggtgcaagtagaatgcggtatcgtttcaaacttcgacgggaaaaactaaaactaatccttgagaaactaaacatgctacctgactattcgttctttcataaggcaaaaggaagtggtcagtcatacgaattatataaacttagagctgatgctgtaaatccaaacaaaaagattccacttaaagaaataggtagaattttcatgctgcttaataagtatcgaggatttaaaagcaatgcaattaaattgcagcaagatgatgctgaagcaggagaagtaaaagcgggttatgaaagtctccaaaatttaatagataaaagtggcgcaacaaccattggcgaatactttttcaaaatgcatgaattgggacaaaaatggtatgaggaaaataaatggcataatccaaatgaaccaatcgacgaacgagcattcaatgaaaataatgagtttgtactttttaatagcaatggaataaggaggcatcatggaaggtacactttaagagatatgtatctttcggaatttgataagatttgggataatcagaagaaatattacttgaatatttttactggaagtaaaagagaatatgatgaaatatgccttttaccatatcaaaagagaattgaggaactgaagaaattcaagaatacaaatttttggcatattcgtaattactgtatttactaccaacgatcattaaaatcgcagaaaaaatttgtaaacaactgccaatttgagagaggcaaattcactgcaaataagataaaatatagtgagggtaatattgaaaaaactaaggaaagcaaaacttggtttaaaaaagctaaaaaagtttgtcctaaaagtcatccatattttcaagaatttcgtatttggcaaaaactgcatcagattagatattcatcagtcgctgaagatatctatcgattaccgttaaaaattgaatggattcaagttcttgcgcaagaactaaacgagaattttgaattatttttaaataaaacaggtaaagttaagaatgataataaaatatggttcggaaagatattaagagaaaaaggattaattccaaacgatgaggattactctttctttatagataaatcagatgaaaatttagaaaatgacgaaaagaatgagaatcgaatttctggtaatataacttatgcctcttttttaaaaatattagggagaacaaaatttgagaatatcaaaaatcaaacaataataagaaaagagcaatcaaataaaaatgattatattgagataaatgagagcaaacttttgactttgtggcatcatctttacatagctaaagatgatctttttcaacaagatgagtggctaagatgtattttgactgaaaaaactaaatgggatttaagtttagaacaagcaaatggattaattgaaactggattgcagccagattattgttcatattcctccaaggttcttaaggccattttgcctgaaatgagaaaagggttgaatgaatatgaagccttaaaggctacaaaaaaaggctatattaatgaggataatactgtaggtcagcatgttcaattaaaaacaaaagtcactcagttgaaatatcaggaattgcggaatcctgttgttgaaaggtcattgtcaaagacaataaaaatagtcaatgcaatcgttgaaaagtatcaaaatgaaattgattttgtaaaatttgaaatacgtattgaatcgacaaggcagttgaggaagccaagaaaagaaagagaaaatgagcgttttaacaatagtgtaaaagacaagcttagagagcaatatgcagaatatttgactttaaataaagaacgattgggttttaataaagatatttacaagaatgatcccatcataagaaaatatgaactatggcttgaaatgaatatgaatgaaactgatgaattttttaaaagtgaatttaaggccttttcgagaattacaaaaaaagatgatcgtttaaaacaccagctatggttggaatgtggaagaatctgtccctatacagggaaaacaatcagcttttcaaaatgctttagttctgatattgaaatagaacatataattccactaagtaggagtttggacaattcatttaaaaacaagactctgacttttcagaatataaatgcagaaaaaggtcaattgacatcattggaatacatgcaaaagctaggtggtgatagcctaaaaaatttcaaacaaagaattaagagtaaaaacaattccttcgctgacagtaaaataaagcaattctttgctgaaaaagttgatgacggatttttggaaagtcaattgtcaaatacttcatatattgcgaagtatactcgcacaaaaatgcaggaaatttgtagaaatgtgcagtttacaaatggatcggcaacattcgaactaagaaataatgattggggtttatcaacccttttggataaaattaggtacgaagaagcttttggaattgacatagataacatttatcacaatctttatcaaattaagaaggattttagatcttggcactatcgaaggtatcagacaacagatatcagaattaactggcagaatgcaaaggaagaaccggattttgttgattatcattccgaaacaggtaatgatactctttattttatgactgaaattgagcaatttgaccaatttagaaataaagatggtaaaaaagataggacagatcaccgtcatcatgcaattgacgcatttattactgcctgttgttcaacaaaaataattaaagaactaagtgaatataatgccaataaggaaatcatgcacctagaattcagagataaaataaggagatgttttagttatgatgatttaaaaaacaatattagaacaattttagtaagccacagcgaaaagcagacacttataaaaaagcgaataaataaaataaaaacatcgagtggcgtaaaagaacaaattacttttgctcctcaaggaaaattgcatgaagaatcgttttatgcaaagcataatgacgccactgtcagaagagtagaactattcgataacaaacgaaaagataaagttttgtttgataaaattaacgatttagattataatgttaaaggcattttaaaatggaattacattgaagataaatcgctttatgatattacaaaaagaagaattttaaaactgcaatcaaaagccttttccaaggatgaaatggagaaaaatccgttttatagggtcagcaataaaaatccggaaaccattattagtaaaaaaggtaaacctttaccaatagttaaatcagtaaggaaaagatttaatattgataaatctttaatcaaccttcctgtcaaagatgaaaataaaaaaattctaagtacaaatagatatgctggtaatgttagtaatgcaatacttattttgtatgaaagtatcaataaagacaaaaaaagtcaacctaagaaagctgtaagacattttgaaatcatttccttttttgattttgtgtcaaagaaaaatcctttcagtaaattaaattatgatgatggtaagctctttcttgatgaaaaaaatgaagtgggattaaaaaaggattgccattggctaaaaattggggacattgtacttttgtacattgatgaagatgacaaacaatcattggattggaccaacaatgaattaatcaaagatagactttatattgtaaaaggtctatcatcaagtccagtaattagtaaggggaaaatttatgaatatggttatgttaatctattaaaaacaagaatttcaaaacctggatcttataatagtgaaaaggatattaataaatgtataaaacttaattcatttatgctgtcccacaaaaagttaaatgctattaaattaaaattgaatattttaggtgaaatagaaaagattggtgaagattgctttatttgaaatatacagttaaaaaaaattccgaaaccctcaaacaccagtgcaagaaggtttcgggaacatccgaaagttccatgcaggggtgaaagggagtttcgggaacatccgaaagggtcccgcacactgcaggaaggtttcgggaacacccgaaagtcccaaacactcgttaaagatggtttcgggcgtgcccggcgatgaaaattaaataaatacgttaccgattcataaaatcgttctttgagtattaaccattttaatttaattcgtatgattaacgcgattgatctggcaaaacttcgcaacggcgagtttctgcaatttgggaccaacttctcagggttggtcgaagcaaacaatcctaaaggacttaatgtcgaaacgcaacactcagtttttaaaaccaaaatcggtgagatgggtgaactctttaagatcgagcgggcgagcccgattactcaggaattaatcctccttgacgagcggcgcgaccgggctatcaatggcataaacgctgtaatctcgggctattgctcccattatgtagccgaaaaagcacttgcagcaaacctgctgactaatgatctgctcctcttcggcaccggagtttcccgccagaatcttccatccgaaactgctttaatcaatggaatcgtcaaagactgggagaccaaaccggagcttactgctgcccttgccagccttagtctcacgccatgggttgaagagctaaaaacttcaaaccaattgttcgatcaaaaatatatcgaacggacaaaggaatatggagctgcaaatcccgaaacccttaaagcgaagcgggaagaggccatgattgcctattatgagttaagaaaattccttgaggcctatgctacaattcaaaatactccggaatttattaaaaccattaacgagctcaatgccctgattgatcagtacaatcaacttttaaccagccggataaaggaagcagttactccaccggttgtgaattaacttttaagtgaacgggtgactgtgttcgtgaattgaaagttggaaaaaaaagtgaacgggtgactgtgttcgtgcactgaaagtcggaagaaaaagtgaacgggtgactgtgttcgtgcactgaaagtcggaagaaaaagtgaacgggtgactgtgttcaaacactgaaagtcacccggtcacctaaaaagggaaagatggatcttgagaaggggaatatttatcatatctacaatcaaggcaacaaccgtggaaagacttttttcagaaaggagaattatcgctattttctaaaaaagatcgaaaaccatatctgtcctgttgccgacctgttggcatggtgcctcatgcctaaccattttcatttaataattgcagtgccagctgaaagcagtgaccgggtgactaccagtgaccggttgactccaagtcatccggtcactcttaacagctcattagctatcatgttaagatcctacacccgggcaatcaatatacaggagaaccgttccggatcattattccgggaaagaaccaaagcagaatggctgggaagtattgaaagtgaaaaaatcaaattcgaaaaccgcaataaaacgatgcctcaaacattaacggatttagaggaggaatatctgcacacctgtttcaggtatattcataataatcctgttaaggccggattggttgaaaaggaaacggattgggagttctcttcagcaagggattttacctttttacgagatgaaacaatgatcaatcggaaattatgtgatcaattagggttattctttgaaaagtgaacgggtgagagtgttcgtgcggtgaaagtcacccggtcactttgagacctgccttcgaaaaaatgagcaaacgaacaagtgaccggttgactaaaagcaggaagagaaagatataatttgaatttgagcaatattgaaatagatgaaacttagtgaacgggtgacagtgttcgtgctttaaaagtcacccggtcacttctacataataaataacctacatatgatcaaacgaactctgttttttggcaaccctgcttatctccggttcaaggacgagcagctggtgattacacttccggagggatcagctttacctggaaaggagcagattattacggtccctgttgaggatatcggagtgatcgtgattgaacatccgcagatcacactgacccatttgctgatcagcgcactgcttgaaaataatgttgctattataacctgcgacagccgccatatgccatcggggctgctgctacccctggaggggaatacaacccaacaggagcgcttccgtcaccagattaacgcatcagaaccattgcggaagcagctgtggcaacaaactgtgcggcaaaaaattctgaatcaggctgcagttctgaagtcccagggtggaaaaaccgagaatatgcgatactgggccgaccaggtaaaaagtggcgataccgaaaaccatgaaggccgtgcagctgcatactattggggagagatctttgattcatcgcttgatttcaggcgcgatcgggatgggtttgcccctaacaatctacttaattacggctatgcgattctgcgtgctaccgttgcaaggtcgttggttgcgtccggaatgctcccgacgtttggaatccaccatcataaccggtataacgcttattgtctcgccgatgacatgatggaaccctatcggccttatgtcgatcaacttgtgttacaaatcatcgatgaggatgaaataccggacgaactgactaaagtacacaaggctaaactgcttcaaatccctgttttggatgtgacaataaatgaccgccggagtccgttaatgctggcgacccagcagactgctgcttcgctggccaaatgttttcagggggagctgcgcaaggtggagtttccggagatgaattaacttttagaacatttaaagtgaacgggtgactgggttcatgatttgaaagtcgcccggtcactttaagatcagacttctacatttggagaatgacttaatagtcacccggtcactttaagaccagacttctaaattaactgattgacactgaagtgaccggttgacttaaattataatcttgaagaaagtgaacgggtgactgggttcacgcactgaaagtcacccggtcacttaatgacgatcatggaacgattaagtgaatatcggattatgtgggtaatgatactctttgatcttccgaccgagacgaagaaggagcggaagattgctgcggctttcaggaagcaattactgaaggatgggtttaccatgtttcagttcagcatctacctgcgacattgtccaagtaaggagaacgccgatattcatgttaagagggtcaaacttgagcttcccccgctggggcatgtggggatattgtgcattaccgataaacaattcggggatatggaacttttttacgggaagaaagcaacggagaagaaggggcaggtacagcagctggagcttttttagacccgcttttaaaccatggaacaaaaaaaccggagcaaagtccggttttcttatgctgataacccctcaatttttaattccgatttcaaccttaacaaccacttatactgcatgttgaataggggtatggtgattatcagtaggtcaaagatacaatttgaaagcaaatcacaaccttagtcgtagttaactgtgctgtgccttcggtgattatcagtaggtcaaagatacaatttgaaagcaaatcacaacagcgttaatggcatttatctctttatcactggtgattatcagta

SEQ ID NO: 2059 - DNA, 14425 bp, synthetic construct
  source 1..14425: mol_type = other DNA
  misc_feature 1..14425: note = Synthetic
gtagtaaataagaaaaagtatagatatgcttattaatagaaaaatcaattaaatctaatttaaactcaccaaatgttaaatctgtttttaaattcgccatacgtaacgtatcatggcaacaagtacaataaatcctccattttaaatcctctattattttatttaattttagcgagtctatcaattttgtattatttttattaaacctatttgttttgttaataacaaatgtatcacaacttcttaaataatgaaaaaacataatagaatcatatctattattattaaacttcaaatgccctgaaattatgtgtggttttaaaaataaataatttgagtttttatatatagcagaatcatctatttgaataggattcttgttagaattttgtttggtgttacaacaaaataaaaaaagaaaaagcggtattattgaaaaatatttcatgtatatttatttattatttgcgattttttccactcctccacttttgtaaccaataagcgtttataaagccaatacatcaccttattgcatgttgcaaaattaattattttaagcagataacagatagaaagttgtttttgacgactttcttaataaaactcgttgaaaacgaggactaaaaagaatatatatagcgacatatattgtatataaaagcctataagattggttttctatttgtattaaaaacatccactactataatatcatttttataaatttgataaataactacataagggaacttaggtaagcaaatatccctataaatattttgtgaagcaatataactataatattgaggatgttcaccaatctttttgtaaacgtgttccaattcaattaaaaattgttctcctaatcctgaaagttgattttcataataaagataggtttcaaaagcatgaagttctgcaatttcagtaacaatgacattataaatcatttattactaatttgctttctaatacgttccatagattcattcattggaaatcctttaatttttcctgcaaaataaccgttacttgttgccctaaaagaatttaatgtcgcttcattatacaaagcagttctatcttcaacctcattctctactaaagtatatatagtattattttttttttcagttgcttgatctatatactcatgcattttttctctatttaatctttcagtcatttgttttattttcattctgaagaaaatatactagtgaaattaacaccaaaacaaagttacaacaaaattgtataaaaatatttttttacttttttacccttttacatgttaaatactacttataggcgtttataaagcctaaatatcgcattattagatgttacaaaattaattattttaattattttatttatcttcactataatcatattctttataaaaaacataattaccattgttgtcttttctatatactttaaaaatagaggtgccggcaggcttagacaccgaatcccctattaacattttgtatccactaggagcatgaatatatatataatttccgtcagcaaaaacaaatttgatagatctcttcatccaatcatctgattttattaccactgaatttatctttgtttgattgaaatgtttcaaataaatcttaacatcaacattatatacaataaagcacaacaacgaaattgaggcaattattatatttattattttatcactcatatactttttttgctattttaagattagtgtagtaattccactggtcagcgtttataatgcgtaagctacccataggcatttgtatctccccacaaatcacgttgttctatggtgcaaaattaattattttaattatattactgagatacatacaagaagtcatttctttatcaatacttctgcaataactattataacatccttattccgtataaaatgagcttcaatgcaattgtaatatgaagtttcagttcataaagaacaagtgtgtatagtaaatataagtaattatttttgtgttttatgattattttatactaatttcgctactttgattatatttacagcgacaactgaaggcaacatcttatgttaaaaaaaatattctctattttacttgttttggtagtattttctgcctattttttctcatgtaaaaaatatccaccaaccacaagcgatccaacccgtaattttttcccattaagatttggtcaatacgtaacttacgatgtagattctatttattatttggatagttgccagcaatatgaaataaaatcgcagctaaaatatgtaattacagatacaacaagagacaaaaatgattctgtaatctatattcttaatgtttttacacgtcaatacgatggtgatatttggcaatctcaaggttataatgttgccttaaccgttcgtgcaaatgctgatagtatttgtgttacccaagatggaaatacctacacaaaaatgaaattccctgttaccgaaggctataattgggcaggcaactatgtagtacaataccaaatacctacaaatgcttacttgcaaggatggaattatcagtaccaaaaattacatctgccttttaatgataatctacataactatcaaaatacggttaccgttcttgaagacgatgaagctgtaaattacccaagtgtagattctgctgtgccggcataccgcacttatgctaaagaggtatatgcatataatataggtatgatttataaagaatggacacactggacttatagccccaattcatcgaaatgcgtgaagggctatacagttattatgcgtgcagttgaccacaattaattttatgtgccttagaattgctgttttttttgcttttgtaaccttactatttgcaggaacagcaaatgctcgccagtttgcatatagggtaaattttaccgacaaaaacagtacaacatttcgcttagatagtccattgtcatatctttcagcgagggctgtactaagacgcactacccaaagtattaccatagacagtacagatattcctgtaaataaatggtatatagatagcgttttggttcttacaggcggtaagctacatgaggcttctcgatggttaaatatgtgtattatattaataagcgattctaccttaattcatgctttagataccatttcatttgttaccggatatagttttgaagcctactattccggtatcttgcataaaactacacccaaaaaagttgagaaattaactaatgtaaataacgccgaacgtgtaaccagtggtgatgccgcctattataatcttacatgggcacaaacaaatatggtgaatggaaactatttgcatgatttaggttataaaggtgcaggtaaaattattgctgtttttgatgccggtttttcttataccgatacgcatatcggcttcgacagtttaagggcatcgggcagaataatagatgaacataactttgttttagatacctcttatatttatgcttacgacccacatggcaccgaagtattgagtacgatggcaggctatgttcccaatacttttgtaggctcggcaccattggctatgtatgcactttatatatctgaagacgataataccgagcagccaatagaaatgattaacatgctttgtgcagcagaacgtgcagacagtattggtgcagatattattaccgaatcattaggatatgatttgtttgataaccctacattcggattgaattacagcacggatttagacggcaagaccactgttgcggcaattgcagctaataaggcaacccaaaaaggcttattatgggtggcaacagccggcaacgatggtacaggataccttacttggggcaatcatattttaacgcccggtgatgctgatagtgcattaacaatcggttcggtggaacctacgggtattattgccgcaagtagtgggtatggacccaatgctgccgggcaactaaaacccgatgtttgcacacaaggacaacctgcaaccgtttttagtacaacagattacaactctgctgacggtacatcgttttctacaccgcaaatagcaggctgggctgcttgtttatgggaaggttgccctaatgcgaaaccctatcaattaaaacaagcaataagacagtgtgccaataaatttacaactcccgataatcaatatggttatggtattcctaattttcaatgtgtatcgcaactgctatctgttaaagatacccctaacccggagcaaataaataattggattactaccctacaaaatccgtttacggttacattaaaccttagcattgttgcaggagtatctgagaatatccatttcgaaattatggatgctattggtaaatctgttgtatctatggataactattttgttaccggttactatttacctttttcaataaatacctcctatttcccatcaggtatttattttttaaaggctacctcatcaaaacaacaaaaggttataaaattattgaaattataatattacaaggggtccacatcaaatacaattgatacgttagaattacctcttgcacccagtaataagcttttttgagattttaaaaaggattttaaattatctaacaacttattatcacgctgtgcttttacccaaatttcgtgtatatattgatttcttacccttgataccaatgccggacaaggcccttgcactacaatattgccattgaatgttaacaatgcatcagccatcattttggctacagccactgctttagcgtcatcttgatgtttaaagattatttttataagcctgctgaatggtggataagcaaaatgttctctatattgaatttcctgtatataaaatgaatgcacatcatggttttttacccattgcaataccggatggtttagattatatacctgaataaataccctacccttaccatcaacacgacctgcacgaccgctaacttgttccataagctggaaggctcgttcattaactctgaaatcaggatagctgaataaggtatcggcacttaaaatacctaccagacttactgatgcaaaatctaaacctttaacaaccatttgagtaccaaccaatatatctattttattattttcaagtttttcaagtagttctgccatactgttttttcctctcatgctgtccacatccattctagcaattctggcattggggaaaatttgttgtacctcttcttctatcttttccgtaccaaagcttttacttatcattttgctgccaccacaacgcaagcaggtatgaataatagccgtttttaaaccacaataatggcaatgcaagcggtcggaacttttatgataggtaagcgaaacagaacagtttttgcattgtggaacccaaccgcaagaggtacatagttgaaacggtgcatagcctcttctattttgaaaaaggataatttgcttccggttttgcatggcttccagcatggcttgctgcaactctggtgttataagctttacacccaatggttttaccgtatctaacgatttggcatttataatctctatttccggcatgttaacaccctgatacctgtcttttaagggtatgtatgcatacttgccttgctgcacattatacaatgtttcaacggaaggtgtggcagaaccaagtattacttttgctttatataaagacgatagatagattgcagcatctctggcatgaaatctgggtgccgggtctttctgcttatacgagctgtcgtgttcttcgtctgcaattattaagcctaaattggtaaatggcagccaaagtgccgaccttgtaccggctactactttatatatgccttttcttactttctcccatatttctacccgctcattattactgaaatgggaatgatacacacccaagctatctccaaaataagcatataagcggcctactaactgggtggtaagccctatttcgggtaccattaaaattgcttgtttgcctgctgctacacactctctaagtttttctatgtatataagtgttttaccactaccggtaacaccgtgcaacaaagcaacgtttttatctataagcaaggtattaagttgcagataggcgtcttgttgagcggtgcttaattttacatctttaagttcttttatattgcgtggtactattctatctacattcacttcttctataataaagacccctttgtcaaccatagcttttagttgtgtacttgtggcatctattcgttctaataattgagcctgacgcacaatacccttgtttttaatggataattcggtatatgccattaaaatctcaatttgtttgggggctcgttttagctgctcgtacagtaattgaagctcgttttggttagtatatttactttcaagtgttactatcttttcttttcgtgggcgataggtgtgctctaaagcatcgtttattcttactgcttcattttcaagtaattcgttaagtacgggggcaaaatgacggataccgactatggtgcgtaagtcgctcattgaaatttcctttttcatttgcaatgcctctgctgccaaataaccttcgtctgtccagttgaatactgcattttcatcggctatccatagcaggcttgtttctgctattaatttgaggtgtgccggtaaggctgcttgcagtacttcgcccggggctgccatatagtaattgcctacccatgcccaaaactgtaaatgcagctcgcttactatagggttggcatctattatgtttttaatgggtttaacaatataggtttcgggcttatggtaatgcaaagccgctaccacgcccgaatattgtttgttattacccaatgctacctctacccgcatacccggttttaacagtgcctgcatttcggtaggcacaccataggtaagcatttgcggtaggtttagcggcaaaataatatctgcatacataatttacaagctgcaagttaagcaattgcggtgtattgttgggttgggtgtttgaacttggtatggggttagatatgtgatataataaaaatatattacatattgtgcattatatagtttggtttaggagatatgtaaatagtaacccgtttatttctaaaaaaataatgggcagtttattttttgtattttattgataatgaggtacttgtaaaaataaaactgctcattaattgcccgtttgtgtttcaaagtgagttatttggttttgtaatgtattttgttttagtgtgtaaggtattttattttagaatagcattttgatatttaattgcacctaaatatggtgtttttggggtgtttttattgttgggtaagggtttggtggttgggtgtttttgtgtgattttgtttgattttgtctgaaccatgatttgtttgattttcttgattagcttgactgtgaaagtgaaggacgcttgcatatttttggttttcagaacctcgctgtaaccggctgaaattatcttatttataagcactatactgataagaaaaagcgaggagttgcctccccgctttagatgttttcacaatggaataatccttattgtaaatagcttaaaaatgaaatttctttttattaatgaaaatttatacattgtgaaagaaaaaaagccccgggaaaaccaagggcagggcttagtcgcctaaggaataatccttgttgtgataagctttcacaacaaaagtaatatttataaaccaaaaaacaaactaatgaaatttaaacacattattggtctcgacataggcacaaattcactcggttggtcctttattaaagaatacgaaaccggtaaagttgaaattattaaatcaggtgtacacattttcccaattggaacaattgtagatgagaaaagcaataaagaaaaaacaaaaaatgaacaacgacgtgggtacagaggggcgaataggcttaggtatcgttttaaacttagacgcaaaaatttaaaaaacagattagcccttttaggtatgttacctgattacgaaaaactgtataaaccttttagtaagcaagggaaaagagagaaaataaactacgaacgggggcagtcttatcaaacatataaattaagggcagatgcaattaacccaaaaataaaaataccgttagaagaaataggaagaatattcatgcttttaaataaatacaggggcttcaaaagtaatgcaaaaaatattattgaaaaagataaagaaactggagaagttaaaaaagatattgaaagtctacaaaagtttattttagattgcggggcaaaaacaattggtgagtatttcttcaaaatgcatgagaaagcaaaacaactttacgatgcaaataaatggcacaattttaacgaaccaatagatgaaagggcatataacgacattagtaaagagcttgttttatttaatagcaatggaataaggaggcatcacggtagatatacattgcgtgaaatgtatcttttggaatttgataaaatatgggaagctcaaaagaatcattacccagaaatattaaccggaagcaaaaaagaatatgatgaaattttaagcctaccttatagtgaaaggattttagcattaaaaaagtttaaggataccaactattggcatatacgtgaatattgcatatattaccaaagaccacttaaatctcaaaaaaaatttgtttctaattgccaatttgaaagaggaaaatttgaaataataaaacattctgtaattgaaaatgatttagaaaaaattaaagaaaaaagaatttggaaaaagaaagctaaaaaaacttgtcctaaaagccacccccttttccaggaatttagaatatggcaaaaattacatcaaataaattattcatcaaatgaattagatgttttcaataaaccgttagaaacaaattggatactcgttttggcagaagtattaatgcaaaattttaaagtctttttaaaaggtactgcaaaagtaaaaagagacaaagaactatattttgggaaaatactacaagatgccggcttacttaaaaatggagatgaaccatctttttatatagataaatctgatgaagatgttgacggggatgatgcaaatgaaaacaaaatagatggtaatattacctatgcttcttttaaagaagctttaggtatagatacatttaaaaaaataaaaaatgaatttatttacagaactgagcaagttaataaattaaactataatgtgattgaagaaagtaaactttttttattatggaatactatatatcaggcaaaagatggtctttttaaagaagacgattggctaaaatctattttaactgaaaaaacaaagtggaattttacagagttacaagctcaaaaacttattgaaaacggtttacaagcggattattgctcgtattcaagtaaggtattaaaggccattttaccacatatgcgaaatggactgaacgaacatgaagcactaaaagctacaggtttaaactatataaatgaagataatacggtaggggtaaaagttcaattaaaggataaaatatctcagttaaactatcaggaattgcgaaacccagttgtagaacgagctttgtccaaatcaataaaattagtaaatgcactattagagaaatataaaaatgaaattgacaaagaacattttgaaataagaattgaatctacaagacaattaaaaaaaccaagacaagagagggaaactgaaagaagaaaaaatgctgataaagatagattgagacagcaatatgccgactatttgacaaaaaacaaagagaggttaggctttaaaaatgtcatttcaaaatatgattcaatagtaggcaaatatgaattatggctacaaatgaatatgaatgaggaagacgaggtattcataaacgagttcaaagcattttcaaaaatcacaaaagagcaggataaattaaagcacaagttatggctggagtgcggtagaatgtgtccatatacagggcgaattattaattttacggattgctttagctcagaggttgaaatagagcatatcattcctttaagtagaagccttgacgattcatttaacaataagacgctcacatatagaaatacaaatgcagaaaaaggcagcatgaccccatatgaatatcttaaaaagaaaagcgcaaatgatttaaaagcatttaaggcaagaattaaaaatgaaaaaggcaatgcattttcagacagcaaaaaagagttattcttagcagaaaatattagtgctgatttttcaagcaatcagattagtaatacttcatacattgcaaaatacacaagaacgaaaatgcaagaagtatgcaaaaatgtacaatttacaaatgggtctgcaacatctcaattaagaaactatgattgggaaatatcaaatctattagataaaatcaggtatgatgaagataataaaactgatattgatttagatttgcaaacataccatagaataaaaaaagactttaaacaatggcatgacaataaatataaatcaactgatattagaattgactggaaaaatcttaaagaatatgacccattaaaacaatacattactgaaactaataatgatttactctattgggaactagaaattcaaaaatttgctgactttagaaacaaatttggcaaaaaagacagaagcgatcaccgccaccatgctgttgatgcgtttattactgcttgttgctctcaaaagaaaattaaagaattgagtacttataatgcaatcagagaaaaacaacatttaagagatcgtgaaaaaattgaaaaaccttttgattacaaagatttaaaagatagcatttcaaacatcttagttagccataccgaaaaacaaacattaattaaaaaaaggaaaaatagaataaaaacaaaagatggaattaaagagcattttacttatgcgccacaaggctccctacataaagaaactttttatggaaagttaaaaagacctatagaccaagggtatgacaaaaaaaacgtttttgtaagtagaagtcttttaatgaacaaaaatggaagtgcggaatcttatgaatttatgaatactactgaattagagaaaatatatgaaaagaatcagaaaaaaactttagcgaatagatttgattttatcaacggtaaaactgacgagaaaggcaatgagctaaaaccattttcagaaaaatcaatgaaagaatttccgattttttcatatacaccaaatgtggataaaacaaaaagtataaaagggaagccgttacctattataaagagtataagaactaaatataaaaatgaaaggagtgttattgaaatttccaataatcgatttgccgataatgatagtaattttattatggttttatatgaaaaaacacaaacagataaaaaaggaaataagaaaaaaccactacgtgattttaaattgatttcattttgggatgcaaataaaagcaaaagagaaaatgaaaaaatgtttaacgatgagattggtgatattggattaaattatgactgtcaatggcttaaaaagggagatataatttatttaggagatgaagaaattaatttagacgatagcatttttcttagttcaaaattatatagagtaaatgaacttggatataatcctactggcgatgggtatgcagttatcaaattagagcctcacaaacaaatgaagacctctaaagacaaatatgcttcgataggcaagtttttaaaactatccgaaagtttgaacgcaataaaaattcgtttaagcatacttggcgaaatcgaagctgtcggtgaagattgtttttaaaaacggttaaagccctcgccgtaagatttgcaatcaaacgcagtatctttaaccgtttttattgatacaaaggtataacaatattttgtaaatacaaaataggtttaggaattctattttgcggattgctgtatcggcaggagtttccgcgaagggcggaatgacgaccttgattgggcaaaccggaggataaaatcagtttaagacagatggttaaaacaactgatttcctgtaattttattggcacacattttgatgttgttaatttaacaaaatctgtgttttatgattaaacgtacgctctattttggcaaccctgcctatttaagccttggtaatgcccaaatggtggtgcgctaccccgaaattgagaaacaagatttactttctgccgattttaaaaaaacgaccggtgcaagtattccggttgaggatattggcattgtggtgcttgacaatcaacaactaactataacgcagggcttgcttggggctttgatggataataatgttgctgtaattaattgcgacaaaacacaccacccttcggggttgctgatgccacttagtggcaacacgatacaaaatgagcgttttagggcacaacttgatgcgagcgaacctttaaaaaaacaattatgggggcaaacaattacccaaaaaatacgcaaccagtgtgcggtgttgcaatgcaggggtatagaccacagctatctggtgccgctgtataaaaatgtgcgcagtggcgatacggataatagtgaggctacggcagcggcatattattgggggcgactgtttgagggtattgagcattttaaacgggagcgggacggcaatgcacccaatagttacttgaattacggttatgcactgttgcgggcaactatggcacggagtattgtgggggcgggcttgctgccaaccttgggcatacaccaccaaaaccgctataatgcttattgccttgctgatgacttgatggaaccgtataggccgtttgtggacagggtggtttgcgaactaatagatacgcatgggctaaaggacgatatgccaaaggagctaaaagccattttattgaagataccggctatggatgtggtgctggacggtgaaaagagcccattgatggtggctatgcaacggacggctgtgagtttggtaaaatgttttgagggggaacaaaagaaattgctttatcctgaaatgatataacatgaatacggaccgcttaaacgcttacagggttatgtggacacttgtaatgtatgacttgccaacggagaccaagcaagaacgcaaggttgccgccaagtttcgaaaagatttgctgaaagacgggttcagcatgtttcagtttagtatgtatgtgcggcatagtgcgagtgccgaaaatgccgatgtgcataaaagacgtgtaaaaaaaagcctgccggagcttggcaaaataggtattttacaaattacagacaaacagtttgggcaaatggaggttttttacggcactaaagcacaagaattgccggtagggccacagcaaatggaattgttttgaaataaaaaaatcagggtttgaccctgatttttttgcaaagaccgaccgattttttaattgttaaaacaggctgaaaacctttactgcggctgttttaataccaaccagttgtttatcaatcggtcaaagatacgttttgaaagcaaatcacaacatgttcgtttttctttccaatgctgccggcgttgtttatcaatcggtcaaagatacgttttgaaagcaaatcacaactattacttcgcagtcttatgttatctgccggttgtttatcaatcggtcaaagatacgttttgaaagcaaatcacaacataaagggaatgttcctattcctgtagcaggttgtttatcaatcggtcaaagatacgttttgaaagcaaatcacaactatctaaacaagatatttttgcagacccaagttgtttatcaatcggtcaaagatacgttttgaaagcaaatcacaaccaataacaggtctccatattttggaatttgttgtttatcaatcggtcaaagatacgttttgaaagcaaatcacaacgagcgtcttaaagacctaaacctatagaatgttgtttatcaatcggtcaaagatacgttttgaaagcaaatcacaacggtagaaaaccaataagtaattgtcttaaggttgtttatcaatcggtcaaagatacgttttgaaagcaaatcacaacgctactgtgcattgtcccgcatcttgtgcgttgtttatcaatcggtcaaagatacgttttgaaagcaaatcacaactaataccagtgccggtaatgtagtgcttacgttgtttatcaatcggtcaaagatacgttttgaaagcaaatcacaaccggtaacgatggcgataataatactacaccgttgtttatcaatcggtcaaagatacgttttgaaagcaaatcacaactattacaaaggtagcacacttagcggagcagttgtttatcaatcggtcaaagatacgttttgaaagcaaatcacaactctactacttcttcttcttcctcttcctgagttgtttatcaatcggtca

SEQ ID NO: 2060 - DNA, 5181 bp, synthetic construct
  misc_feature 1..5181: note = Synthetic
  source 1..5181: mol_type = other DNA
cgtaggcaccgaagttggacggttagaaaccctctaccatctgctgcgcgcaaagagtcgtatggcggtttcggtgtaacgtggtgtctggagttgggccaccggcggtcttacggattaatccacacgacattctgctcactgctggagggtaggtagatcccgcaacaaggacaaaaaaaggcggggtgctcctcagagcagagcccgcgaagtctgattcttgctacgaaatgacaagtgatcagtgatttgttacctaacggctatttacgttgtcatttttcttatgtcaacttaacatttcaccaccacttgcgttatgaactataccctcggcctagacttaggcgttacatccattggttgggcagttgtctcggaggaagattcctttctcgacaccggcgttcgaatcttccctgctggaattgacaactttgatacttcaaatgagcagtcaaccaatgtccagcgacgcgaggcgcgcagtgcgcgccggagaattaaaagacgggcacagcgaagacagcttcttagagaaaatctcacggccctgggttggattccctctagcaagcacgcgctagacgaacaagcgatagcggattgggaagctctggatccctacgctctacgtcacagggcgctcactgaaaagatttccttggcagaacttggacggatttttctccaccttaaccaacgaagggggttcctttcactacggaaatcagacgaaaccgccgctgacaaagaagaacagggtattctcgctgagatgtcttcgcttgaaactgccatccaagactctggtcatcagacgctcggtagctatctataccatgtcagggaagccgatctagccgaacacaacggttctcccttcgtgagaatcagagggtctcacctccgaaggagtcttattcacgcagaatttgatgccatatggaaacaacaggctcttcatcatccagaagttctcaccgataccctgcggtttgggcaggcaggacaaagatctgcgccgatttccgtagtcactcctgaaagaaggcagaagggagtgacccttctcgaacaatttggcttcgaaaatcttctcttttttcagcgcagagtctactggcctgaggcatcgattggtatttgtgaattggaaggtcacgtcctttttgagcagcttcgagctgaagataaactaggaccggacttcaatgattatcgcaaagaacttgagagcggcatcaggaggtctcccatcgatgatcggcggtttcaggaattccggatgctctgtgagatcaataatctaaaactcactgactattccacaagtgtgccagaaagccgtcccttggcacctgccgagagaaccattgtcgaggactattgccgatccgttgcaaagcctagctttaaaatgatcaagaagcgcctgatcaaacacgtcgggcttcaaagcgtagatcagatctccctcaatcttgaagaaggtgggcgaaaggagatttctgggcttcatacggatgctcttctttctggaaagaaaggaatggggaagcgctggcacgaaatccctgaagagactaagaaccaaatcgtggagtatctctgcaatcccacggcaacggatgaggaactcactcagcgtctctttgcaactggtgcgctctcccgcgacgaagttttctccctctctaagtgctctctaggaaccaaccatggaaacctctgtatccgagcactagagaagcttcttccccacctccggaaaggcatgatttacatggcgaagggagagggggacagcagcgcacttcacgctgctggctaccagagaagggacgaacacgagaatgacgaacacgatcttcttccacgattcgacgacccgctccttccttacgcgaaacaagttaacagccccatcgtaaaacgggcgatgacggaactacgtaaagtggtcaatgggctgatcaagaaatatggaaagcccgccaggatccatgtggaaatggcccgctctcttaagatgtccccgactcaaagacaggattacaataagagaacacgatccttggaggagaaacggaagaaggcggcaaaagaaatcaccaatctgcgatttcttccaacccgtgatgctattgaacgtttactcctttgggaacagcaggacagggtctgcgcgtactctcttaagccggttagcatctccaagctttttagcggagatgtcgatatcgaccacatcctaccaataaagcggagtggagataatagctttaacaataaggtcgtgtgctttcgttccgagaatgctgcaaaagataatcagacgccctacgaatggctaagatcagatcaagataggtatgacaaggtgatccaattcgcctatcgccatctgagagaggggggcaaatctaaaaagatcgtcttaaaagagattccagaaggcttcatcgcgagggatctcaatgacactgcttggatggcaaaggcttgccgccaatatctcacctgcctcttcccttctgataagagtcatttggttcaaggcacgaagggctcccatacctctgtgatccgagatatgtgggaactcaatgggctccttcggtctgatgggttaaacctgaagactagagatgatcatcgtcatcatgccatcgacgcggtgatcattgctttgactacgcaggctcgtattcagcacgtggtcaaaactcagcgcttcgaaaccgtcatcacggatgccagagaagaaggcatgaagcgatacgttcttaagcggaggatcgaacacgaagaattcccttgggaaggttttagggacgatctcaagaaaagcctagcccaaatttttgtgtctttccgaccacgaaagaaggtttctggcgctcttcataaagagacgttctatgggaaaacttcggaaggtctcctcaccgcccgaaaggaggttaaatctcttaccgcaaaggatctcaagaacattcgggatcccttcatttctaagcttatccagggccaccttgaaagtgggaagacactcgaagatgaccttttgttacctaatggaacgcccgttaggaaggtgaagattttgataaagcaggctcatctaaccctaagagaaaatacccgtcacgaaatgcacgtatggtcagacggcacccaccacgcagcaattttttctttgggaggtgggaaatgccatgttcaacccgtaagccttatggaagcagcggagcgaaagcgcaggggcgagcccattgtccaaaagacaaataaggacttaccgccggaatcggaatttatgtgtagcctatccaagggcgacactattctttgcgaaaaagagggaagagaagagcttttcgtatattcagacatgcctagtaccactctgcaaatgcgttttaggcagcaatatgatgcgagaaaaggcaaaaaggatgaacaaacagggaagacactactcgttacagctaagccaggtactcttctcaagaacttcccaaacttccaaaaggtgaacgtgctcccgacgggcgagattcggcgtacgcaatagaggtgctatgattaaacacactttggaaatcgcggagcggccggcctccgtctatctccggaatcaacaactcgttatcgagagtggagaaggggaggataagataaggcgcagctttgcttgcgaagatatcggtgttcttattctccagcacccaggtattttcttgtcgagtgcagtcgccatggaactcctcaaaaatggctctgccattctcttttctgacgcaaaacatctgccagctggactccttcttcctacgacgatgcactcagaactggttcctcgaatgcaggcacagatttcagcgtctgaacccacaaggaagcggatgtggaaggccgtagttgaggcaaaaatcagagaacagagagtccaccttaccgagaggaatgcgacccacgatagccttccacgattactacgtctcgaacaatccgtgcgctctggcgatcctgaaaatcatgaagcgcaagctgctcgaatctactggagcgcctgttttcctcagcaatatgcagagggcgatcggcgactgcctgaaggcacatctctcttcaatgccctgttaaattacggctatgctattatcagggcagcggttgcgagagcactcgttgcttcagggttacaacccgctttgggcgtcttccattcacggcgggataacccattctgcctcgctgatgaccttatggaacccttacgccctctcgtcgacagggtggtcgctaagatcctagagaatgagagcaattcttctgagcgcctagagcgccgtcaccgccagccattgcttcaactcttagcgtcagaagtgagtattcattcctttcgggggccactgatggtcgccctttcccgttacacctctggattccaaaaatgtctcgtcgataaagacgcacccttcgattaccccaagctcctctcatgcacatcagcggatatcaatgcatgtggatgattgtcttattcgatctgcctaccgatacggacaaggcaaagcgggactacaccctgttccggaagtcactgctcaaagacggtttcgccatgatgcagtattctgtgtattttcgtcactgtgcgagcagggagaatatggctgttcatcgtaagcgtgtggaacaagttcttccacctgatggtgaggttcgtattctcgaaatgaccgacaaacagttcgagcaaatgaccattttttatggaaaacggcgtactaaaacagaagaaccaccggcccagcttgaatttttctagcaaaaaagaagcccaagccgttccatttaaacgacttgggctgaggagaaggtaacaaatcactgaccacggtcaatccgcagcagatgagcattaccacagaacagaacagccaaggtaacaaatcactgaccacggtcaatccgcagctcaaaaagcgaagagttgcagcacctttcaaaggtaacaaatcactgaccacggtcaatccgcagcggcggactctcaacggggatcggctggcggaaggtaacaaatcactgaccacggtcaatccgcagcagtgtcggggtcgaatgtcgggattccgcgaaggtaacaaatcactgaccacg

SEQ ID NO: 2061 - DNA, 11379 bp, synthetic construct
  source 1..11379: mol_type = other DNA
  misc_feature 1..11379: note = Synthetic
agccatcgccgcaaccgagaaccgctcgcacgcccgttggcgcgccgcggctccgatccgccgccgcacggcctcatcgcgccaaagccgcgttatcgcggccgcgagcgccggcgcatcggcaggcgggaccagcacgccgctgacaccgtcctcgatggcgtccacgacgccacccgaggcgctcgcgattaccgtcagccccgacgccatcgcctcgagcatcgcaaccccgaggccctccttaagcgagggaaacacgaacaagtccagcgcttcaagcagcggttgcgagtcttctacctgcccgagcattcgcacccgcgccgagatgccatgccgttcggcgaccctggcaagctcctcccggagcgagccgcttcccgcgacaaggcataccatgcgctccatcgcggactccgcgccgagggccgcaatcgcttcgagcaggtagcgatggccctttcgttcttcgagcgcgccaaccgtgccgacagcgaattctccgggcgcaatagagaatcgcgcgcgcgcggcggatctttgcgcgggcgtgggcggacgaaaccgctcgcaatcgacgcccgatgagatgatcaccagacgctcgggcttcacgcccgccgcttccagcgcccgcgcgaccggagccgagatggcggcgacggcgtcaaccgcgcgattgtagagatacggtgcgaccagccgatttggctggtaatccatccgccgggtgacgattgttgcgcgcgccatcccaccaaccgccggcgccatcgaatgtgcgcgcgaggtatgaaaatggacgatatcgtaccgacctcgcgcgacgagcgcgcgcaagcgcagcgcggcggggatatcgattgcgtttcggattgcgagcggccagcataccacaccgcttgccctggcacgcgcgtaaagctcaccgcgcgggtcgcaggcaagctcggcgcgatgccccgcgcggagcagttcaagcgtaagccccaggacctgcgtctcgccgccggcaaatccaagctcgggatcaacgccgagcacactgagcgggcgttcgccacgcttgaccgcgcgcgagccgtcggaaccttcgtcttcctttgcgccgccgcttctttcgagcatcgtggttcaggcccgcttcaatcgagaaaccggtaatagaggattgcgaagagcgcgctcaccgcgtcgcgccatccgatcttcttcccttcctcgtaggtgcgtccggaataggaaattggcacctcgtagatgcgccatcgcgcgcgcgccgccttgctcgtgatctccggttcgaacgtgaagcggttggcgctcaattttatctccatgagcctttcccgcaggaacgccttcatcccggtttccatgtcgctcaggttgaggtcgcttatcatgttggagacaagcgttatgagccggttgccgaggtaatgccagaaaaagagtacgcgatgcggtccgccgagaaagcgggacccgtataccatgtctgcacgcccgtcgagcagcggttcgatgacgcgcgcgtaatcttttggatcgtattcgaggtctgcgtcctggacaaagacatagggattgctggcggcggcgaagccgagtctgagcgccgcgcccttgccccgatttttcgcgtggtacaggaccttgacccggggatgctcgaaggtgcgcaggaactcgcgcgtcccgtcggtcgaggcgtcgtcaaccacgataatctcgacctcgaatccgcaatggagaacccggtccaaaacctggccgatggttctcacttcgttgtagacagggatgacgacggatattttcggcgtctcctcggccatcaactccctcccactctgccctgacccgccatggcgcaggcggagtccctggaaccgccgctgttgcgcgcccggtcgcgggcaagccgtgcctgaagcatccgcgccgcagtccgcagcgtgcggcgcctgtcgattcccatctcgccggcatacgcgacaagtacccgcacccgatcgctgcgcgaaagcccccggatgtcgaaacgcccaagctgcaccagattgcgcatccgatggcggttgaccgcaaacaggcttcggcgccgggtgcgctcgtgatcgataaacgcgaagcgcggcggcgaaaccgacgtcactataacattatatggcgtgagatcgccgtgaacgtagcccaggcgatggagccgggcgacctcgcgcccaagggcgccgaggaccgcacgccgcgtcgcgcttggcgtattcgagcggcgatccatgtagtacgggaccatcctgcccgcgataccctcgaacgccaccagctcgcgccccgaagcgcggtcgtagccaatcatcaacacgcgaggcacttcgacgccgtcttgccgaagcttcgcgacaatcctgaccaggtgacgcgcgaccgggccgcgccatacccacttgagcagcgcggcggctcccgaaggagggtcaagcaccttgagaaaaacggtatccgcgcctgaatcgctcagaccgccatccatccgaatccggtacgtcgtagcatgccgcgagcgcctgagcggctcgccgcgagcgcccgaaaccgcttccatcgcgcacgcacgcagccgctcgcaggcgtcggcgttcagttccccgtccggaaacctgaaccgccatcgcgagccgtttgcgcaagaccccggtcgcggaatcatcgagactccccggcaggcgctcgcacgcaagccgcggatgacgcctcgccggtccgcatgcggacggcggctttgaccgcctcgattacggcctcggggctgatccgatgcatgcactcgcgtccgatcgggcatcgcctgagataacacggatgacatggtatctcgccgcgcaatgcgtactgctcgaacccccacggcgcagaacgaatcggcgacgtcgaaccccatagcgacacgaccggacatcccatcgccgccgcgatatgcatcggccccgagtcggggccgaacgcgaccgcacactcgggaaatatcgcgatcagatcgcgcagcgatgtgcggccggcaagatcgagcatcggctcaccgcgcaggttgtcggccacggcgcgtgcaagcgcaacatcgtcgggaccgccgagcagaaccggaaacagccccgacccggctccattctttcccgaaagtccgcggataaccgcagcgatagactccggaaaatagacccggcttggccacgatgaacccaggatgacaccaagaatcgggcgcggcgctccgcgcaaaagctcctgcgcacgcgcgcgttcttcctcggtcgcggcaagcccgaactcgatctcgcatcgcggaaggccgagcgcgtcggcaaacgcctggtactggaacagcttcaggctcatctcgggctgcgactcgatttggcgcgtcgagaacagatgattcatctccttggcgttggacgcagcaaacccaagacgcagcggcgcgcccgaatagcgcgagatcacaccgctcttcaggatacgctgaaggtccagcacgacatcgaaacgccctgccctgattcttgaaaggaacgggaaaaccgaatatgggacccgccctcggtcgaacaggataatctcgtcaagccagggatggtggcggagaatcggctcggatttaggctcgaccgcccacgcgatatgcgccgacggccatccgcggcgaatccgcccgagcagcgcaagcgcgcgcaccacgtccccaatcgcgccgagcaggacgatcaggatgcgtttcggagcgggcccgttgccaggttctgctgtttcagcgggggccatcaaggaaaaggcgccgtttatcctcccgtcaagggatgataaccgcgcaaagaggcgccggaaagcgggcttacctggtcgaagacggccccggttgatgaaccatcctcgtcgttgccggctgcggcggcgggcggcgagccgaaattacgcttgcgagatggtttgcgccgcgtcggcctcgacgtcgggcgactcctccgattcccgccgataaaacaccgaccataacgaaagcacgcccgcgattgtcccggtccagaaggtcacccagaacgtgagtgtcatcgagaacgtccgcgctcccgaaacaagcagcccgatcaggcccgcccccagtacaacgcacgtgacacccggccacttcaggtagtcggcgctgcacgcccacaagcccaaaaccaccagcgcgacggccgatacaagcagcatccaggggctcgtctgcaaaagactcggatcaagaaccgccgcgtataccagccacagtccgagcaatgtgtttaacgcgcttgcgaccatgtgccattccctcttcccgatgaagccgcacgagatagcgccaggtgaccggaggaaccgcgaagtaggcgagacaactcgccacgatcagcgccttccaccacgggccgagcggtgttgcactcacgatcacgatcatcacgccgaaatgcgccgcgtagcatgcgaggctcgccggcttcagatacggtccgcgatacagcatcgccagcgtatagaacagcccatacatccccgcgagcaggacgaacgctcccaaaagaagcgccgtctcgatcatcgcgttggccgtcatgcggccgcctctttgagcggttcctcggcctcgccgcgccgccgctttcctatagtcagcaggtcgtacatgagcatcgcgtaacccgccgcgaacagtaccccgaagcccatccttgtccacaccccttcgacgtaccatgggcgatgctgcaacgcgatgaacgctccccacgtcgagccacccagcgcccgttcgaagaatgcctggtccatgccggccaccagtagtccgccgaccatgccgagcatcccgagattcagcatcgcgaacgaccatttccacgcccgcccgtcgagcgcttttctctcgcggctgccaccgaccgcgagatagagcaccgcgatcactccgcaactgtacgcgccccagaacgcgaaatgcccgtgcgacgcggtccactgcgtcccgtgcgagtaaaggttgatttgcggcagcgtcatcatgaagccccataccccggcaccgatgaaattgccgaacgcctcggcgagtgtccagtagagtgcggggcggttcccggcccgtagatggcgcgtgccggagtcgtagatcgcgtgaatcaccatcccgagcagcggcagtggttcgagcgccgagaaaaatccgccgattccgagccagtaaccgggcgtccctatccagaaataatgatgccccagcccgaggattcccgttccgagtaccagcgcgacctcaacgtaaagccagctctcgaccacccggcgcgaggtcccgagtagctccatcagcgcccacgccatgatgcatccgatcagaatctcccacgtagcctcgacccacagatgcaccagccaccaccaccagaagagatccttggacatgtcggtcatcgccgggaaggcgtcgagatacagcacgacaagcggtacgaggtcgaggatgagaaccatcaggatgccgcttcggcgggtgcttttgacggcgctcgcgaccacgttgtagccgaacaccgtcgcaaccgcgagaatcccaatcgccgcccatcgtggcgcctcgacgtacttgcgcccctggttgataaaccacaggctgaactcgtcgctcgcgccgtactgcaccaagatgaacactgcggcaacgatcgcaaccgcagcgcaaaaaatccagaacattatctccgcaagcgcgataccctcgacctcgcgtccggtctcgcccggcaaaaaccagtacaccgcgccgaagaatcccatcagatgccagataataagtgtattgatatgaagaatcttcgcggtgttgaagttgaatgtattgagcagaaacgtcggatgaacatagtagatcgaagcgaggatcccgaacaccaccatcaagccgaacagcaccatcgccgccgccagatatttgagcgcgagccgctgtgaccgatacattgacgcctccctacttcgcctgcgccacgccgaatccgttgggaaagccgttggtgtcgacggcggacatccacttgagatacgcgacggcagcatctgcctcggcgcggttcagatgcaggttcggcatttcgtgatagccgagcctgaacggatgcatcagaaaggccgccatcgcgtcaccgcgtttcgtgcccggatactcgtcccagaccggatcgatccacgcgcgcgtcaaatccggcgcgtaataggcgccgtttccgaagaaagtatggcaatccatgcaggcgcggctctggatcaccatcttgcctttggcgatcagcgccttcgcctcggcctcgctgtactggtgattgaatagcaactcccgaccgccgatttttggcacgtactcgccgcgcgcgctgtcgtaggcataggaaatttgatggttgatcacgtcgtaaagcggtacatgggagccgccaggcgtgatcgcatccagcgaattgacggtcagtatgagcagaaccgcgctcatgaagagagtgctggcgattgcgccggccctccagaaggcaggatcccgagtgtacatctgccaccctcctgggcgaagcccgatcgtcgaccgggcgccgtacccacggctgtcagttcacgatcaggcccgcccgccgggttatcgcgcggcgcagcaggccttgaggcttcggctgcccgtccgaacgcccgtaacctgtatcacagatacttctttaaatggaagaggcgaactggcagggacaggcgtcaccgccggcgcgcgcgtccctgaaaacactgaacccccgttcccgggggttcgatagtgggcgtggtgcgtcctgagggtcgcccatccctcaccgttcggacgcgtgaattttattacgctcccgcggccgaatcggcattcgctacacctgctactatgctagaggcaaaggcggatttcaagactcacggttagcaagggggattctcatggcgcgaatctgggggttcgatctcgggaccagctcggttggcttcgcagtgatcgactacgacgagggatcatcgcaaggcaaactcgtccgcgtcggcgtccgcgtgtttcccgagggtgtagatgaaaagaagaaggagccgcgcaatgccgtgcgccgcgccaagcgtctggcgcgccggcagttcaggcgccggcgatggcgcaagcgccacatgcgcgagctgcttgtggatgcggggctcctgccagcctccgagcgcaagcccaggtcacatcaaggccgcgacgattttttcctcaacagcgacggcgccgatccgtatcggctccgcgcccgcgcggtgaacgagcgaatcgagccattcgagatcggccgcgtcctcttccacctttgcaagcatcgtggattcaccggtagccgtaaattcgacacctcgcgcgcggacgacaggagccgggcaagcgaagagcgccaaatccggcaggagatcgaggacctgcgcaggcaactcgccggacgcacgctcggcgagtacctgcacggcctcccgccgaccgaagcaaagcgccgccggcatatccaccgcgacatggtccaggacgaattccgccgcatctgggacaaacagcgcaccttttatccggacctgctgaccgacgatctcagggaacggatctggcacacccttttcgcgcagcggcccaccttcttttccctcaagaccatcggcaaatgcgaactcgagcccgacgagtggcgctgcctgaagggcgactggcacgcacagcgcttcgtgatgctccagatgctcaacaatttacgtttcctgggcgaccgccagcttagcgccgagcaacgcgagcgcctgctaaacgaactcgaggcgaaagcgagcctgacgttcgatcagatcaggaaaaagctcggccttggcgacgagcgtttcaacttcgagtccggcggcgagaaaaaaatcattggcaacgcaaccgagtgcgaactcgccaaagtattcggcaggcagtgggagacgcttcccgcgcgcgaccgcatccgcgccgagattgccgaacggctctggcatctcgagtatcgccaggtcggagacaagcgcgccgaaatccggactgccgcccaatggcaggcggagcgcgacgccttcgtcaaaagtgcgatgcgcgactggagcataaccgcggagcaggccgagtcactctcgaagctggatcttcccgccggatatgtcatgcactcgaagcgcgccatccttaaaatgctcccctacctggagcaggggcttcgctacgacgaggccaaggatcgtgcctaccccaagccgccgccggcgagacctccagcggagaaacttagtgagccggacccgaaccgggttcgaaacccgaccgtcatacgcacgctcggcgaactgcagaaagtcgtcaacaacctcctgcgcgtcgacggtcggcccgacctgatccgtatagagctcgcccgcgacctcaagctgcctcgcacccgccggctcaagcttatggccgagcagcgccaaaacgagaagaggcgcaaggacgcgcgtgatgagctcgccaggcgcgggctgcccgtcacccacgaaaacgtcgagaaatatctgctcgcaaacgaacagggatggcgatgcccctactcgggcgagcagatctcctgcgacggcctgttccaaagcggcctgttcgaagtcgaccacatcctgcctcgcagccgctccttcgaagattccttcgcgaacaaggtcgtctgccatcgcgacgcgaacaaggagaaagccaaccgtaccccgttcgaagcatggggcgcagatcccgagcgatgggccgcgattgagcacatcctctccgatatccagaagcacgccggcttcccgatctccaaggtggatcgaataaagagaaaggaatttccggcacttggcggcgaggactttaccaatcgtcagcttgtcgatagcgcttacatcgcgcggatggcggtcgattatctctccgagctcggagtgaaggtggaaccgaccaacggccgcgtcaccgcgcacctccgccgcctctgggggctcgaaacgattctttccgacgcgccggagggcaagaaccgcgacgaccatcgccaccacgcggttgacgctatcgctgttgcccttaccaccccagccttcgtcaaacgcctgagcgattattacggcacggacaggacgcccgaccgggagcggtttcgcgtgccgtgggactctcttcgcgccgacgctgagcgggcggtcgcggaaatcgtcgtgtcgcatcgcgcccagcgcaaggtgtcgggcgcgctccacgacgaaaacccgtggcgcgacactggagaggagtcggaagagaacggtatccgctaccgcctctactcccaaagaaaaagctccgggcaacgcgcggttgaacgtattcagcagaagctaatgagacccgttggacccgatcgcgccgcgtgggtaaagaccaactccaaccatcatattctcatctacacggacgaggcaggaaagcttaggtacgaaaccgtctcgatgttcgacgccgcgatgcgcatctcgaagcggcagcctatcgtggaccgctcgcgcccgcaggcggcaccgttccggtcgctctgcatcggcgacatgatcgagcgcaccgtggacgggcgcaagacctactggaccgtcaagaagctcagcgcgaacggcccgatcaccatccagccgcataatttcgcgcgtgaccttgggcggacaggcccgtccgtcacaaccctcgtcagggagggggctagaaaagtggttgtcgatccaatcggacgcgtcagctacgccaatgattaagcgcaccatcgaaatctccagcggccccgcgcgtctctccatccgcaaccgccaactcgtcatcgagcgcaacggatgcgaccccgcgaccgtcccgcccgaggacatcgggcttctgctcatcgaccatccggccgtaagctacacccacgccgtgttcaccacgctttgcgaacacggggcggcgatagtgctgtgcggcggcgctcatctgccggccgcgctggtgatgcccctggcggccaacactgtccagaccgagcgcttccgcgcgcagatcgaagctcccgcgccgctgcgcaagcagctctggcgccaggcggtcgcgtgcaagatcgcgcagcaaggcgctgtgctcgaggccgtcaccggctcggatgccgggctgcgtgcgatggcgcgccgggtacgctccggcgacgcgggcaacctcgaagcgcaggccgcccagcgctactggccgcgcctgctcggccccggtttccgccgcgcccgcgacggcgatccgcccaataacctgctcaactatgggtatatggcgatgcgcgcagccgtggcccgggccctatgcggcgccggcctccttcccaccctcggcatccaccatcgcaaccgctacaacgcattctgcctggccgacgacctgatggaaccgtaccgcccgtttgtcgatttgaaggtcgttgagatcgtgcgggaaaatggcgttccgcttgttctcgaacgcgaggagaaggcccacctgctcggcctgttcaaccaccgcgtgcgaatcggcgagcgcactacgccgctgctgctggcgatccacaccactgcggcgtcgctgagccgttcgttcgcccaacgccgggcgatgctcgccttccccgacggcctgccgaacgccgagaacggcactccgccggaggatgagcccgatgagctccccgacctatagccccctgggatggaagaccgtgtggctgattgcgatgttcgacctgccggttgacactccggcccagcgcagagcttacgcgcgctttcgcaaggacctgctggaggacggcttcacgatgatgcagtactcggtttaccagaggcactgcgccagtcccgagaacgcggcggtccacatgcagcgcaacggcgcccgtgtgccgcccgagggcgaggtgcgattcatggtcatcactgacaagcagttcgagaagatcgtgactttcattgggagaaaacggaaggcagcggcgccgtcgccctctcaactcgagtttttctagccccgtaaccggcgagaaaaacccggtttttccggtacttaggcgccgcctattgtagcgaataccgattcggccgggaaccgcaactcgcagcagtttgggggccagccgctcgaaaattgtagcgaataccgattcggccgggaaccgcaacagaacgactggtacggaacttacgacgatcattgtagcg

SEQ ID NO: 2062 - DNA, 18344 bp, synthetic construct
  misc_feature 1..18344: note = Synthetic
  variation 11305..11440: note = n is a, c, g, or t
  variation 10448..10637: note = n is a, c, g, or t
  variation 327..487: note = n is a, c, g, or t
  source 1..18344: mol_type = other DNA
cgttgccgggaactggaacacccctgcatccgcactcgaagcgctggcggcggacccggagagcgaggtccggagcgccgttgccgagcatcggaacgcccccgcgtccgcactcgaagcgctcgcgagggatcaggagagcagtgtccgacaggccgtggccgggaacgggaacacgccttcggacgcactcgaagcgctggcgacggacccggagagcgaggtccggagcgccgtggccgggaacgggaacacgccttcggacgcactcgaagcgctggcgacggacccggagagcgaggtccggagcgccgttgccgggaactnnnnnnnnnnnnnnnnnnnnnnnnnnnnnnnnnnnnnnnnnnnnnnnnnnnnnnnnnnnnnnnnnnnnnnnnnnnnnnnnnnnnnnnnnnnnnnnnnnnnnnnnnnnnnnnnnnnnnnnnnnnnnnnnnnnnnnnnnnnnnnnnnnnnnnnnnnnnnnnnntgccgggaactggaacacccctgcgtccgcactcgaagcgctcgcgagggatcaggagagcgatgtccgaccggccgttgccaggaactcaaacacgcctgttgccacgcttgaatcgctcgcgaaggacacggcgagcgatgtccgcagagccgttgcatggaactcaagcacgcctaatgccacgcttgaatcgctcgcgaaggatacggtgagcgatgtccgcgcaaccgttgcagagaactccaacacgcttgttgccacgctcgagacgctggcgaaggacccggagagcgtcgtccgcagatccgttgcattgaacaccaacacgcctgttgccacgcttcaatcgctcgcgacggatcgggagagcagtgtccgacaggccgtggccgggaacgggaacacgcctccggccgcactcgaagcgctcgcgagggacccggagagcgaggtccggagcgccgttgccgagcatcggaacacccctgcgtccgcactcgaagcgctcgcgagggatcaggagagaggtgtccgcagtgccgttgcatggaactcaagcacgcctattgccacgcttgaatcgctcgcgaaggaccaggagagcgatgtccgcgaagccgttgcagggaactcaaacacgcctgttgccacgcttgaatcgctcgcgaaggataccgtgagcgatgtccgcgcaaccgttgcagggaactccaacacgcctgttgccacgcttgaatcgctggcgaacgacccggagagctatgtctgcagagcggttgcattggaactccaacactcctgttgccgcgctcgaaatgctggcgaatgacccggagagcggagcctaggaggacgactactagaacgtccgtcacgccgtggctgacacctcgaacatgcccacaaccgccctagacctgctggccagaccatgtcggcgatgtccgtggccgcacggccatgctcaaagagcaggacatctatgagaacggatgaacccaccgagatgaagaaggagtatggcgacacactccggaacggggtccgaggcaagtacttcgaccgcgtcgccgaaaaacgcatcgtattcctcgaccccgacgtggcgaccgtcttctcggacagcaagcaggtcaacgacatcttgcgcgccatgatcgccgcgacgaaatcgggcaaaccggacgactcctcgccttagtcctccgttgctcttcttttggggtagcgtcacaagtgtcgtgtctgtgatcacctaccccatcgttctggaactggagaaagacgggcgcaccagcgtttacgccccggacctgccggggtgcgcgagttggggcgagacgcgcgagcaggcgatcgagcgcatccgcgaggccatcgaattgtggatcgaatccgcactcgaagacggcgacccgctcccgcaaccgggcgggacggtggcgtacgtgcagatcgcgagttgacgcggagcacaggtccagggccatgaccgaggttcgctatccgcccagattctctccatcgggcttccctttgctgcacgacccgccggagccggtacagagcggggacccgaatgcctggaggattccagttctcggtttgcggatcattcgtagctggtcctgttactacattccgcccgaacccactcgggaagagttgcttgtcaggcaagcgtctgaacggggccccgttccggaatccgagtgggagccttacgagtacgtcgctagcattcgcgagtcgctgacaaagatcgtcctaggtccatcgcttcataacaaactgacactccatccccttgatcccttcgaattgaccatctgtctggatggcgagtgggccgaactgacgctcaccgaaatcgaactcgacttcgacgttccggccaacgccatcgttggattggtgatcagcgacaaaaccttcctcgacgtcatccactggatcgaagccgcttcagccaagaaactggagtgagtcacatctcgtcgtcgccgcaaggtccgggtgccatgggttcccgacccgatcgggccggtcatccgccaacggggcgacgggtcggaacccatgaaaaatccgccacataagaggcacctcgtcgcgcgaattccggtttataatcggaccctatgaagttcggagtccccattctcgccttcggcatgctttcgtccgccctcctgctcggctgcggagggagcaccggcgaggcggccaccggtggcggcacgcccggcgggccgatgaccgccgcccaggccctcgcccagctcaacgagggcaacgcgcgctacgtccaccgaccggcgaccgcaccccaccccacccgacacgagcgggccgagaccgccaaccaccaggagcccttcgccctcatcgtgggttgcgccgactcgcgcacctcgccggagatcgtgttcgaccagtcccttggagacctcttcgtggtccgcgtggccggcaacgtgattgacgacttcgcgcttggaagcatcgagtacgcggtcgagcacttgggcacccgcctgatcgtcgtcatggggcacgagcgctgcggcgcggtcaccgccgccatggaggacgacgacgcgccgggctacatcggctcgctggtccgggcgatccgccctgccgtcgaggccaccaagggccacgaaggcgacccgctggagaacgcgatcgtcgagaacgcggcgcgcgcggcggaggacatccgcagcaaagcccacctcaccgccgacacgcaagtcgtcacggcctactacgacctggacacgggcgtcgtgcggttcgactaagcgccgtcgaagcggcccatcgctcggaacttcgcgtagcgttgctcgcggagcgtccgaccgtcgagcccggtcagggcgtcgaggtgctccttcaccgcgtcccgcacggcatggatggcctgcagcgggtcgcggtgcgcaccgcccttgggctcgggcacgatggcgtccaccaggccgagttccagggcgctttcggccgtgagccggagcgccgccgcagcctgcggacccttctcggggtcgcgccaaaggatcgccgcgcacccctcgggcgggatgacgctgtaaatcgcgtggtcctgcatcagcacgcggttacccaccgcgatgccgatcgcgccgccgctgccgccttcgccgatgatcaccgacaccacgggcacctcgagctcgaacatcttcatggtcgaggcggcgatggcttccgaaataccccggctctcgctttccacccctgggtcggcggcgggcgtgtccacaaaggtgatgatcggcatgccgaagcggcaggccatatcgaacaagcggatggctttccggtagccctcgggcttggccatgccgaagttgcggaactgcctttcttggatgttgcgacccttttggtggcctacaaccatcaccggcctattgttgaaaaatcctggacccccgacgatcgcatggtccgcaccataccgccggtccccgtcgagttcggtgaactcggtgatcagggccgtcacatagtcgagcgtgtaggggcgtcgctcggcccgggcgaccagcgtcttttcccaaggtcccaagcggctgtagcggacgtcaatgtagcggtctcgccgggccttgacttcggccaacctgacgcctagttcgtcttgcttgtcctcgggcgaggtggcgatgagcgcttcgatcttggcgattgcctcgtccaattcgatgaggggcttttcccactctttccacgttttagccattcaggtgccctcccagcgacttcaccaatcgcgtcagcgtcggccgcatctctttgcgcggaacgatgcggtccaccatgccgtgctccaggcagaactcggcggtttggaagttgtccggcaccttgctcacgcccgcctgtttgctcacgcgcgcccccgcgaagccgacaagcgccttcggctcggcgagaatcacgtccaccacgctggcatagctcgccagcacacccgccatggtcgggtcggtgaacacgccgagggtcgggatgccgtggtcgcggcaacgctggacggcggcaacggtcttggccatctgcatcagcgagagcagcccctcttgcatccgcgcgccgcccgaggtgcaaaacagcacgaccgggcacgcgtgctccacgccgcgctccagcgtccgcgcgattttctcgcccgctacggagcccatggagccacccataaagtcgaaatcggcgaccgctgtggccaccctgcggccccccaacgcggcgagcccggacacgacgctgtcgcccgcgccggtcttggccctcgccttggagagcttgtcggcgtactcgggaaagcccagcgggtcgctcgacgccagcccggtgtcggcctcttcgaacgagccggggtcgaacgtgagctcgatgcgtttggccgcgcccagccggtggtggtggctgcaattcgggcacacgccgagcgcctcgtcgagttcgctcttcagcaggatttttttgcacccgaggcactggcaaaacgccccgtcggcgccccgtccttccgtccgcatacgccgggagcataccttgcggacgagcgaagcagagcgggcccggccttgcggaccgagcccggaatctctaagcggacccgttaggacccgcgacgttgacccgaaggtccattcctgcggccccagttgcctgagaccttgttgagggagctaccgcaggcctgatctgatacaggtccataatacaccaacttgccgggaagtcacaagtcctatgagccaattcacaattcttggtctcgatctcggcccttcctcgatcggatgggccctcttcaacggaggtgccgacggggtgccgaccgaactgatcgatctcggcgttaggcactttgaagaagttgccgaacccaagaccggcgtcttgctgaacaagaagcgccgcaccaagcgcggtatgcggaagaacattcggcgaagacgagagcggctcgattcccttttggcagcgatgcgccaaggtgggctcgcgccaacgggccaacacccgttcgcagagtccggcgtcgatcccttggctgcctacaggacccgggcgcgggcagtcgaagagcccgtgagcctagaagaactgggtcgcgccatttaccacttggctcggagacgcgggttcctctcaaaccgcggcaccaagttcgcccggatcgccaacctacaggaagtcgccaatctcctggccgagcaagagggggaacgagagtcgaccgagcgcggcaagaagcgcaacgcagaagaggaggagaaggcgaaggaggagggcgtgatcctgaaggagatcaccgagttgcgaacccagttggacggcaggacactcgggcagtacttcctccaagaactggaggctggccgtggcgtgaggggcagacacacgcatcgcgacatgtacgaggacgagttcgagcgcatttggtcgtgccagtccagccaccatccacaattgacccaagagctgcgtgcccgaatctatcgggccatcttccaccagcgaccactcaaggagcagcacggattcaagggcttctgctccatggagccccaacggctccgagcccagcggagtcagctggtcgcacagaggtacaggtactggcaggacatcgtgaacctgaaggtgcgtgagccggacgacgttgaacaccgacccctcacccgagaagagcggttgagcctggcacacttcttggatgggcgagtcgaggccacgtgggaggctgttcgcaagcacctgcaacttgccaaaggcaccgacttcaacctgaagaagtccaaagaccagctccgcggcaactctaccgccgtccggcttgccgcgatcgccaccgactggggttcgatggacgaagcggctcgcgaaaggctcgtggaaactttgctgacgatcagcgaccgtggcaagctctacctgaccatgagggagaagttcggttacgatgtggagaccgcctaccgattagccaagctcgaactcgaagacggcaccgccgctctaagctctcgtgccatgcgccgcatcctgcaagcgctcgaacaaaggcccgagaccgcgacgatgtacgaggcacaacttgccgctggctacacgatccgcgaagtgcagcaggcattgcgcatcgagcgggctcccaatcggctggagatcaccaacccccgcgtgcgcaagggtttggcgcaactccgtagggtcatgaacgccctgatcgcaaagtacggacggcccgatatcgtccgaatcgaactcgcccgcgacctcagcctgaacgaggatgagaaaagaggcctggacaaggccaagaagcaactggagcgcgagaacgccgaagccgatcgctggctcagggaccaaggcattcagaacccttcgcgctccgatcggttctggtaccggctcgccaggcaatgcgggtgggtctgcccctacacgggccagccgatcccccaagaactcgcgagcacgagccgcttccagatcgagcacatcgtgccctactcccgctgtctggacgactcgttcaacaacctcacgctctgcgagtcgcaaacgaaccaggagaagggcgaccgtacaccctgggaagcgttcggccaaaccgccgcgtgggaggacatggaggctcgcgtccagcagtggagaggcatcggaacggggaggaagaagtccctattcctgcgacgggaggccccgccagaggaccaaatggtcgcacggcaactcaacgaaacgcgctacatgtcccgcaaggcgatggagttcctcgagccggtggtcggcagggtggaagtgaccaagggaggcgcgacggcgatgctccgcgaacactggggtctgttccacgccctcaacaccgagggcgaaaagaaccgcgacgacctgcgccaccacgcggtggatgcagtcgccatcgcgttcacgacgcgatccgtgttcatgaaggcgaccgcgcaccgcaagcgccatgcggacggcagggtgggcaagatcactccgctctcggcggagaccgtccctgcggcgccagagtggcttcacgacgccctgaaacaacggttggcctcaatggtggtcagccacgaagcgacgcgcaagattcgagacgcctttcacgaggaaacggcctacggcatgcgggacccgaatgcgaaagtcttccactaccgcaagaacctggtcgacctcaccgcttcggccatcgccgacatcgcagatcacggtctgcggcgaagagcagaggagatcctcaaggcaaccagcctgcctccgaaagaagcgttcaaggaagggattccgatgggcacgacggtcgcccgacgagcgcgtctcgtcaagcccatgcctggggccaagctgcttgcagtgcccaacgacaacccgaccaagttctatcctttggggaacaaccaccacgtcgccatcttcgaggacgaacgaggcaagcgagtgggagtcttcgtttccatgctggacgcagcccggcgcctgcggcgcgtcaaggcgaaacaccctgtggacaccaacccgccgagtccaggattgaggttcgtgatgtggatcgccgtcaacgacactatccttctgccggacgatgatggtccgggcctctatcgggtggcgtctctctggtcaacaacaaaccagatctgcctctatgacttgaagaagtccaactccagtggttccgaaggccgattgctcaaaggcccgaacacgttgcgtgcggtcaaggtcgaggtggacccgatcggcggggtacgggaggttccggagggcaagttgtgagcctacgcgtggtgtcggtggcgggaccggccagcgtccaccgctggcggggatgcatggtcatcgagaaacccgaggacgcgggaggcaaggtgcccctcgatgacatggccgtcctcatcttggacggtcccgagatcgcgctcactcacgacctcatctctgagtgcgcagccaagaacatcgccgtggtcacgtcggactcgcgtcacctcccgaacggcctcctgatgccgcttgcaggtcactcgaaccataccgccgtcctgcgccaacagatggaagcctcgctgccctccaagaaacgcatctggcaggcgattgtcaagcagaagattgcgtctcaggccgacttggtgcgctcggttggacaggacgacggccctcttcgggctatggcggcccgggtgcgcagcggcgaccccgacaacgtggaggccacggcagcggcggtcgcgtttgaactcgtgttcggctgggcgtttctccggaaccgggacgaacccggcctcaatgcgatgctgaactacggctacgccatcttgcgtgccgcagtcgcccgcgcagtcgtcggtgcgggcttgcatcccgcactgggtgtccaccatcgcaaccgctccaatccgctctgcttggccgacgacgccatggagcctctgcgaaccatcgtagaccgcgtggtctacgacatcgccgatggagggccaacggtggatgacctcgtgccgcccgtcaagcgccggttgatcgcctgtctcgggtggacggtcgagcaagggggcgtccgcgtgcccctgctcgtcggcctcgaaaggtatgcggcttcccttcggcgcgcgctatgcgagggagcgccggttgaggtgatcgtccccatcttcgattcgacatgaggatcagcggattccgactcatgtggttgctcgtgatgttcgatctgccggtgacgacgcggactcaccggcgaaactacaagcggttcgtggacgaattgctcgggcagggcttcttccggattcagttcagcgtgtacgcccgcccttgcgccaccgaggaaaacgcagccacggagttccagcgcgtgacctcggcccttcctccagcaggcgaggtccggattctcaagttcacggacaagcagtgggcgcgtatggtcaacttccgcgcgcgcaagcgacgggccatcgaagaggcgcccgagcaattcacgttctttgaccggggctcggacgacgaaggttgggacgggccagatcctggattcctggaggcgactcagggcgaaggtcccccgccaccgcgccctcccacagagcccgagccgccaaagccgcccgattccgacgccaaacgacgaccgaagctggatcaggccgggttcgacttcttcgactgactgacgaaaaaacgccgccagacgggaggagccccagctctggcggcgtcgttttgtaccctggtttccggttcgcgccggactccagacagtgtatcagatcaggctccgggagctacccccaactggccggctgcgttggccatggcgctgccgagtgtatcagatcaggctccgggagctacccccaacgcctttcgaggggggcgaacggtgtttggtagtgtatcagatcaggctccgggagctacccccaacaacaacaacgttcttcgctgggcaggggtgagtgtatcagatcaggctccgggagctacccccaactcgcgacggtcgggtggccgccgcgccacgagtgtatcagatcaggctccgggagctacccccaacaggcgggcggcgcgatttcccgcgacggttagtgtatcagatcaggctccgggagctacccccaactacgggaggccgttgcacacgccgcgctggagtgtatcagatcaggctccgggagctacccccaacatccaagcatacggcaccggcgcggccctcagtgtatcagatcaggctccgggagctacccccaacggtcccggaggaccaccactttttcatagcagtgtatcagatcaggctccgggagctacccccaacgcctctggaggaatgaatgcgaaatggctaagtgtatcagatcaggctccgggnnnnnnnnnnnnnnnnnnnnnnnnnnnnnnnnnnnnnnnnnnnnnnnnnnnnnnnnnnnnnnnnnnnnnnnnnnnnnnnnnnnnnnnnnnnnnnnnnnnnnnnnnnnnnnnnnnnnnnnnnnnnnnnnnnnnnnnnnnnnnnnnnnnnnnnnnnnnnnnnnnnnnnnnnnnnnnnnnnnnnnnnnnnnnngctccgggagctacccccaaccggagaacgctgggagccggttccgggcaaagtgtatcagatcaggctccgggagctacccccaactctacgtccggtcttgtcgtgtgaaacatgagtgtatcagatcaggctccgggagctacccccaacagcgaccgacgccaccgctgaagccccgctagtgtatcagatcaggctccgggagctacccccaaccagttccacaagagcggcgtctcgggctcgagtgtatcagatcaggctccgggagctacccccaacttgtcccaccagcggatcgcctcgtcgagaagtgtatcagatcaggctccgggagctacccccaactcgaccagagtgttgcgggccgctcctacgagtgtatcagatcaggctccgggagctacccccaacgctacgcggacaacctggccctacagttcgagtgtatcagatcaggctccgggagctacccccaacagcccatgaaagacgtcgccgatgcgaccgagtgtatcagatcaggctccgggagctacccccaacggcccgaagtggttcgaggtgcgtcgccgcagtgtatcagatcaggctccgggagctacccccaacctgatgctgtcggccgtcgctttgaagatcagtgtatcagatcaggctccggnnnnnnnnnnnnnnnnnnnnnnnnnnnnnnnnnnnnnnnnnnnnnnnnnnnnnnnnnnnnnnnnnnnnnnnnnnnnnnnnnnnnnnnnnnnnnnnnnnnnnnnnnnnnnnnnnnnnnnnnnnnnnnnnnnnnnnnnaggctccgggagctacccccaaccccgctgtaacgaccgccgatcccgaggtggagtgtatcagatcaggctccgggagctacccccaaccatccaatatcgtacaatgtcaagggggttagtgtatcagatcaggctccgggagctacccccaactcaaacgcccgcagcgaagctacggcgatcagtgtatcagatcaggctccgggagctacccccaactgcaccacggcctacaagtcgccccccttgagtgtatcagatcaggctccgggagctacccccaacggacggtggaagcgttcgttccggtgatcgagtgtatcagatcaggctccgggagctacccccaacgcaatggcatcgcgcacgtcaccttggttgagtgtatcagatcaggctccgggagctacccccaaccgaaatctcggcaacatgacggcttcgggtagtgtatcagatcaggctccgggagctacccccaacttagccacgagccgaccctggtcgcccttcagtgtatcagatcaggctccgggagctacccccaaccttgacggactcaaccttgagacggctcttagtgtatcagatcaggctccgggagctacccccaactacaaagagggccgctccaacaaggtcatgagtgtatcagatcaggctccgggagctacccccaactacaccctccgtctgctgacgcttgaccaaagtgtatcagatcaggctccgggagctacccccaactagggaatgccaagggcgcgggcaacctggagtgtatcagatcaggctccgggagctacccccaacttcgccgccgttggttacccgtgcgaagagtgtatcagatcaggctccgggagctacccccaacgcgcaggtcgtcggcggtatcgcctggctgagtgtatcagatcaggctccgggagctacccccaacctgatcttgggggaggacggctgggaatgaagtgtatcagatcaggctccgggagctacccccaaccggcccggaacctccgaggcacctaaaggtgccccaaagtttccggtcaaagggagacctgctagaacaccggggctgaagaacacctaccgggccatcggcacagccgtcaaccgccgctccgccaccggctgaccctccggcgggtcaacccacttcccgtccgcccgaagcaacgcgatcagttcggccaccccgtccttctgatcgatgttcgccttcaccacctcccgcttccgatacaacgcgatcttgccgcccgccttccccacatagccataatccgcatccgccatctcgccggggccgttcacaatgcagcccatcacggcgatgtccaaacctaccaagtgccgcgtcgcctcgcgcacctcgtgcaacacggtcggcaggtcgaacttcgtccgcccgcaagaggggcacgcgatgtattccaccttggtcttgcgcaagcccagcgactgaagaatgtcgtagcacacaggcaattcccgcacgggatcctccgaaaggctcacccggatggtgtcgccgatgccctcgttgagcagcgtggcgatgcccgccgtggacttgatgcgcgcataatccccgtcgcccgcctcggtcacgccgaggtgcagcgggtagtccatgcccaactcgtccatccggttcaccatcagccggttcgccgcgaccatgatcggcactcggctggctttcagcgagatcaccaggttgcggaagccgtgcttctcgcagacctgcaggtactcgatcgcgctctcgaccatgccgtccggcgtgtcgccgtaggtcaccagcatgcgctcggccagcgacccgtggttcaccccgatccgcatggcgatgccgcgccgcttcaccgcttcgatgactggcacaagcgattcctcgatggcggcgcgctcggcctcgtgttcctcggggctgtactcctcgcggttggtgtgcttgcggaacacgaacaggccgggattgatgcgaaccttgtccacatacttggccacctcgacggcgatgtcggtgccctgatggtgcacgtcggcgaccagcggcacgtcgcggtagcgttcgcgcaccttggccttgatggcctcgagacaccgggcttcgtccagcgtcggggtggtcacgcgcacgatctcgctgccctcgcggtgcatggcgatgatctgctcgacgcaaccctcgatgttccgcgtctcctcggtgatcatggactggacgaccacgggatggccgccgccaatgacgacgtcgccgactcgaaccgcgcgtgtggctcgcctttcgtaactgattgggcgcatgctggtctatagtctacgcgagcgggtccccaaacggcccgtggatgaggaacagacccatgactgcgctgctgttgggatggatcggatggaccctgcaggtgaacgacacccgcgagatggacatcgtgcgcgccaccgaagtcaaacgccgcaacatcgaggcgatgggccacaagccgacggcccaagaactcgccgcactcggcgccatggaacgccacgccgcggacgcccgcgtgctggtcaacagcctgaacgaaatcctcgtcatcctcacggagccgagccaggtccgactccaacgcgaatacgcggaactgcgagacgaagcccaatccgtcatcgacgcctacgtgcccagccgggcaagcgcggcccagatgctcgcagccgtgcaggactacgtcgagaaggcacccgaggtcgccaagcggctcgcaacggtccgaatgacggtctcggagcgtcggctcaagttctatgccgatgggctgctcgcgccgacctatgagatcgaggtggtcggaacgccctcgggcgatggcacgctcggtttttcggccgagggggtccaactgcgcgtgtcggggcagcgactccgcgtgacgcggcccgtcatcgtatgcaccccgatggacagccgactggtctcggcatacggcatgctgcgccaacgcgacacgacgatcctcgagtttggccccgacctgctgaagtaccaccagaaggaccccttgcgggtgttcacctggcgcaagacggccgaatcgttcacgtggaaagagaactggcgcggggagcagacctctggcgcgacctattcaggcgaggacggcccccctcgacgcacggcgagccattgcgccttcgaggtggcccatcccgtggtggatgtgaacttcgtggtggaaggcaagacgacgtggtcgctggaatcgcagttcaaagacgagccgccgcgagttcaaaccgaaacccatgcggtggccggcaccatccgcctacggatattctgcgtctaaggctccgcagccccgcagatcccgcgtcaaccgttcgccgcagggcgttggcaggtggtcggcaggtggacgcctacgaaaggcccttgcccacgggcaccagacgcgattcgccattcaaacggatgcggacgcccgcttcggtgatcgcttcgaccttcgcgcccgggctgatcgtgtcacccacggcaaggaacttgtcctggttgtccacgcgcatcacggccatggccgagtccccggtgatcacgccttggaccatgatatcgggaagcttggcctgaatgccgacgccgtcgggcacatgcgggcggacgggagaaacgttctccccatcgcggccaatgtagcccgacatcgtcgagggccggccgggtggtggtacggcggtcccgttcgaggcccgagggggcggtgtgtcgttgggagtctggacgtcgggtacttcggcgctcgtcgtctcttcaaccttgggtcggaacgggtcgaggccctggaacaacgcgttgtactccaagtccttgccgaacaggtcggccacgcgcgtcttcagttcgtcgcccgcggctcccgtggtggagccggtcgtcggcgcagcggcgctggcgaacttcggagccaccttcttggccgtccgcgcacgcccctgcgacacgaacatgaagcctgtcatcgtgatgactcccacgatggccacaaggaggatgatcgctttcttttgttcttcgggacgcgtggtgagcatggattgcctcttaggaattgggagccttgacggggggctgcttcggcaagccgttgtagccggagggaggcgtgcccgggccatccgtgatgatccggggcgtgatgaagatgaggacttcgctcttgcggctggaggtcgtgcggctcttgaagagttcgccgatcagcgggagcttcgacaggaagggcacttcgcggacgaccttgctcatttcgtcgcggatcaggccgccgatgacgacggtctcgccatccttgaccatgaccgtggtctcggcctcgcgggtgctcgtctgcggtacgaactgggcgtcgatgcccgagacggtgctgaccacgggatggacgcgcatggtgatgttgccatcggcgttcactcgcggacgcaggagcaggatgatgcccacgggaaactcgacgatctcgaccgacgtcgtgcccaagccgccagccgtcgaggttcgggctcggatcgtatcgccgatgaagatgttggcctcgtcgttgtccagcacttggatgctggggttggccagcagcttggcctccttgttggaaaccatggcctgcaggatgttctcgaacgaccacggcacgcggctgaacatgccgaacccggtgttcttggtggtgaactgggtgaagtccgttccagggccggaacccgagcccgtggtgtccacagccgtgcccgagggcgcctcgtagaagccgaagcgggtccagttccacttcaggccgagttcttcggcgcgttcgggcgaggtgtcgaccaccttgacctcgaccacgacctgctgcggcttgacgtctacttgggccagcaaggccacggcttgatcaacggcttcgctcgggccgcgcaagacgatgtacttcgagcgctcacccgtccccagcatgtcgggggattggccgctggcgctcgacgtgctgccgcccgaagcgggcgagcccgcgcctccggagcctcgctccgacgactcgttgccgctggaaccgcccaggttgacgcccgtcaagggattgaacgtgggccgcttgggcgaatacgcctcgggcccgatgaagacttcgacttcgggcatcgcgctgctcaagaactccttgagccgcggcgccgagctgtagcggatgtcgtagacctggtacttcggggcgaattcggggaacgggtacttgttgtcgacggtctcgatcatctgccgcgcttgcagaatcagatcggcaggaccgctgaggccgatcgcgccgcccgttttcttttcgtcgcccacgaattcggccttgagacccgggtacatgttggcgaccatgtcggccacctgcttgccgttggcgaccttgaggggcacgagttcgcgatgggcccgctcgcgcgtcgacttggtgtcctccagccgaaccagttcggctgcgctggccaagtcttcgcttgagccgatgagctgaatcttgtcggagccaaacgggcgaaccgtgacgtaggggtatgccgcctcgacgaccttggcggcgtcggcgggcgtcagccccgtcaattcaaggcgcacggaatcgccgaacggctcgagggctcgccgcatggtttcaggcgttgccacaacgaacgtggtgccgactttgcggaccaggatgttcgcggccgcagccgtcacgtagcggagtgcctcctcggcgctcgtgtagttcacgttcagcgagatcttcgtgtcgcttgggccgccgtagacgatgttcgccccggattgcaggctgatggcctgaacgaccgtcgccacgtccgagttcgagaattgcagacgaggagttttggtctgagccgatgaaatcgggctcaaaacgagtgatgccaagacaagggttagcgcggtcgctctcatccagttgctccgggagtgtcgcctgaacgggtcgaagcgacggtggtgtttgcggtctcgttaacgaaccgcgtcaaggtaaacgacaaggtagtgttgggatatcggtcgcggtcccgcttccaggacacgtttccgatggcgtaaaagcgttcggctttggaaaggtcgtacagaaaggcccgcagcgatgggtacgtgccggcgacgtccaaggtgcactcgatcggggtcgagccttcgagggtcacgccatcgcccttcttggcgccgcgcttgaccacgaaattccacttgaccagttggataccggccgtggcagcagcggagcgcaactcgtcgaggaaggcggcctgctcgctctcgctggcggcgacggtcggtacttggagcacctcgtctggcgcatccttcggttccacttgaatccgcagcttctcgaccgaggcacgcaggcgcgctcggtcgccttcggcgacgaatgttcgcttgacctggataccggcgacgatggccgagacgatgaaggaggcgatcggcaaggcgatgacgagaattcgggttttcactttgcacctccgggggtgggggttgccttgggcggcggtggcgaacccacttgggccgacaggaagaatcgcaccgatccgggcgctagattggtggccgtggtgtcgatactgtccacgttgaccaaactgaggaagctgagtttgcgcaggttctcggcgctttcgatgacggcggctgtgcccgtggcctcgccgaccaagaccatcttgcggttggcgtcgatctggacttccgagaggcccaccccacccgccaaggccgaggaaacttggtcgaggatctgcgggaaaggcaccgactggtttcgcaacgaagacaactgagtcttgatctgctgtctgttttgtc

SEQ ID NO: 2063 - DNA, 10408 bp, synthetic construct
  variation 10135..10136: note = n is a, c, g, or t
  source 1..10408: mol_type = other DNA
  misc_feature 1..10408: note = Synthetic
  variation 190..266: note = n is a, c, g, or t
  variation 7012..7013: note = n is a, c, g, or t
gcgtccgcactcgaagcgctggcgacggacccggagagcgaggtccggagcgccgttgccgggaactggaacaccccctcggccgcactcgaagcgctcgcgaaggacacggagagcgaggtccgacaggacattgcggggaactcaaacacgcctgttgccgcgctcgaagcgctcgcgaaggacacgnnnnnnnnnnnnnnnnnnnnnnnnnnnnnnnnnnnnnnnnnnnnnnnnnnnnnnnnnnnnnnnnnnnnnnnnnnnnnagcgccgttgccgagcatcggaacgcccccgcgtccgcactcgaagcgctcgcgagggatcaggagagcagtgtccgacaggccgtggccgggaacgggaacacgccttcggacgcactcgaagcgctggcgacggacccggagagcgaggtccggagcgccgtggccgggaacgggaacacgccttcggacgcactcgaagcgctggcgacggacccggagagcgaggtccggagcgccgttgccgggaactggaacacccctgcgtccgcactcgaagcgctcgcgagggatcaggagagcgatgtccgaccggccgttgccaggaactcaaacacgcctgttgccacgcttgaatcgctcgcgaaggacacggcgagcgatgtccgcagagccgttgcatggaactcaagcacgcctaatgccacgcttgaatcgctcgcgaaggatacggtgagcgatgtccgcgcaaccgttgcagagaactccaacacgcttgttgccacgctcgagacgctggcgaaggacccggagagcgtcgtccgcagatccgttgcattgaacaccaacacgcctgttgccacgcttcaatcgctcgcgacggatcgggagagcagtgtccgacaggccgtggccgggaacgggaacacgcctccggccgcactcgaagcgctcgcgagggacccggagagcgaggtccggagcgccgttgccgagcatcggaacacccctgcgtccgcactcgaagcgctcgcgagggatcaggagagaggtgtccgcagtgccgttgcatggaactcaagcacgcctattgccacgcttgaatcgctcgcgaaggaccaggagagcgatgtccgcgaagccgttgcagggaactcaaacacgcctgttgccacgcttgaatcgctcgcgaaggataccgtgagcgatgtccgcgcaaccgttgcagggaactccaacacgcctgttgccacgcttgaatcgctggcgaacgacccggagagctatgtctgcagagcggttgcattggaactccaacactcctgttgccgcgctcgaaatgctggcgaatgacccggagagcggagcctaggaggacgactactagaacgtccgtcacgccgtggctgacacctcgaacatgcccacaaccgccctagacctgctggccagaccatgtcggcgatgtccgtggccgcacggccatgctcaaagagcaggacatctatgagaacggatgaacccaccgagatgaagaaggagtatggcgacacactccggaacggggtccgaggcaagtacttcgaccgcgtcgccgaaaaacgcatcgtattcctcgaccccgacgtggcgaccgtcttctcggacagcaagcaggtcaacgacatcttgcgcgccatgatcgccgcgacgaaatcgggcaaaccggacgactcctcgccttagtcctccgttgctcttcttttggggtagcgtcacaagtgtcgtgtctgtgatcacctaccccatcgttctggaactggagaaagacgggcgcaccagcgtttacgccccggacctgccggggtgcgcgagttggggcgagacgcgcgagcaggcgatcgagcgcatccgcgaggccatcgaattgtggatcgaatccgcactcgaagacggcgacccgctcccgcaaccgggcgggacggtggcgtacgtgcagatcgcgagttgacgcggagcacaggtccagggccatgaccgaggttcgctatccgcccagattctctccatcgggcttccctttgctgcacgacccgccggagccggtacagagcggggacccgaatgcctggaggattccagttctcggtttgcggatcattcgtagctggtcctgttactacattccgcccgaacccactcgggaagagttgcttgtcaggcaagcgtctgaacggggccccgttccggaatccgagtgggagccttacgagtacgtcgctagcattcgcgagtcgctgacaaagatcgtcctaggtccatcgcttcataacaaactgacactccatccccttgatcccttcgaattgaccatctgtctggatggcgagtgggccgaactgacgctcaccgaaatcgaactcgacttcgacgttccggccaacgccatcgttggattggtgatcagcgacaaaaccttcctcgacgtcatccactggatcgaagccgcttcagccaagaaactggagtgagtcacatctcgtcgtcgccgcaaggtccgggtgccatgggttcccgacccgatcgggccggtcatccgccaacggggcgacgggtcggaacccatgaaaaatccgccacataagaggcacctcgtcgcgcgaattccggtttataatcggaccctatgaagttcggagtccccattctcgccttcggcatgctttcgtccgccctcctgctcggctgcggagggagcaccggcgaggcggccaccggtggcggcacgcccggcgggccgatgaccgccgcccaggccctcgcccagctcaacgagggcaacgcgcgctacgtccaccgaccggcgaccgcaccccaccccacccgacacgagcgggccgagaccgccaaccaccaggagcccttcgccctcatcgtgggttgcgccgactcgcgcacctcgccggagatcgtgttcgaccagtcccttggagacctcttcgtggtccgcgtggccggcaacgtgattgacgacttcgcgcttggaagcatcgagtacgcggtcgagcacttgggcacccgcctgatcgtcgtcatggggcacgagcgctgcggcgcggtcaccgccgccatggaggacgacgacgcgccgggctacatcggctcgctggtccgggcgatccgccctgccgtcgaggccaccaagggccacgaaggcgacccgctggagaacgcgatcgtcgagaacgcggcgcgcgcggcggaggacatccgcagcaaagcccacctcaccgccgacacgcaagtcgtcacggcctactacgacctggacacgggcgtcgtgcggttcgactaagcgccgtcgaagcggcccatcgctcggaacttcgcgtagcgttgctcgcggagcgtccgaccgtcgagcccggtcagggcgtcgaggtgctccttcaccgcgtcccgcacggcatggatggcctgcagcgggtcgcggtgcgcaccgcccttgggctcgggcacgatggcgtccaccaggccgagttccagggcgctttcggccgtgagccggagcgccgccgcagcctgcggacccttctcggggtcgcgccaaaggatcgccgcgcacccctcgggcgggatgacgctgtaaatcgcgtggtcctgcatcagcacgcggttacccaccgcgatgccgatcgcgccgccgctgccgccttcgccgatgatcaccgacaccacgggcacctcgagctcgaacatcttcatggtcgaggcggcgatggcttccgaaataccccggctctcgctttccacccctgggtcggcggcgggcgtgtccacaaaggtgatgatcggcatgccgaagcggcaggccatatcgaacaagcggatggctttccggtagccctcgggcttggccatgccgaagttgcggaactgcctttcttggatgttgcgacccttttggtggcctacaaccatcaccggcctattgttgaaaaatcctggacccccgacgatcgcatggtccgcaccataccgccggtccccgtcgagttcggtgaactcggtgatcagggccgtcacatagtcgagcgtgtaggggcgtcgctcggcccgggcgaccagcgtcttttcccaaggtcccaagcggctgtagcggacgtcaatgtagcggtctcgccgggccttgacttcggccaacctgacgcctagttcgtcttgcttgtcctcgggcgaggtggcgatgagcgcttcgatcttggcgattgcctcgtccaattcgatgaggggcttttcccactctttccacgttttagccattcaggtgccctcccagcgacttcaccaatcgcgtcagcgtcggccgcatctctttgcgcggaacgatgcggtccaccatgccgtgctccaggcagaactcggcggtttggaagttgtccggcaccttgctcacgcccgcctgtttgctcacgcgcgcccccgcgaagccgacaagcgccttcggctcggcgagaatcacgtccaccacgctggcatagctcgccagcacacccgccatggtcgggtcggtgaacacgccgagggtcgggatgccgtggtcgcggcaacgctggacggcggcaacggtcttggccatctgcatcagcgagagcagcccctcttgcatccgcgcgccgcccgaggtgcaaaacagcacgaccgggcacgcgtgctccacgccgcgctccagcgtccgcgcgattttctcgcccgctacggagcccatggagccacccataaagtcgaaatcggcgaccgctgtggccaccctgcggccccccaacgcggcgagcccggacacgacgctgtcgcccgcgccggtcttggccctcgccttggagagcttgtcggcgtactcgggaaagcccagcgggtcgctcgacgccagcccggtgtcggcctcttcgaacgagccggggtcgaacgtgagctcgatgcgtttggccgcgcccagccggtggtggtggctgcaattcgggcacacgccgagcgcctcgtcgagttcgctcttcagcaggatttttttgcacccgaggcactggcaaaacgccccgtcggcgccccgtccttccgtccgcatacgccgggagcataccttgcggacgagcgaagcagagcgggcccggccttgcggaccgagcccggaatctctaagcggacccgttaggacccgcgacgttgacccgaaggtccattcctgcggccccagttgcctgagaccttgttgagggagctaccgcaggcctgatctgatacaggtccataatacaccaacttgccgggaagtcacaagtcctatgagccaattcacaattcttggtctcgatctcggcccttcctcgatcggatgggccctcttcaacggaggtgccgacggggtgccgaccgaactgatcgatctcggcgttaggcactttgaagaagttgccgaacccaagaccggcgtcttgctgaacaagaagcgccgcaccaagcgcggtatgcggaagaacattcggcgaagacgagagcggctcgattcccttttggcagcgatgcgccaaggtgggctcgcgccaacgggccaacacccgttcgcagagtccggcgtcgatcccttggctgcctacaggacccgggcgcgggcagtcgaagagcccgtgagcctagaagaactgggtcgcgccatttaccacttggctcggagacgcgggttcctctcaaaccgcggcaccaagttcgcccggatcgccaacctacaggaagtcgccaatctcctggccgagcaagagggggaacgagagtcgaccgagcgcggcaagaagcgcaacgcagaagaggaggagaaggcgaaggaggagggcgtgatcctgaaggagatcaccgagttgcgaacccagttggacggcaggacactcgggcagtacttcctccaagaactggaggctggccgtggcgtgaggggcagacacacgcatcgcgacatgtacgaggacgagttcgagcgcatttggtcgtgccagtccagccaccatccacaattgacccaagagctgcgtgcccgaatctatcgggccatcttccaccagcgaccactcaaggagcagcacggattcaagggcttctgctccatggagccccaacggctccgagcccagcggagtcagctggtcgcacagaggtacaggtactggcaggacatcgtgaacctgaaggtgcgtgagccggacgacgttgaacaccgacccctcacccgagaagagcggttgagcctggcacacttcttggatgggcgagtcgaggccacgtgggaggctgttcgcaagcacctgcaacttgccaaaggcaccgacttcaacctgaagaagtccaaagaccagctccgcggcaactctaccgccgtccggcttgccgcgatcgccaccgactggggttcgatggacgaagcggctcgcgaaaggctcgtggaaactttgctgacgatcagcgaccgtggcaagctctacctgaccatgagggagaagttcggttacgatgtggagaccgcctaccgattagccaagctcgaactcgaagacggcaccgccgctctaagctctcgtgccatgcgccgcatcctgcaagcgctcgaacaaaggcccgagaccgcgacgatgtacgaggcacaacttgccgctggctacacgatccgcgaagtgcagcaggcattgcgcatcgagcgggctcccaatcggctggagatcaccaacccccgcgtgcgcaagggtttggcgcaactccgtagggtcatgaacgccctgatcgcaaagtacggacggcccgatatcgtccgaatcgaactcgcccgcgacctcagcctgaacgaggatgagaaaagaggcctggacaaggccaagaagcaactggagcgcgagaacgccgaagccgatcgctggctcagggaccaaggcattcagaacccttcgcgctccgatcggttctggtaccggctcgccaggcaatgcgggtgggtctgcccctacatnncagccgatcccccaagaactcgcgagcacgagccgcttccagatcgagcacatcgtgccctactcccgctgtctggacgactcgttcaacaacctcacgctctgcgagtcgcaaacgaaccaggagaagggcgaccgtacaccctgggaagcgttcggccaaaccgccgcgtgggaggacatggaggctcgcgtccagcagtggagaggcatcggaacggggaggaagaagtccctattcctgcgacgggaggccccgccagaggaccaaatggtcgcacggcaactcaacgaaacgcgctacatgtcccgcaaggcgatggagttcctcgagccggtggtcggcagggtggaagtgaccaagggaggcgcgacggcgatgctccgcgaacactggggtctgttccacgccctcaacaccgagggcgaaaagaaccgcgacgacctgcgccaccacgcggtggatgcagtcgccatcgcgttcacgacgcgatccgtgttcatgaaggcgaccgcgcaccgcaagcgccatgcggacggcagggtgggcaagatcactccgctctcggcggagaccgtccctgcggcgccagagtggcttcacgacgccctgaaacaacggttggcctcaatggtggtcagccacgaagcgacgcgcaagattcgagacgcctttcacgaggaaacggcctacggcatgcgggacccgaatgcgaaagtcttccactaccgcaagaacctggtcgacctcaccgcttcggccatcgccgacatcgcagatcacggtctgcggcgaagagcagaggagatcctcaaggcaaccagcctgcctccgaaagaagcgttcaaggaagggattccgatgggcacgacggtcgcccgacgagcgcgtctcgtcaagcccatgcctggggccaagctgcttgcagtgcccaacgacaacccgaccaagttctatcctttggggaacaaccaccacgtcgccatcttcgaggacgaacgaggcaagcgagtgggagtcttcgtttccatgctggacgcagcccggcgcctgcggcgcgtcaaggcgaaacaccctgtggacaccaacccgccgagtccaggattgaggttcgtgatgtggatcgccgtcaacgacactatccttctgccggacgatgatggtccgggcctctatcgggtggcgtctctctggtcaacaacaaaccagatctgcctctatgacttgaagaagtccaactccagtggttccgaaggccgattgctcaaaggcccgaacacgttgcgtgcggtcaaggtcgaggtggacccgatcggcggggtacgggaggttccggagggcaagttgtgagcctacgcgtggtgtcggtggcgggaccggccagcgtccaccgctggcggggatgcatggtcatcgagaaacccgaggacgcgggaggcaaggtgcccctcgatgacatggccgtcctcatcttggacggtcccgagatcgcgctcactcacgacctcatctctgagtgcgcagccaagaacatcgccgtggtcacgtcggactcgcgtcacctcccgaacggcctcctgatgccgcttgcaggtcactcgaaccataccgccgtcctgcgccaacagatggaagcctcgctgccctccaagaaacgcatctggcaggcgattgtcaagcagaagattgcgtctcaggccgacttggtgcgctcggttggacaggacgacggccctcttcgggctatggcggcccgggtgcgcagcggcgaccccgacaacgtggaggccacggcagcggcggtcgcgtttgaactcgtgttcggctgggcgtttctccggaaccgggacgaacccggcctcaatgcgatgctgaactacggctacgccatcttgcgtgccgcagtcgcccgcgcagtcgtcggtgcgggcttgcatcccgcactgggtgtccaccatcgcaaccgctccaatccgctctgcttggccgacgacgccatggagcctctgcgaaccatcgtagaccgcgtggtctacgacatcgccgatggagggccaacggtggatgacctcgtgccgcccgtcaagcgccggttgatcgcctgtctcgggtggacggtcgagcaagggggcgtccgcgtgcccctgctcgtcggcctcgaaaggtatgcggcttcccttcggcgcgcgctatgcgagggagcgccggttgaggtgatcgtccccatcttcgattcgacatgaggatcagcggattccgactcatgtggttgctcgtgatgttcgatctgccggtgacgacgcggactcaccggcgaaactacaagcggttcgtggacgaattgctcgggcagggcttcttccggattcagttcagcgtgtacgcccgcccttgcgccaccgaggaaaacgcagccacggagttccagcgcgtgacctcggcccttcctccagcaggcgaggtccggattctcaagttcacggacaagcagtgggcgcgtatggtcaacttccgcgcgcgcaagcgacgggccatcgaagaggcgcccgagcaattcacgttctttgaccggggctcggacgacgaaggttgggacgggccagatcctggattcctggaggcgactcagggcgaaggtcccccgccaccgcgccctcccacagagcccgagccgccaaagccgcccgattccgacgccaaacgacgaccgaagctggatcaggccgggttcgacttcttcgactgactgacgaaaaaacgccgccagacgggaggagccccagctctggcggcgtcgttttgtaccctggtttccggttcgcgccggactccagacagtgtatcagatcaggctccgggagctacccccaactggccggctgcgttggccatggcgctgccgagtgtatcagatcaggctccgggagctacccccaacgcctttcgaggggggcgaacggtgtttggtagtgtatcagatcaggctccgggagctacccccaacaacaacaacgttcttcgctgggcaggggtgagtgtatcagatcaggctccgggagctacccccaactcgcgacggtcgggtggccgccgcgccacgagtgtatcagatcaggctccgnnggctccgggagctacccccaacaggcgggcggcgcgatttcccgcgacggttagtgtatcagatcaggctccgggagctacccccaactacgggaggccgttgcacacgccgcgctggagtgtatcagatcaggctccgggagctacccccaacatccaagcatacggcaccggcgcggccctcagtgtatcagatcaggctccgggagctacccccaacggtcccggaggaccaccactttttcatagcagtgtatcagatcaggctccgg

SEQ ID NO: 2064 - DNA, 23438 bp, synthetic construct
  source 1..23438: mol_type = other DNA
  misc_feature 1..23438: note = Synthetic
tgccgagcgcgagcagcttcccgccctcgatcttgtagaagccgccggccttggcggcggcggccagcagcggcggcaccgtcttgccctcggccttgagacgctccgcgaaccagtcggcgcccatgcggtcgatcagctcgaacggaccccatttccacgcatagcccatctgcatggcccgatcgaccgaaacgatgtcgtcggcgatcgccggcaccagcgaggcggtgtagggcaggagctgggacagcaccttccaggcatactgcccgccgcgatcgggatgctcgaccacggcgcgcaggccctggcggccggcctcgacgctctcgagccgcgcttcggccttgggccggaactgcccggtcttgagatcgatcgcctcgagcgtcttgccgccatgctcgtcgcgcagcaggcgatagaaaccgcccttgcccttgcgccccgtgtagccgtcggcgatcagcttctgcatcagcgggaagtcgcgccggatgcgcaggtaatcgtcgcccttgggcagcgccttcgccatggcgccgtcgacatggggctgcaggtcgaggcccgtgaggtcgagcaggccgaacacgccggtcttggggatgccgagcggcttgcccatcacggcgtcggcttcctcgatcgtgaggcccagatcgagcgccgccgtcaccgcggcctgcatccaatagacgccgatgcggttggcgatgaagcccggcgtgtccttgcagcgcacgacgcccttgccgagcgcgcggtcgccgaaggcctcgatcgcggccacggtcgcggggttggtcttcggccccgacaccacctcgagcaggcgcatatagcgcggcggattgaagaaatgggtgatgacgaaatcgcgcgcgaagctgtcggagccgccctcgatcagggtcgcgagcgggatcgtcgaggtgttggaggaaacgaccgagcccttcttccgcaccggctcgagcttctggtagagcgagcgcttgatctcgatgttctcgagcacggcctcgacgatccagtcgacgtcggcgagcttggccagatcgtcctcgatattgccgggcgtgatgagcgcggcattggccggcagcatcagcggcgccggatcggtcttgagcagcttctcgaccgcgcctttggcgatggcgctgcggtcggcggcgggcttgccctccttgtccttgggcacgatgtcgagcagcagcaccggcacgccggcattggcgatctgggcggcgatgccgctgcccatcaccccggcgccgatcacggccgccttgcggatcgcaagcccgtccgtcgttccggatgtcttggccatgggtcagaccgcctcgaggatggtggcgatgccctggccgccgccgatgcactgggtcgcgagcgcgaacttcttgccctcgcgcgccaggagctgcgccgccttgccggtgatgcgggccccggtggcgcccagcggatggcccagcgcgatggcgccgccatcgaggttggtcttgttcaggtcgagcttgagatcgtcggcgcaggccaacgcctgcaccgcgaaggcctcgttgagctcgatcacgtcgagatcgccgaccttgagcttggcgcggtcgagcgccttcttcgtcgcggcgaccgggccgatgcccatgatctcgggcgcgcagccggcgacgctgatgctcttgatgcgggcgagcggcttcagcccatgggccttggcatattcctccgaggtcagcagcaccgccgaggcgccgtcggtcaaaggcgaggagctgccggccgtgacgctgccgtccgcctcgaaggcgggcttgaggcccttgagcccctcgatcgtgctttcgggccggatgcagccatccttggcgacgatgtcgttgccggcgccgaccggcgcgatctccttgtcgagcttgcccgccgcctgggccgccgccgccttctgctggctcgagagcgagaaggcgtcctggcggtcgcggccgatcttgtatttgcgcaccaggttctcggccgtgatgcccatcgccatataggcgccgggcaccttctcggccaagcccggatggggcatcgggttgaagcccatcatcggcacgcggctcatggattccacgccggcgcagatgaagacgtcgcccgcgcccagcgcgatggcgcccgccgcgttatggatgccctgcatcgaggagccgcagaagcggttgatggtggcgccggccacgctctgcggcaggcccgccagcagcaccacgaggcgcgcgatgttgaaaccctgctcgccctcggggaaggcgcagcccatctgcagatcctcgacctcgccggccggaacgcccgttcgttccagcacggccttgacggccgtggcggccagatcgtccggccggaccttggcgagcgcgcccttatgcgcgaagtggaacggcgtgcgggcataaccgacgatgacggcggagcgggtcatgcgggtttcctttcggtggcctcggcctggaggactttcttgtcgatcttgccgacggcggtcttgggcagggaggcgcggaactcgaaggcggtcggcatctcgatcggcgagagcttgtccttgagaaacgcgatgaggatcttgtcggtcagggccgtgcccggcttggcaacgatcacggccttcacggtctggccgcgataggggtcgggcatgccgatcacggcgcaatcggcgacgtcgggatggcggtagatcgcctcctcgatcagccgcggatagaccttgtagccgctggcattgatcatgtccttgaggcggtcggtgatgaagacatagccgtcggcgtcgatatagccgacatcgccggtacggaaggcgccctcgacgaagctggtcgcggtctcgtccgggcgcttccaatagcccgccatcacctgcggcccgcgcacgcagatctcgccgcgctcgccttgcgccagcaaccggtgcggcggctcggcgtcccggatctcgatgacggtcctcggatagggcaggccgaccgagccggcgcgcccgccttcgaagggcgggttgcagcagaccacgggcgaggtctccgacagcccatacccttcgaccaatctggcgctcgacaggcgctcgaagcgcgcgcgtagctcgtcaggcaggggcgcgccgcccgagatgcagaaccgcagcgagtccagatggaagctcgcgatcttgggatggttgacgatggcgttgaagagcgtgggcacgccggcgaagaccgtcggcttgcgcttgccgatggtctgcagcatgcccttgagctcgaagcgcggcagcaggacgatctcggcgccgacccggatgctccagttcatcaccacggtcatggcgaagacatggaacagcggcagcacgcccagcatgatctccggcggcgcgtcggctccattgccgaccgggaaccagaggcggcattgctcggcattgatatagacgttcgcgtgcgtgagcatcgcgcccttggggatgccggtggtgccgccggtatattgcagcagcgcgagctggcgtgagggatcgatcgtgggcgggctgaagccgccgccattctcgacgagatcggcgaagcgcgtgtggcgatcgtcgcgcggcggatcggccagggtccggcgcatggcgatctggtagaaccagcgcttgggcgtcggcaggagatcggccatcgggcagacgatcaggcgcttgagccgcgtgctgtcgaggagcggccccagcttgttgtagagcatggccagatcgagcaccgccatgacgtcggtctcggaatcctcgacctgccgcgtcacctcggtcggcgtgtagagcggattgaaattgacgaccgtggccccggtcttgagcgccgcgtaatagagcacgacgaagtagggacagttcggcaggaacaggccgagcttgacgccgggcccgacgcccagggccgcgagcccgaccgccgtgcgatccaccagccggcccagctcggcataggaggtgcgccgtcccatgaaattcagcgccacgcgctcgggccaggtggcgacggcatgatcgagcagggcatagaccggctgcggctcgatcgcggcgttccagtccacatccgccggatagctcgtcagccagcgcggcgccggctcgatcgagggcgagaccagggaagcggtcatgagcgtgaagccatggtccggggaattcccttggggaaggggtcgtcgggaggcccgcgccgctttgcgcgactcgggatgcctcctcgcccctaatgtggcgaccgtccatgctggcgcctaggccgtaaaagctttgcttaaatgcaatctatcggaggcgggcggcctcgagcggcggacgcgggacgctcgaaggcatatatataataatatcaatatgttacggaatcgcagcggaagcggccgggccgtcacccccagctttcggccatccggcccatggcggcggtcacgaaccgacgcggcaggaagcgggcgaggcaggcggcgagatggccttgcgaacccaccagctgcaccggccgccggccgatcgcgtcgagggccacgcgggcgaccgcctcgggctcgtcgatgcgcgcgaaccgcggcagcggcatgttcgcccgctcgagccaggccgtgcgggtgacgccgggacagagcgccaggagatccatcggctcatggcgcagctcgtcggcgagggcttcgacataggcccggaggaaatgcttgctggcggcgtaggtcgccagatagggcatcgggaagaaggcgagcgtgctggcgacgtagatcaggccggcgcgatggccgttggcgcgggcgcgctcgagcatgcccggcgccagcgcccgcgtcagcgcgaccggcgccaggatgttcaccttgacgatggcctcgtcgctttgcgccggcgtcgccggtgccagcgccttgccgaagcggccgaagcccgcattgttgaccagcaggtcgggctcatgcggctcggcccaggccgccagccgttcgagggccgtctcgctcgcgagatcggcggcctcgaactcgaccttgcgggcattgctggcgagctcgtccgccagcgcctgcaggcgcgtgcggtcgcggcccgtgagcagcaggttggtggaaggcggcagggcccgagcgatcgcctcaccgatgccactcgacgccccggtgatgagggcggttcgatacgccattcgagattccccttcagcctggtgacgccctgcccctgatgccgttgccctgggacccttccccgacaccgtcacgaagctgttcctgtcacaattgcatttaccggcggccttgggaatgatgccgcctccatggcgtccacggggcatccaaggcccggattctcaacggttctgccccgccggacgttccgcccgcagcaacggattccacgatggcccagttccgcaccctcgatcagctcgatgtcgccggcaagcgcgtgctgctgcgactcgatctcaatgtgccggtcaaggatggccgcgtcaccgatccgacccggatcgaccgctcttccgcgacggtgcaggcgctgatcgaccgcgacgcgaaggtcgtcatcctgtcgcatttcggccggcccgacggaaagcgcgtggagtcgatgtcgctccggccgatcgcggaggcgttgggcgtggcgctcggcggacgggcggtggcgttcgccgaggattgcatcggccccgccgtcgagaaggccgtcgccgcgctcgagcccggccaggtgctgctgctcgagaatctccgcttccacgcggaggaggagaagaacgatgcgggcttcgccaaggcgctcgcgaagctgggcgatctctatgtcaacgacgccttctcctgcgcgcaccgggcccacgcctcgaccgaaggcatcgcgcatctgctgccggcggcggccggcctcctgatgcaggccgagctcgaccatctgacgcgggcgctcgagacgccgcagcgcccggtggcggcgatcgtcggcggcgccaaggtctccaccaagctcgatctcctcggcaacctggtgcagaaggtcgatctgctggtgatcggcggcggcatggccaacaccttcctcttcgccaacggcatcgccatcggcaagtccctggccgagcgcgacatggcggacaccgcgcgcgacgtgctgaagaaggcgcgcgcggccggttgcgatattcttctgccggaggatgcgacggtggcggcgaagctcgagcccggcgtcgagagccgccatgtcccgatcaccgcggtgccggccgatcagatgatcctcgatgtcggcccgcatacggccgacgcgatcgcgcagcgcctcgagagctgccgcacgctggtctggaacgggcccgtgggcgccttcgagacgccgcccttcgatgccggcaccacgcggctcgcggtccgggtcgcggagctcacgcgccagggccggctgctctcggtcgcgggcggcggcgacacggtggcggccttgggcagggccggcgtcgtcaatgcgctgacctacgtctcgaccgccggcggcgccttcctcgaatggctcgagggcaagacgctgcccggcgtgaaggcgctgatggacgcggcgaagaagggctagcgcccgatcatctccagcagcacgagcgtcgccgcgccggcgaagacggccagcagcatgttgcgccggctgacgaggaagacggcgagcgcgacgccggcggcgagcatacgctcgcccaagggcgtatgcccgagcgcccccagcggcagcaccagcatgcgggcgatgaggccggccagcatggcgtaggcgacggccgcgacccagcggaacagcggtccttcgagcctcatgccgccacccagcgccacgcccagcccgcgccacatataggtgacgacgaaggcgccggcgatcagcagccagatcgcgttctcggtcatgagggctcgcgggccgcgctgcgcgcctcgagccagcgcgcgagcggccgctccagcaggaaggccgcggtgccggcgacgagccccgtcagcagcaggctccagtccggcgtcagcagatggaacagcggcccgctgacggcgcccagcaccagcggcaggacgcgggcgcgctgcgccaggtcgaccgagaacaccagcatgaaatagacgggattgaggaacagcaatcccagcccgaccgtcggcggcagccagtcgaccatgaggaacccggccgccgtcgcgaccatggtgaagctccagagcacggcgacgaagccgaagaagaagggcagccgctgctcggacggcagcagcgggcagcgctgcatgcaggtcgcccaggcggtgatggcgatgaaatgggcggcgaggtaatagcgccagcgcggcgtgccgggatggcgcaggaacggcatcagcgacagcgtcatcggcaggagccgcaggcccgagagccagaccgcgagcaggatcgcggcggccgaggcgccgatgccgtagagctcgatcagcgtgatctggccggggagcgcccagcccgtggtggtggaggcgaggctcatcggcagggtccagcccgattgccggcagagcgagccgaagcccagaaaggaggcgcccagcaccagcgccggcgtgctcgcggattcgcggcagccggcgaggaaggccgcccgccggttggggtaagaagagggcgatgctttgtctattcgtgccatcgaacctagattgacgaggggcatcgacgtgtagccgggcggcgcgtcgaaccgaacggaccataaccaggatcgatcccatgcgccaagccggcttcccgacgcgtgccgcctccctcctcctggccctgatgctggcgctggcggcaccgccgccgggacaggccgcctcgcccagcgaattgcccggcacccgcatccaggtcgatccggcccggctgccggcacccgacaccagcggggccgtgagcaatccctcggagcgggtggccctctcggcgcatccgccgttccagctgccgccgggcttcgcggtcaatctcttcgccggcggcttcgatcatgcgcgctggctggcgatcgccccggatggcgcggtgcttctctccgaggcgcgcgagggacgcatcacgcgcctggtcgacagcgatggcgacggcgtggcggattcgaaacgcgtgctcgccgacggattccgccggccgcacggcatggcgttccatgacggcatgctctacgtggccgatatcgagggcatctggcggatgccctacgagccggccgcgaccgcgcccaccacaaggcggcaacgcatcacgccgcagggcgccttcggcgagggttccggccattggacgcggaacctcgtcttcagccccgacggctcgcgcatctatgtggcgatcggctcggccggcaatgtctggcccgatccgctgccgcgcgcctcgatccagagcttcgccagcgacggcagcgggcagcagacggtggcccgcggcatccgcaatccggtggggctcgccttctatcccggaacccgcgacctctacacggtggtgaacgagcgcgacgggctcggcgacgggctggtgccggactatctgacgaaggtgcaggcgggcggcgattacggctggccctatttctatatcggcaatcaccgccagcccgagatcgacatcccggcggatgcgagcggcgacgaggcgatcgtgcccgacctgctgttccgcgcccattcggcgccgctggggctcgtgttctatgacggcacgcagttccccaaggaatatcgcggcgacgctttcgtggcgctgcacggctcctggaacgccggcaagccgcagggctacatggtggtgcgggtccccttcgcgaacggcaggcccaagggctggtacgagcctttcctcaccggcttctgggtcgagggcagcgacccgccccaggtcttcggccgccccgtcgggctcgcggtggcgcccgacggcagcctgctggtggccgacgatgccagccagtcgatctggcgcgtgagttggaagggcgtgagcggggaatgaccgccggttcggcgccggggcggacccggcttgtcaccccggggtcgcggcgtcacattaccggccatggccgacagacccccgccgccggcggcgaacccgcccgccaatttcgtccgtgcgatccccgagggcgacagccgccagcggctcgtctgcaacgattgcggcttcatcaattacgagaacccgaaggtcgtggtcggcgccgtggtgcgcgagggcgggcgtatcctgatgtgccggcgcgcgatcaatccgcgccagggattctggaccctgcccgcgggctatctcgagctcaacgagaccaccgccgacggcgcccggcgcgaggcctgggaggaggcgcgggcgaagatcgagatcgacggcctgctcgcggtctattccatcccgcggctcagccaggtgcaggtgatctaccgcgcgcgcttcgccgagcccgggatcgagcccggccccgaaagcctcgaggtcgggatgttccgctggggcgagatcccatgggacgagatcgcgttcccgtcggtgcgctgggcactcgaccattatcgcgagatcggcgagacgccacatttcgccgcccgcagcaatccgccgggcgagctggggaatttctgaccggcgggctataccgttctgctgaagacatcgtccaaaaagcgaagagggcggccggagccgccctcgcattttgtgcgccacccgccgaagcgagggcacttgttaacggagggaccgcgttctctcgtgagctaggctcaaccactgtcctgaccgttcacaacctatcattgctttgataagggatattgtcaatcggcatccagtgcggaatcatccctagcaagaagaagaaaaacacgcttcgcgtgtgcgaaaagctgcgggggccttatgaagcggaagggcattgcttggcgcctgggtctcgatctgggcaccaactccatcggctggtgcgttttcgacttgtcgaaacccgacaaagagggacgccgccatcccatcggcatccggcggatgggcgtccgcatctttcccgacggtcgtgatccgcagtccggcgcctcgctggccgcgagccggcgcgagccgcgcagcgcccggcgtcgtcgcgaccgctttctcatgcgtcgggccacgttgctgcatgcgctgatccgtcatgagctcatgccgggcgatccggccgcgcgcaaggcgctcgaagggctcgatccctggcggctgcgtgccgaaggcctcgatcgggcgctgacgcgctacgagttcgggcgggcgctgtttcatctcaatcagcggcgaggcttcctcagcaaccggaaggccgatcgcaaggccaaggcggacgagaagcaggggatgaaggccggccagaagaagctggaggaggcgatcgccgcacgcggagcccgcacgctgggcgagttcctgcatcgctatggacgcgagaaccgctcgccgcgcggcggcgatgagaaggaatcggaacgaggcatccgctttcgcgcccggatcggccaaggcggcaaggccgaatgggatttctatccgacacgcgccatgctgcggcacgagttcgacgcgctctggaacgcgcaggccaaatatcatcccgacctgaccgatgttgcccgggccgagatcgagaccatcatcttccgtcaacgtccgctcaagccggtcagcccgggcccctgcacgctcgaggaaggcgacgagcgggcgcctctggcgctccccatcgtgcaggaattccgcattctccaggagcttgccaacctcgagctggttcgccgcacgaaccccacggaccggcaccgcttgacgatggagcagcgtgacaggctgctcgagaagcttctcatcaaggagaagctgaccttcaagcggatgcgcgcgatcctgggcatcgactcgatctgggccttcaatcttgagagcgaaaagcgcaaggacctgaaaggcgacaggacgtcctacttgatctccaagcccgaggcgttcggcgtccgctggttcacgctctccgacggtgagcggaacagcatcgtcgaatggcttctcgatatcgaggacgagccgaagctgatcgccaagctgacgaccgagttcgatctgacgcctgagcaggcggaacagattgccaatgcaccgctggaggacgggtatggccggctcggccgcatcgcgctcggaaagatcgttcccgagcttcgcgctggccgctcggatgatgggagaccgttgcgctacagcgaggcggtgcagcgcgccggctatttgcatcattccgacttccgtgacggcgagatcctcgacctgctgccctactatggcgacgtgttacgtcgttacatggcgccggtatcgagcctgacggcgcccgaggaggagcgacgtttcggccgcatcgccaacccgaccgtgcatatcgggctcaatcagctccgccggctgatcaacgcgctggtcgagcgctacggccatccggaggagatcgtcgtcgaacttgcccgcgatctgaagctgtcgcgggaagagaaggagcggatcgagaaggatcaggcggccaaccagaagaagaacgagatgcgccgggcgaagctcgcggaagtgttcgcgccgggccagaagccgcccggcgacgccatgctgcggatgcgtctctgggaggagctgaacctcgaagatccgaacgatcgcaaatgcatctacaccggaaagcagatctcgattcagcggctgttcagcccagaaatcgaaatcgagcatatcctgcccttcacgaaatcgcttgacgacaatccgtcgaacctgaccgtttcgatccgtcatgcgaaccgcgacaagggcaacctgacgcccttcgaagccttcggccatagcccgacgatcggtggcttcaaatacgagtgggatgagatcgtgctgcgggcctcttcattgccgaagagcaagcagtggcgcttccggcccgacgcgctcgacctggtgaaggaccgcgcgcgccgagccgtggaggctgcaaagggaacgctgacgaaggaggatatggacgacatcgagcgcagcggcgggttcctggcgcgccagctgatcgacaccgcttatcttgcccgagtcacgcggcaatatctctggaagatctgccatcccgataggacctgggtcattcccgggaccatgacggccctgatgcgacggaagtggagcctcaataatctattgggtgatcacaatcggaaaaatcgcgccgatcaccgccaccatgcgatcgacgcgttcgtggtcggccttaccgatcgttccatgcttcaggcgatcgcgggtgcggccgacgaacagcgcgagcgcgtgatcgacgacatgcccgacccgatcgactgggcgtccttccgcgatgatctgcgcgcggcgctcgatcggatcgtggtgtcctacaagccggagcacggcgtccagggtcgtctgcacgaagagacggcctatggtttggtcaaggagccggagcgggagggcggaaacgtcgttgtgcgcaaatccatcgagaacctgagcgaaggggaaatcgacaggattcgcgacaagaagcttcgcggccgtttgcaacaacatctcgcggctcggggagttcttgtcgatgattcggctcttgaagcggccaagagggcacagtcggaagctcgtaagggcaaagatcggcatgccatggaaagagctcagctcgagattgagcggctcaaagagaagcgtcgtaaagatcgcaaggatatcgccaaaggtctgaaagctgcgcttgtagagttcggtcaagacaatggtgttcgacgcgtcaggctagtcaagccggaagcagctgttgtcacggtccgtggaacgaatggaattccttataaggcctatagcgttggcgacaatcatcatgttgagattttccaacgcgccgacggatcgtggtcgcgcgagatcgtgagcgtattcgacgcgaatcggccgacctttgtgcctctttggagggcggacacatctaaccgcctgctatggtcgatatataagaatgacttgctgaagctatcgatcgacgagaagggtgacgacagcgataccggcagcacaacgggcgaagccaagcgagtcatgcgcgtcgtttcgatctgggagaactatctgcagctggcggaacacaaggaaacgaacctggcccagcgctatcgagatggcgagttcaagtggacatttgccaggtacgaacgattgaaagagctcggcacaagaaaggtttcagtggacgccttaggtcgcatccgcgacccccgctcaccgagatagacgaccgccatgctgggtcgcatcgtcgagatcgccgaggacggccgccatctggcggtggatcgcggtttcatgacggtgagcgcggccggggccgagatcggccgccttccgctcgacgatatcggcgtcgtgatcgtcaatgcccacggctgcacctactccaacaatcttctggttcgactcgccgaacgcggcgccggttttgtcgtctgcgcggccaaccacaacccggtagcctggctgtggccggtggtggggcatcatgcgcagcgctctcggatggaatcgcagatcgaggccggcaagccgctgctgaagcgcctgtggcaggcggtcgtgcaggcgaagattcgccagcagggtgccgtgctggcggcgctggcacgggagggcgcggaggggttcgatctgctggcgcgccgggtcggctcgggtgatccggacaatatggaggctcaggcagcgaggcgctattggccgctgctgttcgggtcggacttccggcgcgaccgcgatgcgcccggcgtaaacgccatgctcaactatggctacgccatccttcgatcggcggcggcccgcgcgatctgtgcctcgggcctccatcccacgatcggcctccagcatcgcggcgaggacttggcgctcgccgacgatctgatggagccgttccggccgattatcgatctgctggtcgcgaggctggccgaggccggcgttgacgaggtttcgggcgcggtcaagaagtatctggcaggcgccacctcgctcgacatggcgaccgaacggggaaccacgcccctctttacctgcttggagcggctgtccgcatcgctcgcgcgttcctttgaggagggcaagcctggcctcgacttccctttgacaccgttaccgctggagctgccggtcgtgccggcacgcgccgaagcgtgacggcggaatgctgagcggctaccgcctcatgtggatgatggttctgttcgacttgcccgtgttgacgaagaaggaacgcaaagccgcgacgaagttccggaagttcctgctcgatcagggctttgagatgtcgcagtattcggtctacatgcgcttttgcgctggcaaggagcaggccgaagcctattcgcgaagggtcgagaaggcggtccccggcacaggcaaggttcatatcgtctatctgaccgacaagcagtatgagaacatcgtgaccttcgatggccgcctcaaggaaacaggccggaaaaaccccgagcaatacgtgatgttctgatgatgagcgcgcgaacgaaccgcgacacgagcaagaaaaaagcccctgaatccaggggcttgtcgaagtttggagcctagctcacgagagaacgcggtccaaccgcaacatatccttagcgcgcttatatgaaaaaatcagcctagctcacgagagaacgcggtccaaccgcaacggtggccggacaagcgccttcatgctgcacagcctagctcacgagagaacgcggtccaaccgcaacggaggccgacacctcgtcggccggcgcgtaagcctagctcacgagagaacgcggtccaaccgcaaccgttcgcacgcggtcatgcacgcggtttacagcctagctcacgagagaacgcggtccaaccgcaacctggagctgtcgagcaaagagaccaccacaagcctagctcacgagagaacgcggtccaaccgcaacagcgtgtctccgttgatgtggtcaacaatcagcctagctcacgagagaacgcggtccaaccgcaacttgtagagcttctgggcgccgacaccgacagcctagctcacgagagaacgcggtccaaccgcaacgctgcccgactgcgcgctgttcatgtggacagcctagctcacgagagaacgcggtccaaccgcaaccacgcgactctaggcgttgccgctggtcatagcctagctcacgagagaacgcggtccaaccgcaacggaaatgatgcgtgccctgctcggtggtgcagcctagctcacgagagaacgcggtccaaccgcaacgcacgggggagtctgcttcgtcattggatcagcctagctcacgagagaacgcggtccaaccgcaacggaacaacttcaagctgcacagcaacaggcagcctagctcacgagagaacgcggtccaaccgcaacagcgcgtcagccaactgactgtccggcacgagcctagctcacgagagaacgcggtccaaccgcaaccggccgatccggcgggtttcggccccatgtagcctagctcacgagagaacgcggtccaaccgcaactggtgctcggagaggccggcctcttcggcgagcctagctcacgagagaacgcggtccaaccgcaacgccgccgcagcgcgggcagcgcgccgatttagcctagctcacgagagaacgcggtccaaccgcaacgctcgggatgccgagctcccgccgcaggagagcctagctcacgagagaacgcggtccaaccgcaacgccgtgcctccgcgacagattggcgaacgagcctagctcacgagagaacgcggtccaaccgcaacccgtggtcacagctcgtgacacccggcgccagcctagctcacgagagaacgcggtccaaccgcaacggtctgatcggccagggccttgcgctcggtagcctagctcacgagagaacgcggtccaaccgcaacgcttgggcggaccgttgcgcagagcgacatagcctagctcacgagagaacgcggtccaaccgcaacccgatcggcggcagggcttcggcaagggcgagcctagctcacgagagaacgcggtccaaccgcaacggtgatcaagaatgatgatggcgcgggcctagcctagctcacgagagaacgcggtccaaccgcaacggcccgctactacctgaaggcccccgacccagcctagctcacgagagaacgcggtccaaccgcaacgacaagcaagaccatgagcacagcggcggaagcctagctcacgagagaacgcggtccaaccgcaacagtggcaatcgtccggcgcgctccgtgcgaagcctagctcacgagagaacgcggtccaaccgcaacccgtggcctgcgcgggtttcagcgtaccgaagcctagctcacgagagaacgcggtccaaccgcaacgaagcatatcgggcgctggcaatcggcgagagcctagctcacgagagaacgcggtccaaccgcaacgcggcgacacgggcctgttcgctttcagccagcctagctcacgagagaacgcggtccaaccgcaacagtctacgactgccaattctcgatcacgctagcctagctcacgagagaacgcggtccaaccgcaacggcgagatcgctccgctggttgcggagcatagcctagctcacgagagaacgcggtccaaccgcaacgcatcgagcttggcgatgatgtcgccgtaaagcctagctcacgagagaacgcggtccaaccgcaaccgacgtgacgaacatgagccgccgcgaaacagcctagctcacgagagaacgcggtccaaccgcaacagctcggcatgcgaccgacgcgacgactggagcctagctcacgagagaacgcggtccaaccgcaactcagcagcagcaaccaggagcagcaccatgagcctagctcacgagagaacgcggtccaaccgcaacaataggaaaaagtcgtcggccagccgccgtagcctagctcacgagagaacgcggtccaaccgcaactcgccgaggagacggccgatctcaagaagcagcctagctcacgagagaacgcggtccaaccgcaactgccgggcgtcgttcgtgacctggcgcgtgagcctagctcacgagagaacgcggtccaaccgcaacagtggcaatcgtccggcgcgctccgtgcgaagcctagctcacgagagaacgcggtccaaccgcaacggcggcgggtctcctgcgtgtcccaccagaagcctagctcacgagagaacgcggtccaaccgcaacggtatcgcccggccagaaggtctccgccatagcctagctcacgagagaacgcggtccaaccgcaactgcggctccatcacagcacctccagggcgcagcctagctcacgagagaacgcggtccaaccgcaacggactatcccgccgcagttattggacggtcagcctagctcacgagagaacgcggtccaaccgcaacgcatcgagcttggcgatgatgtcgccgtaaagcctagctcacgagagaacgcggtccaaccgcaacccgggcgcgagggcgcagattcttctatcaagcctagctcacgagagaacgcggtccaaccgcaacggctctatggctcaggcttccccaagtcgcagcctagctcacgagagaacgcggtccaaccgcaacggctacagcccgctctcggtgttccgcaagagcctagctcacgagagaacgcggtccaaccgcaaccagccgaagcaacaggcccaacaggtcgatagcctagctcacgagagaacgcggtccaaccgcaacacccgctggagcaacgcaagctccaggttgagcctagctcacgagagaacgcggtccaaccgcaacaggtgctgacgaagcgggcggagcggatgaagcctagctcacgagagaacgcggtccaaccgcaacggtgaggctgggttgccgccacgccccaggagcctagctcacgagagaacgcggtccaaccgcaacaattcgaattgagcatattattcggcagcgagcctagctcacgagagaacgcggtccaaccgcaactggtcttggggtcatagtcggatggcctagagcctagctcacgagagaacgcggtccaaccgcaaccacgatcaccgtgtcggaaccgtcgttcgaagcctagctcacgagagaacgcggtccaaccgcaaccccgcatcttcgtgccatcgttgccacccgagcctagctcacgagagaacgcggtccaaccgcaactggtcgatcttcgccggcgtcgatgacttcagcctagctcacgagagaacgcggtccaaccgcaacagctccgaccagatgtcgttgacgagacgaagcctagctcacgagagaacgcggtccaaccgcaactgtatcccatgtagtcatcaatggcggggcagcctagctcacgagagaacgcggtccaaccgcaaccggggcgctcgtgtccttggtgacgcccccagcctagctcacgagagaacgcggtccaaccgcaacctctccgtctcggcgcagagctcgaacgccagcctagctcacgagagaacgcggtccaaccgcaacgtcagatacccgttgatgtcttccaggagcagcctagctcacgagagaacgcggtccaaccgcaactcttcaccgctccggggttctcccggcggaagcctagctcacgagagaacgcggtccaaccgcaacccctgccggccaaggtcgcgcgcgagatgcagcctagctcacgagagaacgcggtccaaccgcaacagccacagcgcttgattgtgaagcgccatgagcctagctcacgagagaacgcggtccaaccgcaactgtattcccaccactggccatgaactcctgagcctagctcacgagagaacgcggtccaaccgcaacttccgccttcagggcaatgccggcgtcggcagcctagctcacgagagaacgcggtccaaccgcaaccttgagggtgccgcgcttggggctggaattagcctagctcacgagagaacgcggtccaaccgcaacgcaaccgccgtccagtgcagcgcaacatcgagcctagctcacgagagaacgcggtccaaccgcaacaggcttgagactggcgttaaacaaaccgtcagcctagctcacgagagaacgcggtccaaccgcaactcatgcagcaccctcggttacaggcttgggagcctagctcacgagagaacgcggtccaaccgcaacccatgaagtcctcggcatccgcaacgacgaagcctagctcacgagagaacgcggtccaaccgcaacgccgcagcccagcgctcgatcgtcgcaacgagcctagctcacgagagaacgcggtccaaccgcaacgcccctcatgcgcgcgatcccataccatccagcctagctcacgagagaacgcggtccaaccgcaacagatcgagatcggaatcgctcatgggaagaagcctagctcacgagagaacgcggtccaaccgcaacggccaggatccgcgcctgcagcagctcatgagcctagctcacgagagaacgcggtccaaccgcaacagcagatagcgcgcctcggcttcggagatgagcctagctcacgagagaacgcggtccaaccgcaacaacgcgctcttgcggcatctcctgggaataagcctagctcacgagagaacgcggtccaaccgcaacgggccgatggttcgggcgattctcgatgggagcctagctcacgagagaacgcggtccaaccgcaacgcgtagaacttcgtgctgtagcccttgaccagcctagctcacgagagaacgcggtccaaccgcaactggccagctcgattcccacctaatgaattgagcctagctcacgagagaacgcggtccaaccgcaactctgccgatctgatccgaagcatcgaatacagcctagctcacgagagaacgcggtccaaccgcaactcggcctcggcgcggtagtgctcgaacagcagcctagctcacgagagaacgcggtccaaccgcaacggctgcggcgtagtggaggatggcgctggcagcctagctcacgagagaacgcggtccaaccgcaacatgaggccagtattcgcgtcgttgccgtcgagcctagctcacgagagaacgcggtccaaccgcaacgatcccgctgcaggcctggttcgacaacggagcctagctcacgagagaacgcggtccaaccgcaacagaaagagcctgctgcaaccctccagccgaagcctagctcacgagagaacgcggtccaaccgcaacgtactgagtctggacgccctggatcacagaagcctagctcacgagagaacgcggtccaaccgcaacgtagcgacctgggccttcgctttctccagcagcctagctcacgagagaacgcggtccaaccgcaacccagacgtcgtactgcccgacatcgcgataagcctagctcacgagagaacgcggtccaaccgcaacgcccagcagagcatcaatgtggcggccgacagcctagctcacgagagaacgcggtccaaccgcaacatcgcggatagagagcacggcgtcgcggatagcctagctcacgagagaacgcggtccaaccgcaacgagcttgctgccgtccgtgtcggtgagaccagcctagctcacgagagaacgcggtccaaccgcaacattggctgcgtccgtgcgcgcccactcctcagcctagctcacgagagaacgcggtccaaccgcaacaatcagtctttcgacgtggcctacatggacagcctagctcacgagagaacgcggtccaaccgcaacctggcggccgcgatggaagatcaaaggcctagcctagctcacgagagaacgcggtccaaccgcaacgtcgctcggcggatcatctcgcggaccttgagcctagctcacgagagaacgcggtccaaccgcaacgtcgtgccggtggacgatcctgcgttcaatagcctagctcacgagagaacgcggtccaaccgcaacgagatggaacaggagccaaaacctctcccgagcctagctcacgagagaacgcggtccaaccgcaacctataacgaagcgacgttcacacaactcatagcctagctcacgagagaacgcggtccaaccgcaacatcgcaatcgagggcatcgcacctcgtctgagcctagctcacgagagaacgcggtccaaccgcaacaccggacagggcatgtgcttaccgttctggagcctagctcacgagagaacgcggtccaaccgcaaccgtggccgtggcaagcgccgcagccagatcagcctagctcacgagagaacgcggtccaaccgcaacccccgacctcatcacggcaaccacggtcgcagcctagctcacgagagaacgcggtccaaccgcaacactctctaggttctcagcaattactggaagagcctagctcacgagagaacgcggtccaaccgcaaccgccggcgcgtcggtggtcgccggcgccgcgagcctagctcacgagagaacgcggtccaaccgcaacgcgtcggcctccgcctcgtcgagcttcttcagcctagctcacgagagaacgcggtccaaccgcaacgaacaagctcctgcaatcgaccttgggctcagcctagctcacgagagaacgcggtccaaccgcaacggcgcccgtcgcgacccagggctcgccttaagcctagctcacgagagaacgcggtccaaccgcaacgggttgagggccagctcgtcggccgagaagagcctagctcacgagagaacgcggtccaaccgcaaccgcgcagcatgacgaggctgccatcggccaagcctagctcacgagagaacgcggtccaaccgcaacctcagccagccgcgcgacttgcctctcgacagcctagctcacgagagaacgcggtccaaccgcaacctgatcacacgcacctcgtcgcgctcgaccagcctagctcacgagagaacgcggtccaaccgcaacagctcgagccatgactgcagtgcaggcatgagcctagctcacgagagaacgcggtccaaccgcaaccgaccggccatccttgagcgcatcgcgggaagcctagctcacgagagaacgcggtccaaccgcaacgccgagagaagctgcgccaaggggtgccgcagcctagctcacgagagaacgcggtccaaccgcaaccagcgaacgcttgcggatgttcgagccgttagcctagctcacgagagaacgcggtccaaccgcaacggcaggcctcaagaggggtgcgctcatgacagcctagctcacgagagaacgcggtccaaccgcaacgccggagtaggtcgcattgactcataacggagcctagctcacgagagaacgcggtccaaccgcaacatgcgatgcgtccgcgtgttgaggtctcgtagcctagctcacgagagaacgcggtccaaccgcaaccacggccctgagtttggtcgcgcggaactcagcctagctcacgagagaacgcggtccaaccgcaacagaacggcttcagtgtcgatctccccgacgagcctagctcacgagagaacgcggtccaaccgcaacagaccgatgatgtaggcgcggtgagccgcgagcctagctcacgagagaacgcggtccaaccgcaaccgactggcatcgcggctggcatgacgccgaagcctagctcacgagagaacgcggtccaaccgcaactgatcctccgcgctgtcgctggcggcctcgagcctagctcacgagagaacgcggtccaaccgcaacccctagggctctaatgctgcttaggtgtatagcctagctcacgagagaacgcggtccaaccgcaacaggcatgagctcaggttccttcacgatacgagcctagctcacgagagaacgcggtccaaccgcaaccccagggctgagccgggaggcaggggggcgagcctagctcacgagagaacgcggtccaaccgcaacaggacttcgatgcggctcgaaggcgaaggcagcctagctcacgagagaacgcggtccaaccgcaaccgcttgacgtagccctccagcatcaggcagagcctagctcacgagagaacgcggtccaaccgcaaccattccacatactcgttgttgagcgcgcgcagcctagctcacgagagaacgcggtccaaccgcaaccgcatgcctcatgcggtgcaacgtggccttagcctagctcacgag

SEQ ID NO: 2065 - DNA, 23087 bp, synthetic construct
  source 1..23087: mol_type = other DNA
  misc_feature 1..23087: note = Synthetic
gccgagcggtgcaccgaatgcggcacccggatgaagccggtctgcttgccgttgcgcgccaggtcgagctcaagaaaaaggcggctgcgttcggcagctttcatgtcggcctcccaggatcggatcgcatcggcgcgcactgtgcggcggacgcccgtgcgatcgcaagcgccacacggcgcggcgacggccgcgccccagcacaatccacaaccctgttttcgattggtcacagaacagccatagccccaagggcttgtggccgtatagactcacgacctctacctgcggttcccttgggagagggaccgaccgccatccggctcaccagctgtcgtcagcatcccggctccgcatcgggatgcggaccaagacaatgccgacgacgtccgttcacaccgccccggatcaaatccgttatgagtctgacctaatgtctttgatcaacgcaagatcagcctctaatgtactcgaatatttcgcgttttcaataaacttgctcgattgtcgaaaatttattttaggcaaaatgattaacctgagatggggccgcctgcacgcggctcgagccttcctcgccctggggattgccagcggttttgccactgccggccaggccagcgacaccctttcgccggcgctgctgcaggacgcggctcaggctttcgacgactccgcgctgcgggtcaacgatgcgcagccggccgacctggtgcgctggaccggaccgatcttcctggccatcgccgacggcgacggcctgcacgcgcgcgccgccgagatcgaggcgtcggtgcggaccctggcgtcgatcgcgcgcgtgccggtgtcgcgggtcgccgccgacgacccgcggcgcaacttcctcgtccgccccgccgccaccggcggccgggccgcctgccgcgccgccgtcgcgtcgcaggccggccgcatcgccagcgccgaggtcgagatctatctcggcggccgcggctcgctgacacgctgcatcaaccacgaggtgatgcacgccttcgggttccgctcgcacgcccatgcggcgctcagcatcctgagctacaagcagtcccgccagatcgacctctcggcgctcgaccgggtgatgatcgagaccctgtacgatccccgcctgcggcccggcatgaagcccgccgaggcggcgccgacagcctgcgccgttcttgccgagaagctcgggctgggcgcccgcgatgccggcgcgcaatgcggcagccgtgacgatggcggacagctggcgctgttcggccgccgtgcccgcccgaactgaccggaaacaccccgacctaatgtgatcaataagatcaaatttaccctctaacgaactaagatagctggaattttccaagccggactggctcatcgcttttgcagagaagtcattttcgagacgatggtgatggcgaccacgatatggcggcgccggatggcgcgaatggcgttgatggtcggcgtggcctgcgtggcaccggcggccggccacgccggcgacgagcccgtgcggctgtcgctggcggatgtcgccaatgccttcgatgacgccaccctgcgggtcaacaccgcgccggcgaccgagctggcgcgctggaccggcccgatctacctggcgatctcggatgcgcccggcatgggcaatgtcgccgccgatgtcgaggcatcggtgcgggggctggcggcgatcgcgcgcgtgccggtgacgcgtgtcggcggacgcgacccgcgcgccaatttcgtcgtgcgccccaatgccgggaccgtggccgggcgctcgccctgccgctcgtcggtcgactggaccgaggacggccgcatgctgcgcgcagaaatccacctcaatctggccaaccccgaccgcattcagcgctgcatcaaccatgaggccatgcacggcttcggcttccgcgcccatgcccatgccgcgctgagcgtgctcagctacacctacgccgaccaggcccagctcaccgccatcgaccgcatcatgctggagaccctgtacgacccgcgcctgcggccgggcatggccacggccgctgccgcgttggtcgcgtgccacatcatcgccgagaagctggccgccccggcggtccaggtcgctaccgcctgcctcgaccgtgcgccggcaccgaagcgtgcgctggccgcgctcggacggccgcggccatccggcgacgcgccggcgacgccctcgctgcagcccggctaccgcgacggcgggatgtaagcaggtgaggctcggccggggccaacacgcgcgtgacctcgcgccgattctgctcggtggcatggaggacgttctccatgttgaatgcgtgacgcagcgctgacgagtcgcggtgcgtgccttcagcgcaggaaggtcttctccgccgccttcatggccggcacgtcctgcagctcgaagatgtcctcgaccgagacgatgcggcggtcggcctgggcgatgccgccgtcgcggcggatctgggcgaagacctcctgcatggcggtgacggcggcgcggatggcgtggttgccgtagatcaccaggccgatcttgccggtcgccttcatcgccgcctctgtcagctcgggataggcggtcggcaccagggcgatcggccggctgccgtcccagcgcgccgcgaagtccatgacctcggccggcgtcttctgcttggagtgcaccaggatgaggtcggcgccggcggcgacgtaggcgtgggcgcgcgccagcgcctcgtccaggccggcgccggcgatcagcgcctcggtgcgcgcgatcacgacaaggtccgggtcgggccgcgcggcgcaggcggccgcgaccttgccctggaactcctccagccgcaccagctcctgccggccgccggccagcaggctggtgtccttgggaaagagcttgtcctccatcaccacggccccgacgccagcgcggccataggcggcgaccacatgcatgacattgatggcgttgccgtagccggtgtcgatgtcggcgaccaccggcagcgcgacgcgctcggcgatggcgcgggtcatgtcgagatgctgcgtcatcgacagcaggctggcgtcgggcacgccataggccgcgctgagctcgaagccgctggcccagatggcatggaagccggcccgctcggccagccgcgccgacagcgggttgtgcgccgccatggcatgcgccaggccctcgcgggcgatgatgtcacgcaatctgcggccggcagtcatgggcgctcctttacaggcagacacaattcggacacaaaaaaatatccaagaaacgcgttacggaaattaccaaaaatactaaaaatattctttctgtttcatatcatgaacttgatggacgtctttcatgtcgactaaaaatcgacggaaacgatcgcaaatttgcccatcgtgccctcctcactctcagcgggacgttggccgtccctgaatcaggcgcacaccatcatcatcccgagcgcagctcgggatgatgaagcaccgtcgcgttcactattactatattctttttaagagaacaagaagaaataccggtgcccacacgcacggatcgatcagcatcgtgtcagccccgaccgcaaaagcggcgagatccgatcatggcggcagcatattgccggcgccgaatgagaccgcgatcggtattcggaggactcgagcaatgtccaatctatggatgagcgccggcgccttcatggtcgcggcgatgatgagcatcaacgtgaccggcggcgtatcggccccgtcgtcgctcgtctccatcggcgcgcccgcgcacgcccagtggtggcgcctgccgtcgggcgagcgtgaacatgccgatcgcgaagcctgggagcgcgcccatcgcggccagcgctgggatcacgacgcatggtggcgctgggaccgtgagcgcgagcggcggctggccgaagcggagcgcatcgaccgcgagcgctgggagcgcgagcatcggaaccagcgctgggaccgggaccgttggctgcacgagcgccgggatcatgacgattaccgcaacacctgggacaagagatagcctcgcgcggaaaccgtcatcttcactgcgccggatgcgcagcggagctcagcccgggttgcgcaggaccatgcaggcgccgccgacagcgcgcagccgggcgcacagggcctcggcattggcgcggctgctttccgacacccgcacgatgtagcgcgccggtccgcggcggcgggcatagagcaccagcggcagccgatcacccagcacggcatcgaagcgacgccgcaaccgctcataggtggccaggacgcggccttcggaccaatgaccggcgagctgcacaccccaggggccccaggccgggctggccgtgagccgccggcgcgggctgtccgccatcagcctggcgaggtcgacgcagctcacgtctttcgatgcgtcgggatccttgaactgaggcggcggctgcacggcccaggcatcggccggaagccccgtgatgaggaagacataggcacgggtctcgtcgggcaggccgacacgacccgcaagccaggcgtcgacgcggctggggccggcattgtaggcggcggccgccaggcccaggctgccgcggaacgtggtgcgcagctcgcgcagatagctcgccgattcgcgcagggcctggattggctcgaacggattggtgagtccgcgtccggccgccgtctgcggcatgaactgcgcgatgccctgggcgccggcgggactcaccgcttcagggtcgagccggctctcctgccagatcaggcgcgtgaagaacaccaccggcagatcgttctcggcagcggcctgcgccagcgtccggcaaagggcgtcgggggtcgggcgcggccccttggcatccggcggcggctcggcgctgacatcgccggcggcctcgcccgccggctcggctcgcgccggctggtgcaaccccagcgcaagcgcaatggcgacggccgcgcaccgcgcggcggcgcggtatcgggaaggcggtcgaaccgcgcgcagcgtcgggcgaaggcacccctgcatgcatcgagcgtagcggggcaacggcgtgaaatggagtctttgttgcggcgccggatgatccgtcgcgcagcgcgcgaccagtgccgcgcgtggtccaggcatgatggcaaggcgcgcaccacggcacgcgcttcgatgacggcacgccgtggtctacttgctgccaccacctccacctccacctccacctccgcctccggagccgccaccaccggcaccaccaccagagccgccgccggcaccgcctgcaccaccactgccggatccgccgccgctaccagagccaccggccccgccaccagtgcccgcgccggagccggaaccgctgcccgcgccgccgctgcctgcgccggaaccggagccaccgcccgcaccgccgctgcctgcaccggaaccggagccactgcccgcactgccgctgcctgcgccggaaccggaaccaccgcccgcgctgccgctgcctgcaccggaaccggagccactgcccgcactgccgctgcctgcgccggaaccggaaccaccgcccgcgctgccgctgcttgcgccggaaccggagccactgcccgcgctgccgctgcccgcgccagaaccggagccaccgcctgcgctgccgctgcccgcgccggaaccggagccaccgcccgcgctgccgctgcccgcgccggaaccggaaccgctgcccgcgctgccgctgcccgcgccagagccgctggcaccgctgccgccaccagcaccgctaccacccgtccccgtgccggcggcgccactgccgccggcagcggcgctggacccgctggcaccgccgccggcaccgtcgaggccatggcgcgcgaacggatcgtcggcgcggttgccgcgtcgcgctgacggtggtggtgatggtggtggtggcgaccacacgggctgtggtgccggagccgcgacaaccggctccgggtcaggtggaatcacgatctccgtcggcgtcggctccggtggtggtggaggccgtcgcacgacacgcggtttcggcgccggtgacttgggcgccggtgacttgggcgccgatggcttggctgccggcggcttggccgcggccggtgggctcggcggggctgtcgtcgtagccgccgccggcggcggcgagacggttgccgtcgcaggcgccggtggcggcggcggtggcaacggcgctgccgccggcggcggcggcggtgtcggcacggccagcaggtcgagcggaatggtggttcgggtcgagacgccggggccgctttccggtcccgtcggagccgtgctcgtcgatgacagaggcgcatcaggcggcgcatcggcgcgcggctcggcggtggcggccgcaggcgtggcgtcgaacggcaccagggtctgatcatgtgcgtcgggcgtcggcgaggccgggcgctgcggcgcggcagcggcgaccggcgccagcttctgcaccttcggcatcggcatgccgggcaccggcgtgtggcttgcagcgaccgcggcaagagcgatgtcggacgccccttgctccggcatggacatgggctgcggcaaccgcatgaccgaacgggagatgctgtcgccgccggtccccggctgctcggcgttgggcgcggcccccgcggccggcgccgcgggcgcagacgtgccgggcgcggatgtcgcttgccggtcggtcggcaggagggtgcgatcgacggcgccgggtggggcttcggacgcgcccggagcagcggtcgcggtcatgtccggcgcctcgtccggcgccggccgcgccgccttgtgagcgccgcggaaggattgcaggtcgacggcaatcgctcccgtgccaagggcggcgtcgcgaccggcggtcacggcgatctcctcaagggtgccaggccgtccggcgatcagcgcgccaatgaccactatatgcagtgcgatcgaacccagaatgggaagcgtcgcaccttctccgaaccttgccgccgccatcgcgaaccctcttcgcatgcagacgcagtcgtgtgtcacgcgtagacgacaggtcgtgcggaaggttccccatccggggcggcactggagccccggcggttgtgaccgttgtgtgggtgccagaagcgcggttcattgccggggattttcccccagggcgatcgctatggcctcggcggagcgatcacacgctgggggcgcgccactccgtggcgcgtcataacgacagctcgaggcgctgcccacgagcatgagccgaccgtgtgggcagcaccgcagatgccgtgcggcatcggctatgagcaggacgcgccacggagtggcgcgcccccagcgtgtgaccctcccgtccgggccgcccccacgccatacgcgatcgccctgccctccggggaaggatcaagtcacatacgcggaatgacggaaggcgtgttgcgcctagccgcacctggccggagcgggagctgagatctctgtgggcgcggctgccggatcgcgaaagcagaagacgcaaagctcacgcacgatccagtcgtagggctgccgggccagcgccgccatggcggtccggccggcgccgtcccagggatgcgcccaatccccgggcatgtagatcaccagcggcgttcgatcgagccattcggtattgctgcggaacacggccttctcggcgccctcaatgatcagcttgacgatcagcggctcgccgccggcggtggcaagcagctcgttgacggtgacggaccggaccgtgccggcggtcggtgcctgctcgacctcgccgaccttccgctcccatggacgggcttcggggttcacgatctgcaagcttgccggaccgtcccacaggcccgcctggaccgtcacgatgttgggatagcctgcggcgttcttcctgatcatcgcgacattggcgggatcaggctcgaccgccatgatcttcgcctgcggatagcggcgcgcgaaccacacggccgcgaggccgatattggcgccgccgtcgatcacgacggcgcgcgccccgagctcacgggcgcgggcgtcgacgcggccttgctggggataggaattcgcgtcgagcgcgtggcgcaggaacatccgctcgaacactgcgacgtcggaggtgccgggccttatccacaccggctgggcgtaccccggcacaatcacggcgctgggttcatcaccgccccgccggcgcatgccccaccacatgcgcatcccggcaggggctccgtacgcgctgatgcaccgcgcaaggaggcgcaacggcgcgagcctggaccacatacgcatacttcgaacgccgctcgcgccctcatgctaccacacgaagaaacgaccgtcgcatattcgcgcattgttgtaaacgcggcgcggccggccagccacaggcgccgacagcaccgtcattccgttgcgcagctcaaccggcggcaacaatggatcgccaggaagacgcatcacgcgtcgttcccaggcgatcctccgctcgctgcgctcgcgatgaaccggatggcgctacgccgccgtcgccttgaggttgacgccgcggcgcttgcggttgatctcgcgcaggtactcgatgccatcggcggcgatggcatcgcccaccatcgagtcgccttcgccgaccagctcgcccaggtcgacccaggggctgtacacgtgcttcgtgcgctcggtgatgatgccggccttgagcagggtcttgatcagcacccggaagatattggtgctctcctgcatcgagttgcgccggctgtcgcggccataggcctcgcgcacggcatcgcgcacccactgccagtcgagcccgagctcctcgtagatgtaggtgcgctggctgatgctggtgaggttgaacagcagcgactcgaagacgtgggcggcccagtcctcgaccttgttgtgctcctcgggcgtcagcttgggcagggtgcggtcggcccagatcttgccgaacttgtggtggaacgcctcgtcggtcatcaccagctggatcaaccgcttcagcagcggatcgcgggtgtaggcataggtgtcggcgaaggcgcccatcgccagaccctcgagcatgatctgcatgcccaccagcttcttgtagacgatgggcgacagcacgatgtcgttgaggaacttgccgagctcgggcgcgcagggataggccttgccccagcgggccttgatgtagcggccgaagccggcgacgtggcgcgcctcctcgcgcgcctggttggcggcgtattcctgggcgccgggatcgagcaggatgtcgcacagcgaggccgacagcgacagcgcgccctgctcgccgtgcaggatgcccgacatgcggaagcgcgtgatgttgttggccaaccggacgcgctggccctcgtcgagacggtcggagacggcggtgttcagctccagcacccgctccggcggcatgatgtactcgcgcgtcacgtcgaagggctgcgcgtagtcgagataggccgggttgaacggatcccagaaatggtcgtgggtctggccgatgatgccgtcaaaggcgtcggaccgcgtctcgtagcggtcgacctcgatcatcgccggaaagtcgtcgggtgcgaccacgctgtacgccggatcatgggtgatatgggcgtcgtcgggatggccggtcatcaaatcctccattggccgctgatgcctggacggcattttctatttcatttcagaaaaagtgtactgccgaccggcggtgaaatccaccgaaacaaatggggctccccgcggggagccccgatcttgtgccccatccgccgaagcggagggcttgttaacggagggaccgcgctctctcatcggctaggcatatctacgttccacccgctgcaaatatcgtgatagagtggcaggaggttgtcaatacggatgacagcacacgcattgcggctgatcgtcgtgggatgaatccaataataacaaaaactttggggtggagagcagatgaagaggacgcttccgtttcgcctcgggctggatttggggaccaattcgatcggctggtgcatcacggaccttggcaagccgggcaaggacggccgcatgcatcccgtccgcattcgccgcatgggcgtgcggatattcccggatggtcgcgacccgcagtcgggggcctcgcttgccgaggcgcggcgcaccccccgttccgcccgccgacggcgggatcgtttcctggaccgccgcgccgacctgatgaagctgctgatcgcgcatggcctcatgccggccgacccggcggcgcgcaaggcgctggcagcgctcgacccatgggcgctgcgcggcgaagggctcgaccagcagctgacgctgcacgagctgggccgcgctctcttccatctcaaccagcgccgcggcttcaagagcaaccgccgcaccgacaagaaggccgacgacaaggaagcacagggcatgaaggccggcgccgcggcgctggcggcgaagctcgacggccggacaccgggccggcgcacgctgggcgagtacttctacgcggcgtatcgaaaggaccgcacgccacggggcgcgccggacggatcgacgctgccgatagcggccgtgcgcttccgcgcccacgccggcaaaggcaacaagctcgaatgggacctctaccccacacgcgacatggtcgaagccgagttcgacgcgctatggacggcgcaggcggcgcaccatcccgctctcaccgaggagggccgcgccgcgatccgcgatgcgatcttctatcaacggccgttgcgcccggtggagcccggtccatgcaccctcgatcccgagcccgacccgcacaagcgtgagcggcgcgcgccgctggcgctgccgctgcagcaggagttccgcatcctgcaggagctcgccaacctggagctgcgccatcggcgcaccgggcaggtccggcggctcggccggcaggagcgcgacaaggtgctgcacgagctgaagcgccgcgagaaatacagcttctcccagatccgcaagctgctgggaatcgacaacgtctggtccttcaacctgcaggacgaccgccgcgacgggctcaagggcgacgtcgtcgcgtacaagctggccaagaatggtttcggcaagtcgtggcatgacatggcggtcgagcagcaagatgaggtcgtgcgcttcctgctcgacgaggagcgcgaggacgaggtgctgcgcgtggccacgacgagctggggcctggcgctggaggcagccgcgggtgtcgccggcacacctttgccggagggctacggccgtttgggccgcacggcgctggccaggatcgtgcaccacctgcgccacggcgtgtcatcgaaggacggcggcctgatgcactatgacgaagccgtgcaggccgccggctatcggcaccattccgacttcagcaccggcgaggtgttcacggacgcgccctactacggccagatcctcgagcgctacatggtgccggtgagcggcgtgtcgggctcggccgacgagcagcaatacggccgcatcacgaacccgaccgtccatgtcagcctcaaccagctgcgccagctgctcgacgcgatcatcgcggcctacggtcatcccgacgagatcgtcgtcgagctggcgcgcgagctgaagcagacgcgggagcagaagcgggaaacccagacgcggcagctcgagaaccagaagaagaacgagcgccgcaagcagcagctggaggcggccggcatcgccctgcgcggcgacgcgctgctgcgcatgcgcctgtgggaggagctgggcgagaatgtcgccgaccgtgcctgcgtctacacgggcgagccgatcgggatcaagacgctgttcagcgacaaggtcgagatcgagcacatcctgcccttcaccctgacactggacgacagcccgtcgaacctgacgatcgcgatgcgtcatgccaaccgcgacaagggcgatcgcacaccccatgatgcattcggcacgagcccgacgatcggcggccaatcctatgactgggatgccatcgccctgcgcgcctcggcgctgccgtgggccaagcagtggcgtttccgcgccgacgcgctgcagctcatcaaggatcggctgctgcgcgaggagcagcgcgccaagggcagcctgccccgggacgtgatggccgacatcgagaacactggcggcttcctcgcccggcagctcgtcgacacggcgtacctggcccgggtcgcgcgccagtacctgaccagcgtcgtgcctagcgagaccgtcgacggcgtcatgcgcagcaaagtctgggttgtgccgggcggcatgaccggcatgctgcgccggctctgggggctgaaccgctatctctggggcaatcgccccgaggctgcggacgaaggtcctgacgactggcgcggcaagctgcgcaccgaccatcggcatcacgccgtcgacgccttcgtgctgaccctgatcgaccgcccgctgctcaacagcatccaatatcaagcgggccaaagcggccgccgcaccatcgacgacatgcctgatccgatcgactggccgaccttccgcgaggacctgaaggaccggttcgaccgcatcgtggtgtcgtacaagcccgagcattcgccctcgggacgcctgcacgaggagacggcctacggcatcgtgcgcgagccggcgaaagaggatggtgcgacgctggtctaccgagcgacctttgttgacctggataccgatggaattgcccgcatccgcgacttgcatctgagggctcgcgtgctggccgccgtcgagggtgtgacgtcggacaagaagaaactgagggaaacgctaacagctttcgcggcgaccgagccgcaagcacttcgccatgttcgtttgttgaaggtcaagagcgattaccggacaattctccattcgcggagccactactccaaagcattcgtgcccggcaaaaaccatcgcgtggatgttttcgagcgccctgacggtacgtggcaggcggcaggcaatttcagcccagcccaagctagagactccgcagcgtcgctgcgacgagaccgttcggcgtgctgatgtcccaggccagaacaacgacgagggtcacggtcacaaagacaaagaacgaagccaacagtgtatccccacggtcgtgagtcatcgccccctcccacgctctacacaccgccacttcacccatcacgaccgagcatcgcgcctgctgcctggggcctgcactcgtgaatccaggccagggatgttgatccgtcgggactaccgccagaagctctggttgacggtatcgagcgcggatgcgctttctcggatgaagctgcattgcttcggattcggtgaatgactcgcaaatcatgcagtccaccggcgctgcctgaacaagcccgtgcgcgcaatgccaatgcgcaactatgagtcgctgcggatccgacacgctagccgaacgaccgcgtcatggtcgttaccgcgccgcatgcgcggggaaagcgcgtcgcgcgacgagcaggcgatccaggcgggcgtggtcgaacccgcacgcatgtctcaggcctcgacgtgcggcgcgtgcgccactgatattcggcaagttggcccaagggtcaatggatacgggaattgaggtggtggtatcgatgcccagccttgttgcgagactggacagcgtcctcgtggccgacatgccgttgagttcgtcgttccaaaaccgcgtttgcgaccagctcaggggccgtcgatgcccaatagcgagattggcgagagtatcggtaaagtccctctctgcagggcatgcgggacccggatgtcgctcgtgcagcgaacccttcgtacctgcccctatgaacttcttacttttgaatgtcctggttgcaaggacgtcagatgcgttactcacccgccgagcggccggcgcggcgggaagcgctttcgggtggaagaacgcattgcggagaccgagtttcagatcagtaggcagcaggaactgatttcgtcgggccgtgccggagatccccgggaggcggttgagctcgtccaggtcctacaaaccatactggtatcgctccgcgaagctcgggatacttacgaacggcgccacatcgccgaccaaacgggcgatttcactggccgaaagaatgcgtcgaataatcgccagtgaaaccaaacgttcaggctcccggcatgacaagaattgacgggcaaatgcaagaaccgtaaaaatactgacaacccacccaagacacgctaatgtagcaacgatttacgataatatcttcagatcgcaatataagcggtcgacgcatcccctcggacgagaacaagccgcgcagcggctttcgacgctgtaagcaatggggagcgttatggggcgtttgtgtcgcttcgatcagttcgccgatttcagtgagtttacggaccagcttcgagggtcagagacgactttcgtccagctcgctgtcggccacccggacatcacgcactgctgcttcgacgcaggcgatgtaatcttgcatcggacacagttcggacttggctcatcctgcaggtcgacgagacgcccggattgggcatcgctcgtcattgacctctcgccgaagcgctggtgcggcatcgatgtggcggcaggtgcggtccgactgatcgtacccggccgtgaaatgcacgtcgcttttcagggcccgtgggatacggacacgttgcgcgtggcccaaaacgcacttgggcaggcatgagggaggggtcgatgtcgcgggaccgccaggccaggctgctggccatgctctttggctttgtgacggtggcactcgtccttgttctggtctgggacatgagcacccccaacggcctcgccgccgcgagcttcgagcctcggctcacagatcgatagatccccggccatctcaagcaggtcgagggtccgacgctcgagacgggcaacacgacctgctgcgacgctggtggtcgctgcaccgttgccggtcgcgccgcggggtgtcgcgctccaccaccgcggcgggatgggcaccagcgccgataaatcgccggacgtctcctggtagtgccagacgtacttcccggtgtcggcgttcagcgacgccagcgacgccagatagaggttgtcgccgccggccgggctgcggaccttgcggttccacggcgatccgttgccggtgccgacatagatcatgttcagctcgggatcgaaggtgatcgtatcccagatcgtgccgccgccgcctgcgacccagtacttgccggcggggtcagatcttcctgcccgtgcggacatcgatggcgtgagcgacgctccagggcgccgtaacatacatgatgccgtcgacgacaagcggcgtcgcttccacgccgaggcgggcactcaaaattgtctacaattttctttgaccgccttcttgcacgggtgttagcctgcctgcggcctcaggtgcggtcggctgaggcgcgcatgcattgacggggaccatcatgaagcggatgacgtggcttgcggcggcaatcgccctctcgatcagcagcctgctcggcgccggccaggcgctggcacaggcgaagcaccagtggaagttcgtctcgatcattccggccggccaggaggtgttcgtcgaccgcttcaaggagctggcggccgagatcacgaagcggaccaacggccaggtcgaggtgacgttctatgccgcgggcgagctgccctacaaggcgcccgagtacatgcgcgtgacggccaagggactggtcgagatgtcggagatcgtcggcagcatggcgttcggcgacgcgccgccgctgctcctgggcgacctgccgtacctcgcgctgaacgacgcggagcgcaagatcctgcgcgacatcatgtggcccaagatctacgccgcgctgcgcaagaacggtgtcgagccgatcggctggggcgcctacccgccgcgcaacatcgtcatgcgcgaggcggtcaaggggctgggcgacatcaagggcaagaagatccgcaccgccggcggcctggaggcggaatacgtgaagacctggggcgccgcgccgtccttcgtggtctgggccgaggtctatccggcgacgcagcggggcatcgtcgacggcgtgctgaccgccgccgtcgcgatcgagacggccaagctctacgaggtggcgccctacttcctgaagatcgacggcccggtggcccatttctacatctccgtcgaccagagctcatggaagaagctctcgcccgagctgcagaagaccgtgaaggaggtcggcgactggtggaccgaccgctggcagaagctggtcgtcgaagaggccgacaacggcgccatcaagcgcatgcaggacaagggacagctcaaggccgtggtccaggtgccgcccgagacccatgtcgagacgcgcaagaacctgatcccggtctatcgcagctacgtgaaggacaaggtcggaccggagggcagcgccgcgctcgagcaggcgttgacggcgctcaagctgcagtagcccgatgcgcctgtcgaccattgccgcccgcctgagccaggcgggcgtggcggtcggggccgtcgccctgacggcgatgatcgtgctgatcaccgtgcaggtcatctcgcggcggatcctgacggcgccgatggtggtggccgacgagctgtccggctacctgctggtcatcaccacgttctcggcgctcggctacgcgctgcttcacggcgaccatatccaagtcacgctggtgaccgaccgcctttccgaccggctgcgccggtatctcagggtggcatggtgcctggtcgggctgccgtatgtcggcctgctcgtgtggcgcagcgcggtcctggtgctggacagctaccacagcggctcgttctcggtcacggcgaccaatgtcgtgctgtggccgatccaggccttcgtgccgcttggtctcgccgtgctgttcgtgcagatgctggccgagcttctcgaggccctgaacctgttgcgccgaggtgctgcgtgagctgggaaatcgtggcggcgatctatttcggcgtgatgctggccctgctgttcggcggcgtgtggatcgccatcagcctcggcgcagccggcgtgatcggcatctggatcgtcaagccggccctgctgggcggcctcgaatccgtcgtctggaacacgctcgagagcttcgtgctgaccgcggtgccgctgttcatcttcatgggcatggtgatcctgaacagcggcatcagcacgcggttctatcgcagcctggcgctgtggctgaaccgtgtccccggcggcctggcgcagaccaacatcctggcctgcagcatcttcgcggcgctgtgcggctcgagcgtcgccacggcggcatcagtcggctcgatcgccatcccggagatgcagaagcgcggctacggcgtgcggccgatgaccggcacgctcgccgccggcggcacgctcggcatcctcatcccgccgtcgatcccgttcatcatctacggctcgaccgtcggggagtccgtgggcaagctgttcatcgccgggatcatccccggcctggcgatggccgcgatcttcatggtgttcctggccggccacgccaagctgatgccggggcagtttcccgtcctcggcgaatcagtgccctggcgcgcgcggctcatggggctgcgcgacctggtgcccgtggcgctgctgatcgggctggtcatgggcggcatctatgccggcgtgatgaccccgaccgaagcggccggcgtcggggcggcgggcgcggtggcggtcgcggcgctctacggcgggctgacgatggatgcgctgcgcaagagcctgctcgacacgctgcgcacgaacgcgatggtgctgttcatcgtggtcggcgcccagatcatgtcgttcgcgctggtcgccgccggcatcccgcgcgccatcgtcgccgccatcgagagcgcgcacctggcgccctatgtggtgttcgccgtcgtggtggtgatgtacctggtgctgggctgcctcgtcgatgccctgtccctgatgctgctcaccctgcccgtcgtccacccgatcatgacggcggccggcttcgatccgatctggttcggcgtggtgctggtcatccttctggagatcggcctggtcacaccgccggtcgggatgaacctgttcgtcctccagggaatggccaagacctcgctcggcgaggtcagctggggctcgctcccctacgtcgtgctgctgctggccggcgtgctcgtcctgacgctgttccccggcatcgcgctgtggctgccgcagcagatgttctgatgctgatggccctacactcaaccgggcaggcgatagaccttgcgcgccgtgccgctgtagagggcggccttctcgtcggcggagaaaccggtcgtcagccgcttgaaggcgttccacagcacgcggtagctgcacgtccccttgtcgaccggaaagttgctctcgaacatgcagcgcccggcgccgaacgcggcgatgcaggtctcgatgtaaggcttccaggcggaagccaggtcctgcgatgacggcggctgcggccgggcgtggaaatcaaacccgatcaggtgcatcccgaggccgcccagcttgacgttcacgttggggcagcgcgccagcgcgcggatggcggcggcccatgccgcgaacaccgcctcgcgctggccgacatacggaccgatgccgaccggaccgccgacatggtccagcacgatggtggtgtcggggaaggcccgcgccaggtcgagcacctcgtcgagctgggtgtgcatgagccaggcatcgaacgtgaggccgagcggcgccaggcaggcgaagccgtcgcggaagccgcgatcgagcagcaatccctgtggcgggctcgcgctggttgccttgatgccatccgggtgccaggccgagacgttgcggatgccgcgaaagcggccgccggacaccgccacgtgcgcttcgagcgcggccctggcccggctgcccagcctgaggtcgacgttgccgatgatcgcggcacaggcggcggtcggcccataggcgccgcttgcgctcatggcggcgataccgttcacgaactcggtctcgcccagggagcgcagctcgatcgggccaccagcgcgatacatcgaccgggcttcgacatacaccgtggccatgacgctatggccgctgccggtgtccgccagcagatcggacagcaggtacgggttgcccggatgatcccagaggtgatggtgcggatcgacgatcggcaggtcgggctccaagaccgcctcggtgcgcagcgccagccagtccggcctgacgcgcaggaaatcgttggaaatgagagcggggtccacggttgtgctcatctgcgtctccatcgtcgtcctgaatcgagggtcagtccgtcatcccgatctccaacacctctccccgcgagagcggggagagggaggggcccgcgcgcagcagcctgccctgagcctgccgaagggcgggagggtgaggggtacgaacgtccaatctcggcatgccggggtgtcgcagcagcggcagcatgtctaccccctgcgcatgctttgaccggccctactcctcaccctcccatcgcttcgcgatgggcccctccctctccccgctctcgcgggaagagggaggggcaactctccgtcgcggcagcgcgagaggacgtcgacgacggcatcggtctgcacgacgtcggcgaactggcggtccatgtcgaaaaggctgatggcgtgcgacacctggatccggtcgaacaccgcatcggccggcacgatggtccggaagttgtacgacgacgcgtcgaacacggtggccctgatgcagttcgaggtcgcgccgccgcacacgatcacggtgtcgacctgccggtcgacgagataggccagcagcggtgtgccgaagaagccggacggcttcttcttcacgaacaccatgtcgcccggctcgggacccagctcgggcaccagttccgcccccaccgtgccctcgaggcaccagtacggcgactgcagcagatcacgcttgcgcccatagacgccgatatcggcgccgccgggatccagcgtgaagcggctgaagaataccggtgcgccggccgcgcgtgcggcgcggaccagacgcaggatctggtcgacggcagcccatcccgctgcgccgcaggatgaggggtagaggtcctggctcgcgtcgcgctcgcccaccatgtagcgctggcaatcgatcacgaccagcgccggacgccggccgaaccccatgcgccggccgaaccgcgcccggctgatcacctgccggtcggcttcgctgacataggcgtcccagatcggcacgctcatatgacgccccggctcttcaggtcgccgagctcggcctcggtgaggccgagctcgcggaccaggatatcggcgttgtgggcgccgagccgcgggccggcatgccgcacgcggcccggcgtccgcgacatgaacggaaaggcgttttgcatcttcaccgtccccagctcctcgtccggcacgtcgatcacgtcacaacgggccgcgtactgcggatcctcgaagatctgggcgacatcgtagaccggcgcgatggcgccttcgtaggcctcgaacgcctgcagcacctcggccagcgtgtgccggccgatccagccgccgacgatggcgtcgatctcctcgacatgctcgacacggccgcgcgccgtcctgaaccgcggatcggccgcggccgcgggtccgccggtcaacgtcagcacgcgctcgacgatcgatggcgcggctgccgacagggcgacccaacgcccttccctggtctggtaggcattgcgcggcgcattgttgacggagcggttgccggtgcggccctggatcacgccgagctgatcgaacagggtcggctggtagcccagcagtgcgaagatcggctcatagagcgacaggtcgatgaactgtcccttgccgctgcccttcgcgtcgcgctcatagagcgcgaacatggtcgcaaaggtgccgtaatgggcggcgatcccgtccgccagtccgaacggcggcagcgtgggcggaccatcgggcgtgccggtgatgtgcgcgaagccgctcatggcttccgccagcgtgccgaagcccggcttgctgctgtaggggcccgtctggccgaagcccgtgacacgcaccatgacgaggcgcgggttgatggcggacaggacgtcccagcccaggccccacttctcgagcgttcccggacggaaattctcgatgaccacgtcggcaccggcgacaagcttcttgaagatgtcgccccctttcttgaggtcgagcgtgatgcagcgcttgttgcgcgccacgaccttccaccacaggggcacgccgtccttctggtagccggtcttgcgcagcgcgtcgccgccgggatgctcgaccttgatgacatcggcgccgaaatcacccaggaggctcgcgatcaccgggccggcgaacagcgatgccgcgtcgatcacgcgcaggccgtcgagggggccgctcacgacagctgacccaggaatttccgcgcctcggcggcatggacggcatcgaccagccggccgcggaacaggaccgcgccgatgccgcgctgcgcggcatcgtcatatgttctcagcaaggcgcgcgcctcctcgatgtcgctatccgccggagcgaagatccggttgcagggctcgacctggctgggatggatgcagctcttgccggcgaacccgagatcgcgcgcctcggtggcatcggtctcgaaggcggcagcgtccaccacattgacgaaggcgctgtcgaacgccgcgatgccggcctcggcggccgccaggatcaccagggtgcgcacggcacccaggcgatgcgtctgcggccgcatgcccgtgacggccttgagatcaccgaggccgagctggatggcgtccacgcgcggacaggcgcccgcgatcgcgtgggcgttgcgcagccccgccggtgtctcgatggtggccatgaggccgatgcttccccgcggcaggccgcgcccggcctccacatgggcgagaaccgcgtcggcaacatgcagatcgcgcggactctcgcacttgggaacattgatggcatgcagaggagcggacgcgaccgccaggatgtcggcgatcatcaggcccgtgtccagggcgttgacgcgcaccacaatctgcttgccgcagcctgacgcgccggccgccaggaaggcggcggtgatctcgcgggcgccgctcttgccgtcctgcggcaccgcatcctcgagatcgaacgagaggctgtcggcggggccggcagccgctttcctcatcaggtccgggcgattgcccggcacgaacaacttgctgcgcctgagccgctgcaccatgccttccccagcgtctgcaaccggagagaacctagttggcggtataaaaattgtctacaatttatctgccagcgccagcagcgccggcaggttgtccaggatgtgcgcctcggtggtgctggcggcgacatcgatgcgcccgctgcgcaggagctcggtgatgcggcggtggtcggcgagcgaccgtcccttcttcaggtttcgcgacagcagcgcatagcgcagcggctcggccatctcgttgagcacgttgagcgtgcgcttgagcggctcgttgccgctggcgtcgatgacaagggtatggaacgtcacgttctcggccaggtacccttcgatgttgcccttgttcaactgcgttgccatccgcgcattgctggcctccagcctctccaccagcgcgtcgagcgccgcgtccctcaggcactcgaccgcatgccgctcgagaagggcacgcatgcggtagagatcctcgatgtccttgaccgtgtaggtcctcacccggaagccgcggcgcggggcatgagtgacgaggccgcgcagctccagcaatcgcagggcctcgcggatcgggccacgactgacccggtattcggcttccagcgtctcctcgcgcaaagcctggccgggggcatagcggcccgtgatgacggcccgccgcatcatgtccatgagc

SEQ ID NO: 2066 - DNA, 15205 bp, synthetic construct
  source 1..15205: mol_type = other DNA
  misc_feature 1..15205: note = Synthetic
cgccagattgcgaagaccgcaaccgagttcaccctgaacgaagtgatgcccgccatgaaggagatcgaagagaaaaacctggcggtgacgaagggactgctgcggagggcgggcgaactgggtttgctggccgtggatatccccgagcaatacggcgggctcgaaatggacaaggtgagctcggcggtggtgacggaatccatcagcaagctggcgagcttcgccgtggcgttcgccgcacacacctgcatcggcacgctgcccattgtctggtacggcacgccgaaacagaagcaaaagtacctgccgaagctggcgagcggcgaatggatcgccgcctatgcgctgtcggaggcgtcttcgggatccgatgcgctgaactgccgtgcgcgagcgtcgctctccgcggatggccggcactatatcctcaacggcgagaagatgtggatcaccaacgccggcctcgcggacgtcttcacggtgttcgtcaagatcgacggggagaagttttcggcctttctcgtcgaccggaacacgccggggctttccataggcgccgaggaacataagctggggatctggggcgcatccacgtgcccgctggtgctgagcgattgcaaggtcgcggcggaaaacctgcttggtgagccgggcagggggcagcacatcgcgttcaacgtcctgaacatcgggcgcttgaagctcggagccgcctgcgccggcggcgcgcgctatgcattgcaggacggcatacagtacgccagagaccggaaggcgttcggaaagccgatctgcgagttcgggctgattcaggaaaagctcgctgacgcggcctccggcatctacgcgggcgagtcgatggtctaccgcaccagcgggatgctcgacgcggcgctggcaggcatcgacacgagcgccgagggcgcctcacaagagatccagaagcgcatcgaagagtacgcggtggagtgctcgatcctgaaggtctggggatcggaaatgctcgacatggtggtggaccacgtggtgcagattttcggaggctacggctacgtggaggagtacccggcggcgcgcagctaccgggattcgcgcgtcaaccgcatcttcgaaggcaccaatgagatcaaccgcctgatcatcaccggatggctcatgaagcgggccatggcgggccaacttccgctgcttcaggccatcaagcgcgtaatggacgaggtgatgtacagctcaggggcgggcaacgagagggaaggaccgctggccggcgcccggcaaatgctggcgaacgcgaaaaaactgttcttctttgccgccggcgcggcgtcgcagaagtatgcccagaaccttgcggaccagcaggaagtgatgggcgcgctggccgactgcgtcatggagacctacgcgctggaatcgtgcgttctgcgggctgaaaaaatgctggcagccaggggaccgcaggcggcaagaccggccgtggcgatgaccagctactacgcggagaaagctttcgataccgtggtgcgttcgtcgcgcaaggtgatcgcggcgtcggccgaaggcgacacgctgaggacacaactggccatcctgcgcaggctcgtgaagcaggaaccggccgatacgattgggcttgggcgggagattgcgcggcacgtaatcgagaccgggcggtacgcggtgtgaatcaatcctggaggctggccgcgatcgcctcggcgattttcttcccgtgaaagcggccgttctcgataaaaatctcgttcgtgttcataccggccacgatcacgccggctaaataaatccccttgcggtggctttccagcgtctccgggtccgtgtacggacgcttgctttccgggtcgatcaggatgccgtgccgcgccaggaactcggtatccgggcgatagccgatcatggcgaacacgaaatcgttcttcagctcgatttcgccctcgggcgtttcgacggtaatcgattgctgccggatctccagaacgcgcgagcggaaatacgccttaatttccccgttcttgatccggttttccagatcgggcttgatccagtacttcacctgatcggagatcgcctcctcgcggtggatgagcgtgacgcgcgcgccggtgcggtacagttcaagcgccgcaatcgccgcggagttcttgccgccgatgacagccacatccatgtcgtagtacggatgcggctccttgtaatagtaaatgaccttatccagatcctcaccgggcacgttgaggcggttcggcagatcgtaatacccggtggcgagcacgaccttgcgcgcccggtaagccagcgggcagccggtgcggtcaacggtgtgcacgatgaagtttccgtcttccccgtcgatgcgctccacgcgctcgtactgatggatgttcaggcggtaatgctgggccacgcggcggtaatacttgagcgcctcggtccggttcggcttctcgcggatcgacgtcatcgggatgtcgccgatctccagcaactccggcgtggtgaagaacaccatgtgcgtcgggtagttgtatatggagttcagcaggcagcccttatcgaagatgatgttggagatgccgcgccgcccgagctcaatgccgcaggcgaggcccgtcggcccggctccgaccactacggcgccgaaccgcggcacatcggccatcacagcatcccctccacggttttgtagacgctctcaagcgctgccggcagcgccgcaggctctttaccacccgcttcggccatgtccgggcggccgccgcccttcccgccaacggcctgcgccaccgcgcccgcaagcttgccggcgtgcaccttggaggtaaggtccttcgtcacggccgagacgatcgcaatggaggagtcctcggccgacgccagcacgatcaccgcggttttccacttgttccgcagagaatcggcgagctcgcgcatctgctggcggtccaggccgtccacccgtcccgcaagcacgcgcacgcccttcaccacgcgcgcctgctcttccagactggcggccttcgcgtgggctaccttcgccttgagctgctcgagttgccgctccagggcgcgccgctgctcgatcagtttttccacctggtccacgagctccggctcggaggtccgcagcagcgccgccgcctgccgcaccgccgacacggactcgcggaaacgctccagcgcgccttcgccggtcaccgcttcaatgcggcgcaccccggccgaaatgctgccctcgtagacgattttgcaaagcccgatctcgccggtgcgcgacacgtgcgttccgccgcacagctcgcggctgaaacccggcaccgaaaccacgcgcacccggtcgccgtacttttcgccgaacagcgccatggcccccgtctcgatggccttctcgagctccatctggtcggtctggactgggctgtctctcaggatctgcgcgttcatcagccgctcgacttccatcagctcggcgtcgtccatcgcggcgtaatgcgtgaagtcgaagcgcagccgggtgggctccaccacgctgccggcctgcttgacgtgcgggccgagcaccgagcgcagagcggcgtgcagaaggtgggtggcagtatggttgcgcatggtggcgcggcgcagcgcttcgtccacagcggcgcgaatttgctggccgcggcgaatcggcgcgagcgcggtcacgcgatgcgctgtaacgcccggaacgggggcgtaagtgttctccaccgttgccgctttctcgcccgtttccggatcgtacagcgcgcctttgtcgcccacctgcccgccagcctcggcgtaaaaaggagtttcatcgagcacgacttcggccgtgtctcccggctggatggaatctacctgctgctggttcacgactagtgcggccacgcggctcaccgattcgagcttctcgtagcccaaaaaattcgtgcgcagttcggaagccagttgctgccacaccggcgggatggcgcccttctcgccgcctttccagctcgcgcgggcgcgctcgcgctgtttctccatctcggcggcgaagccgtcgcggtcgacagtaagaccgtactcgcgcgccatctcctcctgctcttcgagcggcaggccgtaggtgtcgtacagcttgaatgccaccggcccgggcagcacgccgtgcgcggcgcttttcgcttcgtcgtgaaaaattttttcggccacctggaacgtggtcgcgtagcggcgctcttcgtccttcacgatgcgggccacgcgctccaagctctccatcagttcgggataggcgggccgcatcagctcggcaacgaaaccggtcagcttgtagaggaacgggtctaccacgccgatccgccgcgcgtgccgcatggcgcgccgcatgatctttcggagcacgtagccgcgcccgtcgttgctcggcaccactccgtcgtgaatcaggaacgcggtcgcgcggctgtggtcggccacgattcgcagagtcgtatccaccttgaagtcttcgccatagctgacgccgaagatgctggcggcctgctggatgatggggcagagcaggtcggtgtcgtaattggagagcttgccctgcaacaccgccgcgatgcgctccagtcccatgccggtgtcgatcgaaggccgcggcaacggcgtgagcgtgccgttggtgtcccggtcgtattgcatgaacaccaggttccagatctcgacgtagcgccccgattcgctcgggaactcgtcgttttcgaccggaatctcggccgtgccagggcccagatcgtagtgaatctccgcacatgggccgcacgggccggtctcgcccatctgccagaagttgtctttttcgtcctggcggaagatgcggtctttgggaactccggcgaccttttgccagagctcttccgcctcgtcgtcttctcgaaaaaccgtgatgtagagccggtccttcggaatggcgaactcgcgcgtgatcaggtcccaggcgtactcgatggcttcggccttgaagtaatccccgaaggagaagttgcccagcatctcaaagaacgtgtgatgccggcgcgtgtagccgacgttctccagatcgttgtgcttgcctcccgcccggacgcacttctgggaagtggccgcgcgcgagtagtcgcgcttctccaggccgagaaagacgtccttaaactggttcattcccgcgttggtgaacaggagcgtggggtccttggcgggaacgagagaggaactgcgcacaatgcggtgcccgcgagcagcaaagaagtcgaggaaactctgacgtatctggtgaccgttcacaagcttattgtcacatgccgcgcggggcgacttaaagcgaacagcccgggattccagcccgcaaaaccgggactcagcggggcagttgaacctcttccaaaatccggcgcacctcggccgcaggatcttcggcgcgcgtcacctgccgcccgatcacgaggtaatcggcgccgttggccagcgcttcggccggagtggctaccctcttctgatcgccttttcccgccccggccgagcggacgcccggcgtgaccagcaccgcgcccggtccggctatcctgcgcaccgcccccacttccaagggagagcagacgatcccgcccacgcccgcttccatcgcctggcggacgcgcagggcgacgagctcggacaccgaataacggtagcccatatccgcaaggtcgcggtcatcgagactggtcagcacggtgacggccagcagttggaggtttgatgaaccccgtccttccaccgccgcgcgcatcacctgcgggacggcatgtatggtggtgaagcggacgccggtcgcggccagttgcgccaccgtgcgcttgacggtttcgccgatgtcgtacagcttcagatcgagaaacacgtccttgccgcgcgcgatcagttccttgacgaattccatgcccgcggccgcgtacagctccagccccaccttgtagaacgaaaccgaatctccgagccggtccaccagttcgcgcgctcgcccggccgactcgaagtcgagcgcgataatcagaggatttttcatacgatttgaattgccttttcctgacgctccagaacgcggccgatcaagtaggcgccttccatgttctcgacgatggcgttcgcctcgagtgccgcagcggagatcagcagcccgccggaggtctgcgggtcgtacagcagcatctcgatctcttcaggcagctcgcgcttaagttccaccgcgcaacaaaggtattcgcggttgttcttgagcccgcccggaatcgcgccctgccgcgcgtactccaccgcacccggtaagaaccgcacgcggtccgcttccagtgcgagcgtgacgccgctgccggcggccatctcgcgcgcgtgcccgatcagaccgaagccgctcacgtcggtgcaggcgtgcacgccgaacttcgtcatcacttcccaggcggcccggttcagctccagcatcgaggcgatggaggcctccacgtgctcgggcgcggcgatcccgcgtttcagcgccgtcgagatcacgccggtgccgatgcgcttggtaaacaccagcaggtccccggggcgcgcgccggtgttggtgagcacccggtccggatgcaccacgccggtcaccgcgtagccgaacttgatctccgcgtccgccacgctgtggccgccgatcaccgcgcagcccgcctcggacatcttcgccgcgccgccgcgcataatctcggccagatcgtcgagatcccctttggggggataggcgaccagcgccagcgccgacagcggacgcccgcccatggcatatacgtcgctcaaagcgttcgccgctgcgatcgcgccgaaagtgaacgggtcgtcgacgatcggcgtgaaaaagtccaccgtctgcaccagggcacactccggcgtgagcttgtacacgccggcatcgtccgacgtctcaaaccctacgagcacgttctcattgggcacggcaggaatgcgccccagcacctggtccaaaacctttggactcagcttcgacgctcaacccgcggccttcacgtgcgcagtcagcttcttggatgtctcttccatccggataccagtttacaggaggcgaatattcgccctccagaagctctgcacccggaagccttgcacggcggtgggcagcgtttacctgactcgatattccgctctggcgggcgcactccactcgccggccgcggcagcgttctactcccaaagggtgccggtttccgctacctgtacagggacaggcagggcggaaccggcctcaagcggctccgttgccgctctcgccgagtaaatgatttccttatgctggggaaacagcgcggcgatgcccgcggcaatacccccgaccaaaacggcgaaggcgccgatagccgcagccgtttcctttgcgttgcactccatgggcgcacagatcgcgccgccgaagccgccaccgacgccgccgccaatcgccagaccccaagccgccctgcgtcctcgcgacatcccgatgggcaacacgacttgcctgacatcggacttggccaccgccagcactctgcttttcccctgccgcacgctcagcccgtcggtgttccaggattccatcttgcctttcaccgtcttgccggagtgcagcttgacgtgtacgtttgcgttctgttcgatcaacctgacccgctcccacgggtcagcctgcgccagacagatctgctgagagaacatgaccgccaccaggcagatcaaattggtaagcacccgcgccctgggtttcatctgcgccgtcctttcctttctgggatggggagatccctctgttccccttcccgtgatggcttcagagtagtgcggcgccattgggcgggtgcgacgccggagcaacctttttgtcaggtaaatgcaaatttcctgtcgagtcctgtggagccgccggcaatctcgacagccccatccggcgctggcgccatcgcagagctagcgagcaggccggcttcaggttggcaaccggatccgcggaagggccgtcgtggtatgctcattcgagacctaaaaggagtatcgaggtggaaactcggattcatatcatcgggctggtggttccggaccttaccgacacgcatttcgccgagattgcgcgcggggtttcgcgggtgttgcagcccaaaggctatacggtcctgatctcgaattccgagggcgacgcggaatgcgagcgccaggcagtcaacctgctgctgtcgtgttcgcacgttgacggcctgattctggcgtcggcgcagccgccggaagagaccgccctgttccgccgcatcgaaaaacacaagctgccgtacgtgctgatcgaccgggcgttccctgcggtcgaagccagctatgttggcgcggacgatgaggcgatcggggcaatggccaccgagcacttgatctcgcgcggctgccggcatatcgcgcacatacgcggtccggaaacctccaccgccgccgggcgcctgaaaggctacgctgacgcgctggcgcggcacgggctcaaagcgccgccggcctacgtggaaagcggcggatccagcgactccgccggctacaacgccatgcaacggctgctttcggtcaacccgcgattggacggcgtggtgtgcttcaacgacgcggtcgccgtcggcgccatcaaggcgattctggaagccggcctcgaagtgccgtacgacatcgaagtggtcggcgccggcaacgtgcactattccgatatcctgcgggtcccgctttccaccatcgacctgaacagctcgaagatgggcgagtgcgcggcgtcgatcctcctgagagcgatggaggcggaagagccgctgcctcccgagcgcgtgctgatccccttcgaactcgtggcgcgggagtcgagccaggccgtcgccgtctaagccgcttttccggaaaccgcgcggccagcgcgccgcatccacgccagttcttcttcggacatcggcccgcggcgcaaggcttcgagcgcgctctccacgtgctctgccgtggccgggccggtcatgcagacgtcgacttccggcctgctcaggacgaagcggtaacagtcggtcgccgtggggcgcggcaagtcacgcggaattttccggctcttcagcagttgcccccagcttgtcgcggtgaaggccaccaggcccgggcacgcatccgccggaggaaggtgcggaaagatgtcctgctccgcaccgggatgcgcggcgttgtagcggaagtggacaatgtcgaagtcgttgcccgaggcgaattcgggaaccagcttccgcttgtgagttgagatggcaagatagcggaccagcccgcgcgccttcagccggtggaacgcttcgaggtaccgcggcggcagcggccggttccacatacccagaagaagaacgtcggcgtactcgaagcggagttcgcgaagagcgcgctccaggctgaagccgagaaggctcgccatccgggaataggactggatgacgagcacgaaccgctcgcggtgcggggcaaggttgcggatagccttgccaaactctgcgcggcgcatcgtgccccagtagatgtagttgacgccctgctcaaacgcgcgctcaacagccgcgcccggcaccccataagacgccgatatgccaatccggcaaacttcgatccccgtgcgccccaaaacggcgcggtcaaaagaacaaatcacagcttcatgatatcggcaaagcggcgctgtacgaaaatgacaatgcgaacagccctacaaagcggcatacatcacagcgcacttgtttgtgtcccagcagcttacatcctgcagaaaagtgaattaaattgaaatcgccccctaagggggcgtccatagaggctactgtagaacagatacctcgcggtaggacgtaaccttactctgacacggcaaggaaacggcctctttgatacactctggagtttaaaatcgcacaggtgaaagcccatgtcaagagccaactcttacattctcggcatcgacctcggggttaattcgctcggcgccgcgctcatcgataagtcgaaccgtgagatcgtctggactggcgtgaggatttttactcccggtttcgagggcgactatgcatccggcaatgaagaatcacgcgcccggcagcggcgcctggcccggcagcaacggcggcaaacggacaggcgccgccgcaggttgctcaatgtattccgcatcttgcagcagtacggcctgctgccatgcggagaccgtgaaaagatcctgccggcactcgacgcggagcttgccctcaagtatccggaaaccgaagtgctgccttactacctgcgagcaagaagtctggatcataaactcacgctctatgagatcggccgagcgctttatcacctagcccaaaggcgcggctttcgcggccgggcggcactcgatcagagtgagaattcgagtgagttcaagaaaagtatcgaagggctgtggaaggagattcacgccagcggcagccggacattgggggaatacttctccaaactgaatccacacgagacaagaattcgtggccagaggacgcaccggaggatgtacgaagaggagtttgcggcgatctggaccgctcagcagcagcattaccccgacgtgttaaccgatgccaggcggcaggtcctggagcgggcgattttctatcagcgccctctgaagccaagtgatgatctggtcggcgattgcgaactggagccgggtgaaaaacgggctccactatggacgattgaggcacagcgatttcgcgtactgaacgccattaacaatttgatggtagtgcagaagggggttgcgcctcgcaaactggaagatcacgaacgccaaactctgatcgaggcgacacgcacgaaagaaaaaatttcttttccgcaggttaggaagctgctgtcgctccccgcttcttcccgtttttcgatcgaagaggatggcgacacgaatcttcccggtgacattgtttcctctcgtatgtttgccgctcttgggtcctcctggctggaaatgcccgaagagaggcaacgggaattggttgcagaccttggggacgcgaggcggaatgagacggacgaagatttgttccggtgtttgactgaaaagtggggatattcgccagatgtcgcgcaacgactgtgtgaagtcgctctgccttccggctattccaggctctcgtcaaaggctatctgcaaggcgttgcctttcatggagcagggaatgacgtttggagaggcgcggcggaaactctggccggagcaattcgaggaaaaagaaccgctggactatctcccgcccgtgctggaagctccagggcttaaggacatacggaatcccgctgttatccgggccttgagtgaactgcggaaaacagtgaacgccgtcattcgccggttcggcaaaccggcttcgatccatatcgaactggcgcgggacatgaagcgatcgagagaggaaagaagaaaggaggccaggcgtaaccagcagcgcagaaaacttcgggaggaggccagggaggcgctacgcccgtatctcggagacaacgttccgagccgccagatagaaaagtaccttctgtggttggagtgcggcaggcattgcccctactctggacagccgatcagccttgaagcgttatttggcgatcacccccggttcgacgtcgaacacatcatccccttcgaccggtgcctcgacgactccttccagaacaagactctttgcgaagccggattcaacaggctgaagggcaaccgaactccgtgggaagcgtttgggcataccgaggagtggccattgatggtggagcgcgtgcgtgccttccgcaatgttgcaaagctgcgccgcttcatcatgaccgaaacggacgctgaaaagctgcttggggaattcgtcagccggcagttatgtgacacaaggtacgcttctcgtctggctgccaaatacctgggcttgctgttcggaattgaccggccggataacaaccgaattatcgtctgtgcaggcgccgttactgcatttctgcggcagaaatgggacctgaaccggatactgaatgaaaaacctgaaaagaaccgcgacgactaccggcatcatgccgtagatgcgatcgcggtcgcgctggctacgcaggctcagattcaacaactcgccgacgccgcgagacgggctcgggccgaagggcatcgccggtttggatcgcttcccgatccgtggccgggttttcgcgaacaggccagaaacgcagtgttgcgctgcgtcgtgtcacatcgccccaagcggcgcctgaagggagcgctgcacaacgagacgtactacagcgcacccgaacagcgggaaggaaagatggtcgtccgctgccggaagccggtgaccagcttgacgaaaacggatatcgaggcgatcgtcgacgagagaatccgcgagatcgtcagggcggcttgggaagcggtcggcagcgacgcaaagaagttcgagggtaactggccatttattgaaagcaatggccggaagattccgatcaagcgagttcggtgttttcaggttgagacggttcgttcgatagccgaggacaggcctgagcgccgccggcacgtcatccctggcgggaaccaccacatcgagatatgggcggaaacagacccaaagtcgggattgccgaaacggtggcattttcgagcggtatcgaggcttgaggcgatggaacgttatcggcgccgtcatgagggcgtaagaatcgtgcaacgggatcatggccctaatacgcagttctgtttctctctcagcgaaggggacatggttgccgtgcgccgcgcgcccgatcagccggagacattatggtgtgttcgaagtgcacggacgcgtggatctttcgaattgcagcctgccacagatgcccggttgaagaaggatgctgaaatctgggacgtggcattgaacacactgatgaaactgggttgccggaaggttgtagtgacaccgctcggcgatattgtggacgctcatgactaacaggattttggatttttccgagcggcctgtaagactgtccattcgcaacggcctgctcgtggtaaggcacgaaggagaggagttggatgcgatcccctgctcggaaattgctgcggtgattgtttctcatcgggaagtggtgttcacgcaggcggtgttgggagaattggcgactgcgggcgcaagcctggtggcctgcgacgcgcgccgacggccagttgccatgttgctgccgctcgaaagccaccacgtacaggctgaacgcttcactcaccaatcgcgcctgaccctgccgcgccggaagcgcctgtggcagcaggtcgtgcgcgcgaagatttcagcgcaggcgcgcgtgctggaagaaaggatgggaacggacgctgggcttcgggcgttggctcggcgtgtccggtcaggcgatccggacaatatcgaggcccgggctgcgcaccgttactggcgcctcgtgttcggcgatccccggtttgtgcggagcaaagaagaagacgagcggaaccactggctggactacgggtatgcggtgttgagagccatggcggctcgcgctatttgtggcagcggtttgcacccaacctttggtctcgcgcatcggaacaaagcgaatgccttcgctttggctgacgacatcatggagccgttccggcccatcgttgatcgatgcgttgcgaattccgacatcgggccacttgaacgggacgcaaagaggcggctcattgaagccctggctgcgcgatttctggtggaaggtgaaagccgaaccctttttgatattctcgcgcgggtcgctcagtctttagccgcggcggttacgggtgaagctcagcgattatggatacctgaatggttgcctggggatcgccttcctgtggaacgcagaccagttggccgcgaaacggggctcactgcaaaggaaggcatccggcgaacgggctgagccgatgagcagcatttccggctatcgagtcatgtggctgtttgtgctgttcgatcttccggtcaaaagccgggaacagcggcaacagtacgcccacttcaggaaagaaatcctttcacggggcttcacgcagttgcagctctccgtctatgcaaagcatttgccaagcgaacaagcagcagacagtttgaaaactcacattgtacgtgccctgccgccgggagggcaggtgcgtttgctgctcgtcactgatcatcaattcggaaagatggaggtgtacaacgccaggattcgcggaagggtggaatcggcgccaacgcagatctcgcttttctagagggccgggaggccacgaagttcaaaaactaagaaaaattgaagatgcgctatggccagtgcacgcctgaatggtcggttttcgattgacgaacgaaacataaatggctcgcatctcatggagatgcgagccactagagtgtatcaaagaggccgttcccgaccagccagagcaccacgaagtcgtggtgcatcagttcggcagagtgtatcaaagaggccgttcccgaccagccagagcctatcgacgcgccttcaagtctgggtctggagtgtatcaaagaggccgttcccgaccagccagagcgcaagggaagttcttcacacgtgcgctggagagtgtatcaaagaggccgttcccgaccagccagagccccaaaaccgccggttatctcgctcgacaggagtgtatcaaagaggccgttcccgaccagccagagcagttaccggaattcgccaacgccccagtgtgagtgtatcaaagaggccgttcccgaccagccagagccggatctacgtgagagatcggtagatccccgagtgtatcaaagaggccgttcccgaccagccagagctcggtttgagcacgcgataaagctcttcgagagtgtatcaaagaggccgttcccgaccagccagagctgttgttacctgggacgaataggaaggggggagtgtatcaaagaggccgttcccgaccagccagagcgggaacgcggacggtttttatgctcatcagagtgtatcaaagaggccgttcccgaccagccagagcgcgccaaccagcccttccatcgcgtcggtgtaacatcctttctgtaaattccgttcagaccggttgagtcgcattc

SEQ ID NO: 2067 - DNA, 23279 bp, synthetic construct
  source 1..23279: mol_type = other DNA
  misc_feature 1..23279: note = Synthetic
gaaaattcgcgatatgttcaagaaacaaattgatagggaaattgagggcgttgtcaagattggtcaagaagatgatgaacgcgttagtcaagagcttgaagaatatgtggtaacgagtgaattagcagaacatttcaagcattttttctctgcatataaagaaggcatcaatcatcctactgagaaaataggtgtttgggtatctggatttttcggttctgggaaatcacattttttgaagatcttatcctatttggttgaaaataagcaactacacggcagaagcgtcattgactcttttgaaggtaaaattaaagattccacgattcttgcatatattaaaaaggctgcagaagttgaaacggatgtcattttgtttgatatagatgcaaagtccgaaacgaatatgcagacggagaaagaatccattgttaatgtactgaataaagttttcaatgaaatgcaaggattttgtggatcacttccatgggttgctgatatggaaagacagatgagtatcgatggaaagtatgatcaattcaaagaaacttttttgcgaatttccggaagaatttgggaaaaatcgcgtgatgattatttctatgaagcagactcaattatcacagcgttaagcacagtcactcaaatgagcgaagcaacggcacgtcgctggtttgagcatgcagagcaagagtacaaaatcagtatcgatcgttttgctcagcgtgttaaagattatatagatcgcaaaggaaataatcatcatgttgtcttttttattgatgaagtgggtcagtacattggtgataactcatcagcaatgcttaatcttcaaacagtcgtgcaagagttgggacgcaaatgccaaggacaggcatgggtcgtcgttaccagtcaagaagatattgactcggttgtaaaggttaaaggtaatgatttttccaagatcatgggcaggttcactaaattgggtctctccagtgcgtttgtggatgaagtcattaaaaaaagaattttggagaaaaaagcgcaggctgcaatgcttttgcatgaagtttatcgtaaaaaggagtctattctaaaaaatttactaactttttcagataagagcgcagagatgaagaagtttaccaacgctaatgaatttgttgctgtgtatccatttataccttatcagtttaacctgctgcagcatgttttcaccggagtgagagaacacggcgcttctggaaagcatctctcagaaggggaacgttcgttactcagttcgtttcaagaatcagctgtccatttctcagaagatcaagggggactgcttgtacctttctcttcattttatgattcaattaaagacatgcttgattcaggaattacccatgtcgttgttcatgcggcgcgtaatcagcatctaggtcagtatgatgtagacgtattgaagcttctttttttgattaagtacataaaggaagtaccggcagatctggaaaatttagcaaccttaatggttagttcgatggatgacgacaaagttgagttaaaaaagaagatcggtgcgtctttgcagcgtttgatcaaagaaacacttgttcaaaaaaatggcgaagaatatgtttttctaaccaatgatgagcaagatgtcaatagagagatcaaaaacatgcgtattgaatcatctgaaattattcaaaaactaggtgaagagctttttccatcaatttattcaaacaagaaatatcgctattctgcacaatacaatttttcatttaacaccatcattgacgaccgtccaatcggcagtcaatcggctgatattggactaaaaatcataacgcctgattttgatgcacaaaatgatctgaatgatatgcagcttaaggccgcatctttacgtgagagtaacgtcattcttcgtatgccaccgactaccgcttacttggaagaaatggaagaagtgttaaagattcaggcctatcttaggctaaagagcggaatatctgcgtcgcaatccattgaagaaatcaagtctcgaaaaacacgcgaaattacggaacgtaaaaaacgaataactgtggcaatacatgaggcattgagatcagctgatctttatgtgaacggggaactcctccccatcactgataaaaagaatgctgttgatcgaatcaatacagcttttcattcactcatcataagtttgtatagcaaaattgattatgtcactgagtttacagttaataaaaatgatttaagtgcacttcttcaacatagagaggaacaattaactgcttttgctggggataagtctaattatttggctttacaggaagtgaacagttatgtgacccgtatgaccatgcgtcgacaacagttgacgatcaaaaatattaatgatcatttttctgaaaaaccatatggatggctggaaatggatcgtacggcattgctgattcgattatatcttgcacaagaaattaaattaatgctgaacagcgtttatctgcagccggaggatgaaaatctcattgatgcatttatgcgccgtgacttgattgatcgggtcattgtcagcaagcgcgaaaaaatagcagcgccccttcttaaaaacgttaaggatctttgccaaatcatttttgaccgttcatcgattcctactgacgaagatgggttgatgcagacctttaaaaaactattgattcaagatctgcaagagacagaccagatccttcatctatatcgagaacatccactttatccagggaaagaaattatggtttccggacagaaaacaatacgtacgcttataaatatccgtgatgcaggaaccttctataaacaagcctatcagttgaaatcagatctggaagattacgcagatcggattaaggatgtaaaaggatttttcatgaatcagcgcaataaatttgattctgctatccatctcttggcagtttatgaaaaaaaccagtcctacattactgatccggattttcttcaagtggaacagcaaatggcacaaattgtccataacgtttctccctatagccgaataccaaaacttcaggaactttgtgatacgtttcgtgaactattcatgacactgattgaaaaagaaagtcagccaattgaagaactgattgaccgtgatcttcaggaagtactggatgaattatcaaaggatacgagaatcagacaggcctatgcatctgaattccgtcaagaatttattcgtctgaaggagcaacttgccaacgcggacagcatcattgaagtcattgctaagcagacagaaagtgatcgtttgaaagttcgatgtatgaacagaattatgattaaacgtcaagaacgagaacatcaaaaaacagcccatgactctaccggtaaatcggagccgactgtaaatgtcgcagcacagcagaaacagacaaaaacaatcagcaagcatacgatcatgcgcgggactttaacaatcgcatctgaagcagatattgatcgatttgttcatgaattgagaacaaagctggaagatgcacttgataaaaatactattatcaaactggtgtgattttggagggacccaatgatgcgtgcacaaaaatactctattgataaagctgctgttagaaagtttgccgtttcggcaagaaaaaaactgattgatggagtcactttaaaagggatgacttttggcatatctatgaccaacaattttattccagatcccgaatctgtgcgacttaacggattaccgttggatgatattcaaaaaaaacagtataaaagcctctatcgaagaattaattcaagcactattgattcggtcattgaagaagtcgcttacacttggtttaaccgctttattgcccttcgttttatggaagtaaatgactatctgcctaccggaattagaattttctcctctgttgaagaaaaaaaagaaccggatatgatgagtcatatcgaactggtttcagccgagcttcatctagatttgaataaagtatatggttatcaagatcggaatgaatttgatcagctttataaatatctattgattcatcaatgcaatgaattaaaccgaatgatgccgaaaatttttgaacctattggcgattcttcagaactgctcttacctgacaatctattaggcgcagattcagttgtccgtgaaatggttgaatgtattgaagaagagaactggaaacatcaggtggaaattatcggttggttgtatcaatactatatctctgagaaaaaagataaaatttttactgaactaaagaaaaatgtgaaaatcagtaaagagaatattccggcagcaacccaactgtttacaccgagatggattgtgcaatatatggtagagaattcactgggaagactttggctcgaagcgcatccaagtcaagaattacgtgagaaatggtcctattatttagatgatgttgagcaggaaacggatgtacaagcaaaacttgatgtattgaaaaataaaaatgtagtaaaccctgaaactattaaagtactggatccttgtatgggttcaggtcatgtacttgtctacgcatttgacgttctttatgcgctgtacaaggcggcagggtattcggtacgtgacattcccagtttaatcctgcagaagaacatttacggattggaaattgatgagcgtgccaaacagcttgcctatttttcattagtcatgaaggcacgtcattacgaccggcaaatactgaaaaacattgttgatgttcatgtttatgcaatctgtgagagcaatcacattacaaatgaagatatcaatttagttgctgaggacaaaatagacagggtgaatatccaaggtttcgtggacttatttcgtgatgcaaaattgttcggctcgtttttaaaaatccctgaagctattgatctgcttgcaataaaaacgagactagatgagctcaagcatggcgacagccacgaccttttcatcgaagctttccagcaccagacgcttcctttatttgagcagttattggaacaagcaaggacactttcaatgaaatatgatgtcgtaatcaccaatccgccatatatgggaagaaaagggatgaatgcgcagctttctagctatgtgaaatcgaaatatcctgatgctcaggctgatttatttgcagtaatgatggaaagatgtttcgactttacttgtgaacaaggaatgacgagtatgattactcagcaatcgtggatgtttctgtcatcctttgcaaaactacggttaaaaatattaaaagatcaacagattaattctatggttcatcttggggcgcatgcatttgctgaaattggtggagaagttgtacaaaatacaatgttcgttctacgcaatcaaagcataccaaaatacaaaacacatttcattcggctagttgatattaaaaatgctgaggaaaaatcaaagcatttttgggatagagatttacattatataagagatcaaagcggattttcagatattcccggctccccaattgcctactgggcaagtgaccgagtgagaaaaatttttcgtgagaattcaaaacttattgattgtgccaagcctagacaaggtttagcaactggtgataatgacagatttttacgcttatggcacgaggtgtgttttaaaaaaatcggccttcatattaaaaatcaaattgaggtacgccaatcgacatgtaaatggtttccaattagtaaaggcggctcttttagaaagtggtatggaaataaaatatatttggtgaattgggaaaatgatggacaggaaataaaaaatttgcgtgataacagcggaaagttaagggccagaccgcaaaatacaaagtattattttcaaaaaggaattacatggtccacagtatcatccggttcggcttcatttaggtatttaagtcattctatttttgaaactaaagggtcaaccctatttgttggtaaagatataaattatgaaagtatttttgggtatttaaattccaaattggtaaatttatttcttggatgcctgtcgccaactctagattatcatgaaggaccaatgggaaaacttccattacctgtttttgacaaaaccctaaatttagaaaaggcggttaatgaaaatattattttatcaaaatccgactgggactcttttgaaacgtcttgggattttaaaacgcatccttttcttgagtttcgcaatggtgcgacgacattagaagaagcgcaatcaaattgggagaaggaagctgaacggcgattccggaccgtgaaggctaatgaggaagagctgaatcaaatttttattaatttgtatggtttgcagaatgaattggatccggaggagtctgatgatgaggtaacaatccgacgtgccgatcttgagagagacgttaaatcatttctttcttattgtgttggcatcatgtttggtcgttattcactggatgaagatggtttaatctatgccgggggaacgtttaatcgcaatcgctatcaaacgtatataccagataaggacaatgtcattccgataacggatgaaacttattttgaagatgatctcgttggaagactgattgagattctacgattacaatttggtattaaaaagttggacaaaaatctggattttattgcggaagcgttggctaaaaaatcaactgaaacagcacgccagcggattcgccgctacttcttgaaggaattttacaaggagcatgtacaaacttacaaaaaaagaccgatctattggctttttgacagcggtaaacaaaacggatttaaagcattgatctatttgcatcgatacgaaccgggacttgttgcacgtgttcgaacggattatttacatacaatggaacgtaagtatgaagacgaaatgaaccggctagcgatgcaaatggaagctgatgtgtccgcacatgaaaaaatgagggtacgaaaaagaaaagaaaaattgcagaaacagcttgaggaatgccgtcagtatgatcagattattgcacatgtagcaaaccaacaaatacctcttgacctggatgacggtgtaaagatgaactatgctgaatttcaaaagatcgagattcctgggaaacgttatccggaaaatttacttgcaaaactataaatcgatgattccttatgaggagacctgtcatgaaactaaaagaaatacaacgtctcttaaatgaaacatttcaaaaaccatttctctatggacaaaagcgacatcttgtcttttggtacgatgattcaggtgaatttagagaggatattgatgatctgcagttagagaatattcgcatttggaaagttacgccaaataatttatttgcaacaaaatatgaattagagaagagggatcctgattcatcttttctcatctattcgcaaatgcctaaaccgaagccgcgtgaaaactggttgtacgaccaattgaaaatgggaattgaattttcaacggacaaaacgacagcgattatgcgagaactgggattgaaagacaatacattgcgcgacgagtttaactattatgctaaattttttaataatcgacaacgctttgctgcatttcaatcatacgggatcgagcactatacaccacaatcgattactataggcgtcttgtccgtgctatgcaaaactcccttgaacagaacagatgaaatcgtaaagcaactcatgcgggagtcggcagcagggattgatcgatcatggatcgctattgaacggtttgcgaatccagatgcattttggaagctagtggcgatcacttatgggtattctgaagacaatccatcattaaacgacctcttttcttttttactgttaacttatcttgaaagtacagcacctgatttgaaacttcccgaagaatggcaatgctatctatccagcagaccgatgaatgttgtcgttttgatgaatcaatttatgaatcaagtggatgatcgcaaatcctttcagaaactatcgactactatagccaacgcgattcacattaagacattcgttaataaatgggagatgaagcattttattaacgcagattgttttaaagactttgacgaaagaatcattggttttcttgttgctcagctctgttcaggaatgaagcagtttgatgattatttaactatagtgacctcacggcgtaccttacattggtatccagagtacgaagaagcgtataaggcgattgaacaggcgatcaatttgtttaggcttgatgagcagatgcaatctttcattcccgaggcttcgacctacgaattgttgatcggttatgcgaacgacttttatcgcttcgatcattattatcggaaattttatattgcctatgatcaatggaataaggatgactatctcattgctttgcggaaacaggtcgaagatttgtactgtaatggttatatgactgaactgtctgcaaagtggacgttgagtttaaaatcagtaaaaactgatcattggtcaattcctgatacacctcagcaatctcatttttatgaagaaaaagttcaaccttatgtcacgaaaaatgaaagaatctttgtgatcatttctgatgcattgcgctatgaagcaggtaaggaattagcagagcgtttggatttagaacagcgaggaaaaactgagctgtcatttatgcagagtatgcttccgtcgtgtacctcactgtgcatgcccgcgatgcttccccatcaatccatacaatggaataaagactctgtttctattgatggtcgaaaatgtgtaggaagtcatatgcgtgaaatgatcctacaacgaaaaattaaagagagcatagttatacgtgcacaaaaattagcggatatgcgaaagcaggagatgcggcgacagctccaaggcaaaaaagtcatttatatttatcataatcgggtggacgcaaacggtgaccatgcagcgtcggagacagaagtattccaagcaacagaacaagcaattgaagaactcctatcaatgattacgaagcttgtaaataatatgagtgcatcagcgatctatgtaaccgcagatcatggttatttgtatcagcgtgatccaatcaaacctagtgggaaacttccgagggagagtgaacgtttgcttgaaatgaatcgacggtttcttatcagtagggaaaaaccgtcaacacagggtgtaatcactttttcgacaaaaggcgaactggtaaatgagcctccgctttttgttacggttcctaatggatctgaacgatttatgacccagggaggcggtgcgaattatgtacatggcggagcaatgccgcaggaaattgtcgtgcctgtggtcttgtttcgaagtgatcgtcatacagtctcagaaaaagtgaatgttcgactaatgagtagcacgagaaaagtgacgaatatgatgacctttcttgaattttatcaatcggaacgtattgagagaaaacggcttcctcgctgtttgaatgtttattttattgatgatcacggattaagaattacgaatgaaacgctcttactggctgatcgtgatgcagaaaagcctatcgaccgcgtttatcgtgtaaagtttgtatttaaggatcggtattatgacaaacggcatacttattatctaattcttgaagatcatgatgaaaaggagaaggattatcatgaacgtataccttttactatagatattcccaatttcaaacgttcagattgagaatagggtaaataattgctaaattaatccaaaagtcattgacatattatcctatagccactatattaaaagtaagcgatttggggaaatcgcggtatcgcaacgatcgtatcagatcaggttttatagggtttgtatggtaaagcattaagctgtggcgttggggatcgcctcccttttcgggaattcccccattaaagtgactaggcccatggtttagtcacttttttgtaccttctgtgactgaattttataaaaacataaaactattttcatacggagatgaaaaaatatgaaatatagtatcggacttgatatagggatttcgtcggttggctggtcagtaattaacttggatcgaaagcgtattgaacgattaggtgcgcgactttttgatgcagcagaaaatccgaaaaatggttcatctctggcgacacctcgacgtgatgcacggtcggcaaggcgtaggctgcgcagacgccggtaccgtgtgggaaaagtacgtcgctttattttggaacgcggattacttacaaaaggtcaggtaaatcaactttacaattggaaagacggagatcttgatatttggttggtgagggtaaatgcactggaacgtttacttacggatcgtgagtttgctagggtgcttattcatcttgcaaaaaatagaggctatcgatcaaatagaaagagcgaagcaaagcagggggagaatggacaagtgctttctgcaataaaaacaaacaaagcattgatggatgaaaagggataccgaaccattgctgaaatgctcgtttgcgaattcgaaaaatttgcaggacgaaagcgaaaccgcggcggtgaatacacgcatgtaattgctcgtggtgagctggaaaaagaaattcatctaatttttgagcagcagcgtttgatggggaatcggtttgcaactacagaaaatgaggctgcctatgtgaaaatttgggcggcacagcgaccggttgcaacaaaagaagacatccttaataaaattggcgactgtacctttgaaaaatcggaaaaacgtgcacccaaggcgtcctatgcttttcaatacttcagggcattggacaaactgaatcgtttgagaatcctcaatccgcatcaaccttcgcgcaaattgacggatcaagaaagagacttgattgttctggctttgtttaatcatgaaagtcaaaagtattccgacttaaggagactattgaaacttagcgatgatcaacgctttaatgaaattttttacgatccatccgtttccttgaaaaataatgagaaaaggacatttctttctctatcggaacaatataaaattcgcaaagtaatcaagaatgttcaaggaaaagaagcattgcttcactatcgtcctgtggattatgacacctttgcttatgcactgactgtttttaaggatgatcaagataccaaagattatttagcgaatcgttatgtgaatgataatggaaaacaagttgctaatctcgccaatcgagaatatgatgagggattggtcgagcaattactaaacttatcattttcgcagtttggccatctctcgcggaaagccatatatcgtttaattcctcagatggaacaaggactttcttattatgaagcttgtgagaaagttggttaccatataaatgaacaaattggacaaggcaaacaatatcttttgccagtcattccagccgatgaaattcgaaatcctgttgtgattcgttcgctttctcaaacgagaaaagttataaatgcaattattaaacgttacggatcacccgcttatatgtacattgaacttgctcgagaaatgggaagaccatatagtgaacgaagagatctggaaaaacagtacaataaaaaccgtacgaacaatgatcaagttaaggaacatatccaagaattatatccagcaatgagtgccccccgagggcatgacattttaaaatttaagctatggcaacaacaacagggcaagtgtgcctactctctagaaaaaattcctgctgatgaggtattcgaaacgggttatgtcgaggtggatcatatcatcccgtatagccgcagttttgatgacagcaattcgaataaagtactcgttctctcaagaatgaaccaggagaagaaaaatcggacgccctttgaatggtttggagaagatgagcatcgttggcaacgttttgaatcttatgtgaacaccttgaaagttgataaaaagaaaaaatcactattaacaaaaaaagatgtggacgaagaacaggaagcaacgttcaaatcacgccatttaaatgatacgcgttatattacgcggtatattaaaaattttattgcagataacctgcaattcagagagcttgatggagacataaagcagcgcgtctttaccgtaaatggagcctttacctcattaatgcgaaaacgctggggctttaataagaaccgtgaagaaagcgatttacatcatgcagtggatgctgtgatcattgcggtgagccggccatttcgtcaggaagttagcacctactttaaacatcgtgaggtcagtttacgtcagcttatgaagcgaacttgggactactttccggaaccttgggacaattttgtcaaagaacttaaagcgagaatcatccaagagccagagaagttgaagcttgctttattaagcatggagctggaaagctatgatcaagaatttattgaagaaaccaaacctattttcgtctcaagaatgccgaaacggtcaataaaagggcagattcatgatgaaacattgcgcagaaatagaggaaaaactgaagatggtcttgtcagaaccgtgactaaaactagacttgagaatatttcttttgataaaaacggtgattttccaatgtatgggaaagaatctgatccgaaaacctatcaagccattaaacgacgttatcttgaaaacgggaaaaatagtaaaaaagcatttattaaaccgctttataaaccggctaaagatccaaataaacaatcaatcattcgctcggtaaaaatagaagataaaaagaatcaagtctttccgttaaaagaaaaaacggtcgcctataattcaagcattgtaaaaacagaagtttttcagaataaggaaacagggaaattttatcttgcgccagtatatgtagcggatgttatggtgggaagagagcctaagaaatttattacacaaaaaaagccatatgatgaatggttagatattaccgaagaatacaattatctatttagcctttttcctaatgacgttgtacatataaagatgaaaaaaactaaaaaaacaaaatcatttttgaatgagccggtgacttggcaagaaggatatttttactttaagaatgttcatactggaacagcacaaatcggaattattgaccatatgaggagtttcaaggatgaaattggatcgcaaaatctcgtaattcttgaaaaatatcaggttgatccacttggcaatttatctaaaattcatggagagaaacgttatggcgtaccgtcatctagtcattcgcaacccgtcacgactgtcgactaaagacgagcaattgctgatccatcaagaagaaaccattcgcattccgcttgaagatatttgttcgatcacattagaggatcctgttatcacggttaccagtgctttgcttagtaaatgcacggaatatcaagtggagttaattatttgtgaccgcaagcgtataccaagcggaatcattcaaccgtttaatcagcattcacggcaaaaagaagtgctggaaatgcagttgaaattatcaaagccttttattaaacggatttggcagaaaattgttattcgaaagttggagaatcaagcacattgtcttgaattactgaataaaggtgatgaggctggaaagttattctcaattagtcgtagtgttgagtccggagatcgaagcaaccgtgaagcttatggagcgaaagtatattttccaactgtttttggcaaagggtttcaaagacgcgaggaaaatacacgcaatattgcattgaactatggttacagcattatgcgttcacttgtagctagggcacttgttcgatatggatttaatccttgttttggtgtatttcatgacagtcagactaacgcatttaaccttgcagatgattttatggagcctttacgtgcgtttgtggacgtcacagtcgccatgaatgttaaagaagatgatgagtggaatgccgaaatccgaaaaaagctttttgaaattcttaatgttgaagcaatatggaatagcgaaaaacaaagtattactaatggagtggatcagatgattaaaagttatacaacagcatgccggcaaacggatgcatcccttttattgctgcctgagttagtaaatatcaatcctcatacatatgagtaagtttatgcgtatactcgttttctttgacttgccggtaacgtcttcagcagaacgaaaagagtacagccgtttccgtaagtttttattgaaagatggctatacaatgctccagttttccgtttactcaagaatttgtaatggggatgatggcgtacaaaaacatatgaaacgattaaaggagcatttgccacccgttagtggtgctattcgttcaatgaaaataacggagaaacaatttgaaaacatggacattttactcggagaaccaacgattgaggagaaattaggctcgaataaaacggatttcttttaaaagtggggttgctttttataagcagcctttttatttttcaaaataagtgttaaaaatcgtaaaatgacagttgaaaagtatgccttttttgatcgttttttaaaattaaaaaccccttgaatggggtggtatcaaggggttcaggggcatggatcgtatcacatcaggatttacaggggaagtatggccaaaatctcatcccctcgacaaatttatgaatcgtatcacatcaggatttacaggggaagtatggccgaacacacggagtttaatcatcccaaaggatcgtatcacatcaggatttacaggggaagtatggcaccatgaccatgcagtcctgtggctttgcaatcgtatcacatcaggatttacaggggaagtatggccaacacaaactcttattctttgaccggccgatcgtatcacatcaggatttacaggggaagtatggcacaagcgcaagcagccataaaataaagtagatcgtatcacatcaggatttacaggggaagtatggccaaaactggcacttattactgcaatatttaatcgtatcacatcaggatttacaggggaagtatggcctaggtagtgggacacccagtgcttcataatcgtatcacatcaggatttacaggggaagtatggctgcacatcatgcggccaagagcttcctgcgatcgtatcacatcaggatttacaggggaagtatggcctgctcaagaacgatcagatcaaatatcagatcgtatcacatcaggatttacaggggaagtatggctaaagtatattcatttgctgcaaaacgataatcgtatcacatcaggatttacaggggaagtatggcgttggagacacatctttatcaatagcaattatcgtatcacatcaggatttacaggggaagtatggctggtataaagtagcggaagcacaaggcagcatcgtatcacatcaggatttacaggggaagtatggcttgcattaagaacgagaattcaatgcaactatcgtatcacatcaggatttacaggggaagtatggcgtccataattcttggaataacagtcaaatcatcgtatcacatcaggatttacaggggaagtatggcatagattggctgcgcatcctgcaacgaaaaatcgtatcacatcaggatttacaggggaagtatggctgctaccgccatgcccttgcgcttcgctttatcgtatcacatcaggatttacaggggaagtatggccggaagcagacaagctagctcaatcaatcaatcgtatcacatcaggatttacaggggaagtatggctacaggagccacaacatcatcaagcccttcatcgtatcacatcaggatttacaggggaagtatggcgataccggaaatacaggtattttgattcccatcgtatcacatcaggatttacaggggaagtatggcttgtattcgacaatggcggtcatgtctgatatcgtatcacatcaggatttacaggggaagtatggctgatttttcgatgatatcacgcaattgatcatcgtatcacatcaggatttacaggggaagtatggcgcatcgattactgaccttaaaccggtcacaatcgtatcacatcaggatttacaggggaagtatggctaggtgtccggaacgtcgaataggtcgtagatcgtatcacatcaggatttacaggggaagtatggcccgggttcgcttcgctccgttggacttggaatcgtatcacatcaggatttacaggggaagtatggcttcgcactgatcaactatcagttcaagccaatcgtatcacatcaggatttacaggggaagtatggctccagccaccgcatagccttttctatcgggatcgtatcacatcaggatttacaggggaagtatggcgatctgctcgaacttaatgcgatggaaatcatcgtatcacatcaggatttacaggggaagtatggctcacttggtgatggaaatccattgtcgtttatcgtatcacatcaggatttacaggggaagtatggcttaaatcacatcttgcccacaatttctctgatcgtatcacatcaggatttacaggggaagtatggcttttgattggcgatcctgggcgacttgctgatcgtatcacatcaggatttacaggggaagtatggcacaaaacgttcatactgctcggtggacagcatcgtatcacatcaggatttacaggggaagtatggctcatgtcctcggcgttcggtgcagtaccgaatcgtatcacatcaggatttacaggggaagtatggccgctgttctagcagtaccttttaaaaacccatcgtatcacatcaggatttacaggggaagtatggctagctcatcttcagggcgaacattttatccatcgtatcacatcaggatttacaggggaagtatggcccaagatggagattatacagaacaaccgctatcgtatcacatcaggatttacaggggaagtatggcccaagatggagattatacagaacaaccgctatcgtatcacatcaggatttacaggggaagtatggccaggtggatacccacaatcgcttgtatttatcgtatcacatcaggatttacaggggaagtatggctaacaattatgccaggaacaaggctagatatcgtatcacatcaggatttacaggggaagtatggcagattgatatcgttggacaactgactgatcatcgtatcacatcaggatttacaggggaagtatggcagaatgacgggccgattgaaatcacgattaatcgtatcacatcaggatttacaggggaagtatggctcgctgccactgttcagcttcgattcgctatcgtatcacatcaggatttacaggggaagtatggcacaccttcgatattaacaatctaccagcgatcgtatcacatcaggatttacaggggaagtatggccatctggaagcggcgtgcttagaagtgcctatcgtatcacatcaggatttacaggggaagtatggcgaagccgtgagacaatccgaaagatgattcatcgtatcacatcaggatttacaggggaagtatggcagcgagaatttacaagaaagagatcaatgatcgtatcacatcaggatttacaggggaagtatggccccgtgttgtcattcgctgtgtaattgtcatcgtatcacatcaggatttacaggggaagtatggctcgaaagaacccgacaccgatcaagaagtcatcgtatcacatcaggatttacaggggaagtatggcacaaaatacgtttttgtcatactgtgacaaatcgtatcacatcaggatttacaggggaagtatggctgtatccacgcactcatgtagagtaacttaattttaacatgaatgaacgagaattgattgtaaattattatatgtatagatgtgtttttttaggattgatctattaacaatatcttcaactgattatcaatcaaacgaattgagtcaatcctttatcgctcctcaaaaaccaatcttcccaatgtatacaaaccgccgtggattcagataataatgctatgtgtctgatgaggtgaggagtatggatatggctgttaacgtcagagtctcgagtgttgaattacagaactgcaaaaatgttgttcaaggtaagctgtattttccttgttcgaaaagtcattcgctgaaacgtgcggatgtgctgggtgtgtatgggcaaaacgggtcgggcaaaacggcgattgtttcggcgtttcaagtggtgcgcacgctgctgaacggtgggccgcttgagtcgggcattgaccggttgatctatcagcgcagcgatacggcgcgttttctttttaccttcttgattggaatggcgaacaaacactatgaggttgtctatgatttttccctgacgaaacgcgatctggatgccgatgatgcagtgaatttggccaatgatcgtcagcgcgatccggtgaccgttacccatgaggaaattcgttacaagcaattgataaagggcgcgcggtacaggaccttaattgcatttacgcaagcaggacgggaaacaaaagcggcgcctaatacggttgcgtcaaagatgcgatcaagaaaagatgatcgcttcgtttcatacaaagtgagtgctgttttggcgcaacagcagcacacttcattcatttttcgtaaggacaattttggcttgcttgagcagactttggatgaattgccctatcaactggtgcgggcgttgaagcaggtgttcgctgcgcggctgtttgtgctcagcaatcatgattcagggaggtcgcttgccgatgtgtcgattccgattcactatagcagcactaataaagaggactacggtgtgattgaactgccgatcaatcatccgaaaaaggtggaccgaaagacttatgagctgctgacgcagatgtttcaagcgattagcaaaattctcaaagaaatcgtgcccggattgaccgtggaggtaagaaagcttggcgatcagatcatggagggcggcggtaggggcgtacgcatcgaattagccgcacggcgcgaagggcgcctgcttccgatttcctgtgaatcggatggtatcaagaaactggtggctgtacttagttcattgatcgtgatgtacaacgatatgaatgcctgtatcgtgatcgacgaactggatgccggtatttacgaatttctgcttggcgaactggtgaaaattctcaaggacagcggcaaaggacagcttctgtttacctcgcataatctcaggctgttggaagtgcttgagaaggacaatcttgtcttcacttcagctaatccggaaaatcgctacattgtcttgaaagggattcgcgacagcagcaacatccgtgatgtctaccttcgtgccattcagctcgggaacgatggcgacgaggtttatcaaccaaccgatcgttacgagatcatggaggcatttgatgaggcaggtgaacaaaacaatgcctaaaaaagtccttgtctttcttgttgaaggcgtttctgatgagcgtgcgctggcggccattcgccgatatgttcccgacaagtacagggtcgctatccatgtgacccatggcgatctgtttacacgaccgggcatacgcaaaaatgtgaaggggcgcgtgggtgaccaggtgcgcaaaatgatgcatgaaacgaaataccgcaaacaagagatcgcggcagtcattcaggtgaccgatacggatggtacatttgttgctgcggacgatgtgagggtgaacgcatcggttgggcgcgcgccggtctaccaagaatcaggaattatggtggcaaattcgggcattcagcagtatattcaaaaaaggaatcgaatcaaagcctcagagctgcacacgatgcgaacgtccgatgaaatcatggcgggaatctactattttctcctctatttttcttgtaatctggatcatgtgatgcatcataaacgcaatatgacgattgaggaaaaaatcaatcaatcccgtgcatttgaacaggcatgccgagaagatccgcaacatttttattatttttttcataaccagccgtttgcagttgccggttcaattgatgagacctggagcttcattgaaaaaggaatgcattcgctgcaacggtatactaattttcaattagtttttgatctgttggattcgctggaaaagagcaagccacgctctgaaaaaaagaattagggggacaattcatggatcagaggataggtacgagcgcgcgtgcgcaatgggaaaagtcggagccggtgatccgtactctggaggcgtgcgaagacgtgttatggctgaatccagcctatggacagcaagccgcgtccttggtgtcggcggatgatgttgccgatgccgaagcgcgcctgcgccgatttgcaccctatctggtaaaagcattcccggaaacccgaggcagcgaagggatcattgagtcgccgatctatgcgctgccttcctttcaaaaatggctggatcagcagctaaagaggcaggttcccggtacatttttaatgaaggcagacagtgaactgccgatttccggttcgattaaagcgcgcggcgggatctatgaggtgctgaaaaccgcggaagatctagcaatccgcgcgggacgtctcagtaaaaacgaaaactacgcttgccttgctgaggcaacgttccgcgcgttcttcgccaattatgcgttagccgttggttcgaccggcaatttgggactgagtatcggcattgtcggggcgaaacttggttttcaaaccactgtacacatgtcgcgcgatgccagcgcttggaaaaagagaatgcttcgtaagcaaggggcatcggtcaaagaatatgagtcggattacagtaaagcggttcaagaagggcgcaagcaagcgcgccaagatccgcactgtcattttattgatgatgaacaatcaaacgatttgtttgtcggctatgcgactgccggcgcgcggctgcagcgtcaattgagcaagtcaggcgtggtcgttgatcgcgaccacccgttgtttgtttatctgccatgcggcgttggcggcgcccccggtggtgtgacccttgggctaaagcaggtttttggcgatgcggtccatgtcttctttgttgagccgacgcatgcgccgtgctttttactcggtttgcttaccgggcttcacgacaaggtctctgtttgcgattttggattagacaatcgcacggcggccgatggacttgccgtgccacgcccctcagcattcgctggaaaagcggttggttcgttgatttccggatgcatgacggtccaggattccgatttgtttcgaatcctcaaggcgctgaaagacacagaaaatcattggattgaaccttcagcagctgccggattcatcggtccgaaacggctcctcagcactaaggaaggcaaacgttatttagaacgctatgagctggtcgctaaaatgaatcaagcggttcacttgttttgggcgaccggcggcgggatggttccgcaaaaaaatagagatgcctactatgatgaggcatcccgaatttaattggtcacttttgatcgtcgtgactggtatactcatttggcacctcgtgaccgtcactgtgattttttttgttgtgcaagccggccatttcggtgctctccggtgttttcccgcgtcttaaactggcgtttcaattcttgttcttcgttcatggatttacctcctttttatcactatagttttcccgttattcatccggttatgttcaaccttttttcattttgatcgaatgcttgagtatggaagcgtgcaacaagtgtttgcaaaatttttttcagcagatacggaaacgtcgtgcgaagccgttgcgtagtgtttttaaaggcgtgaaaagcagtattttcaggctgcggcaaaatacctctgcaccagccggtggaatttacgttataattgaaaattaatgaagcatttgtaaaaaaaaatttacaataatgatgtgaaaacgatgattcttgcgctgtgagaaaactttttatagatacatatttatgatgggagatggaaaaatgctgaaaaatcgtaaagcgttctttttctggctcgtccttattctagtgattatcggcttaatctacaaaggctcatcgaccccctatgccgaacaggatctccagccgtttttaaaggcacatttccagtggacagcggaaacctttccgcatgttgatttctactacagcgggcagcatgtgacctctgatgacccgtatgcactgtttgaatttgtgtttcgcaaggcaagccatgtggcagaatactgcttactgacctttatgctgatcaatctgttcatgacaacggtgatgccgcgtctgctttgctacctttgcggaccggccatttcactttgctatgccatgttcgatgaatggcatcagacttttgtgccgggacgtaccggacatctgatcgatacgtttacctttgatctttcaggcatggttctggcgatggtgatcgtatttctgctcgacgtgtactattacctgttttacactggcagtcatcagccgcaacggacgacgcattttgggcagagtcagcgtgaataaggcaaaacgctttaaaccttttaaggttataaaccgatataaagagcgtatagtcacttcagtttgtgaatggtaaacgattggtttttttgcgggaggaatcatcggtggaaacttcagagaagaacaataaaaacaacaaacgaacgccaaggaggtacaacctccacagtgcttattttgcgatcttttgtcttggcgctctagccactgcttttctattctatttctttgggcgcaatgaatggctgatcgctgcgtttggcgcagcggtcgcagtccttattattggtgttgcttccttatatggcattttcaacgcctataatcttcgcgtaaaacggctgcgggcagctgtgagcaaagcagaggaaggagatctgcaaacgatcgctcatgatacggaaaacgatgaattgtcgcggcttgctgcagacatcaaccgcatgattcagacgaaccatgcgcgtgtcggtatgatgacggatgtttctgagaaggtgaagaatgcatcgcaaacgattgcggccaatgtcgaagaacatcgcgcctcctcaagcgagatcggatcggcgatgagtgaaattgccgcaggtgcctcggatcaagcggaactcatgagcaaaaataaacaggcaaccgatcagttaaaagaacggacgaacgagattgaagaacaaactgctctgatgagtaccgg

SEQ ID NO: 2068 - DNA, 23258 bp, synthetic construct
  source 1..23258: mol_type = other DNA
  misc_feature 1..23258: note = Synthetic
  variation 2765..2774: note = n is a, c, g, or t
gggagctacgtcggattctcccacacgctaaaatcgttatattttccatgtatgatgaagaggtatatcaacgaaaagcctatgaagctagtgcagatggctatttgatcaagcagctaaagcgagatgaattagtggaacaattaaaaaagattattcatggtgaaaaattgtttgccaatcaacaaattgtagaaaaagatggaaaagtgataaacgataaaaaaacgccatgggatcttcctttaactcaacgtgaaaaagatgtgtttatcttaacagtatttggcaattctcaaaaagagattgctgaaaaattgggaatctccgttcgtacagtagaaaatcatcgaagaaatataagtaacaaactgggtaattctaaacgaagctattggattgagttcgctaaacaatacaatctcttagatatctattagaaggtagattctaaaaatccttataataggatcaataccataaagcaaggatctatataaaaaatatgaacatttattatgaactgtttcgtttctcacgtgggacatctaattggaagtttttcacgttttactcaccaatatgtctgagattaatatttagatttgggtgccttttcacggattttatccaaacatatacttataatgaaacacgtgcgttgattttataaaaattaggaattacttggtgcaatttttgaaaaatcctgtattttcaggaccatttataaagatcttcgctgcggcttgctcgagtcctcgaaaatgcaagcattttcttcgtgcggtgttgattcaggaagtccattcaatgtcaccattaaaatcagtcagcattaaatggcccaatttttcaagaagaacatgatttgtaaaattgattcatttgaataatgatttttcatcatacataaaatgcgaaagaacacattaactcatgttttcaatgtcgccttatggttgtttgaagtgggaggattgttcaagtcttcgaaaatgtatactcgttcactttgtcagtgttaattaaggaagcaaattcaacattccataagaaagcaagctgttgcggggatcaatgaagtagctatattttgaggataagatgatataatgaattgcctattttttatgttgaaaacagatttttatgttgaaccataaataaagaacataatcattgactaattgtttctgtcattataatatacccatataggtatattataaattgaaagggtgaatcttcatgaacgatattacagtttatacaacgagtacatgtccatattgcacgatgcttaaaaattatttaaacagtgtgggtcttccttatagagaggttaatgttcaattagaccaaaacgctgcagcaaaacttgtgcaagctactggacagcttggtgtgcctcaaacaaacattaatggacactgggtactaggatttgatccagactctattaaattatatgtagagtaggggaaagatctagctttctttttatatagtcatcaatctttagaggaaagtatgtgacacttagtcatcatttaatcataaagaataccccagcttgagttagcggctcatgatggggtatatttctcttaataagcccatccttttgaaggaatcgactattatattgaccgtgcgatgcgaaaccattaacgtttttcgatatttatttgggataatttggtatgtatcttacttttagagttacaagcgacgcgttaggatggacaataggaactgtttgagttaattcacgaatctgcttgtaccatcaatgcatttttggatcgtggaatcacagttgattttaacatctgacatatttccgtttgaaacctagttttcctctttcaacctctttttgaatactttcagaggcggaaatcgtttttttcttgcctgtatggtttatctcaacagggcctatagcattcgctgtttccactgctttttcatgtagcggcacatatgaaatgcccactgtgtaaacaaaattgttcatagctgattttgttctgttaggagaatgatgaatcgtcttttttacttgatcaagcatattggcaatttttgtggtactaaattcactatctgctcgatttcctaatagccagcaataacagctccaacccgctgacattttgagttcttcaccacttgcgatccattgatcagcaacctcttgtgcaatgtctgtttcagccaaagtgacagcaaccacaaaatcggacagcatataaaaataagcgccatctatccaacgttcaaaatcttccatagtcatcaccgatggatctgcaatcatcccagcaaaatacatagcatcatagttgcctgtggcatataattgctctgctaatggttgatttttcttgatttttttgaacaatggcttcatagcaccagtagccaccccaaacaatggttcatgtgcgccattacgtatatatgtttttttcgctcgttcttttccaagttgttcaaactcctgcatcaccatttccacatccatcattttcacatccaatttttctaatatatagttcattgtaacaatttcatttaaaaaggcctactgatttataaatgaatcaatttcataatgcaaaatccagatgaaaaacacgaacatttctaatcaacatgaacgttaatattcagaagtttttgttccactccagacggcgctttccacgggcttggcttcaatctcctcgtcactacgttactgcggggctttcagnnnnnnnnnnctgcggggctttcagctcaagcttttcccgtaggactttgaataaacttcttgaactcacatcgcacgaaggaaatgcgcatgcattttcgaggagtcgccgtcttccactccacaattatcaaaattagttattattaaatgttcgtattttttaagaagaaaatgatttatgaaattgattcaaatagaattcatataaaattgaatcatcaaaaacgaatgcttcaatctaatgataattgtctttaaatataaaatcccactaaaaactagatcatttgtttttagtgggattttaagtctcaataaatatgtacacaaaaaagaatgagtgtttgctataatattaaagatagttggtactcaaggatggttggcccactcctcttctgaaaggggtgagaccatgtcagcattcgaggcattaatgtttgccattgcatttgcaacgtttactcattgcaattctgtcatttaaccataaaaataacccatccttgagtaaacggctctgatgggttatcacactctaaacagccaatccctttgaaggaaccaactatcatgttgaccgttcgatatagcatcatcaacggtctttttttatgtatgcgattgatatctttagtatacgtgtagtttggccttttttcaagtttggatggaagaggaaattaaaaaatgctaaaggacgacgactaatatttataaagcgcgctcgacttcatatttttgaacataaaacatttactattgataacgcatgtaatttttaaactgttgtatttctactaatggctcggaagatttcaatgtgatgtttagtttttgggctaaaggttctaaataatggctgatcttcggagtaacaaatagcgtttgaggtctggcactcaattgtttaagtgcatcgacgaattctccttgtctatcgctgcatttatttgcggaggcaatatttgttgatagcaaaccatgcccgtacttcgattaattgtgacacaaaatacagggaaaaatgggcgattataagttgggtcttctatggcttgaggtagatagaatagttcaaattctagtttaagattgctatgctttttttcttgatttggacaatttcaaaatcggataatgcaggatagatctgcacatcctcttccaatggatcttttatttgaaacacactttcaatccattctccatgactatctatatggcgagtgacacacaagcttgaattctcaaaaaagggcaattgccagccatttttacattgctcaacaagctgaatcatttgttgaagcaccaaaataagcgtttttgtatcttccacatcaggatgccatggaacaaaaccaggtttatagctacggaattgaatccaattgtgttcgcctctaaaagaaagctcctgttctttaattagttcatagtcagatttctcaagttcatctcgatcgacataataaacacacaaactatctaattgatagaagaagtcatctgttgtttgatcactcatgatatcattgatgtttttccaacctttagcacctatataaatggctaaaccgtcttccataccggcaccacctaagacagagcaaaaatatatttctttcgtgaaagggtcctgaatagcaataatctgattgtcatcaaaatattgtcatggcttcaactttttcaaatgatcggctacttgaaataatgtttgccaatcgggagtttcttcaagtgtatctttcatgacttcatcaaagcgatcacttgataaaagttcgccaagttgaatgccttcattgatttcttcaagatcgacaggctgttcggtatctgtttgagatattcgaccttttgcatcgatacagagaggataagaaatagttgaatcaggctccaatattttttgcacttcaatttttaattcatactcttcaacggctaccgaatagattgcttcatcttttcccttttgaaaccattcatatagaaatgtttcttcatcatctaaaatttcctcttttgaaataagaaaatcattttcatagtcaacgcctataaagatatagtcttgtttttcgccatttgatgtaatcatattgaatatgtaagattctgagtgcataatatcaaagcttgactcaataactgttcctaaatcatcaaaggtaaagtcatcaggtataagtactgtacgataaattgctgtgggggtattaagagcttggatgtgtaattgtaaaatcattcataatcctccgtttattattgtatctaggttcatattttgggacccatattttatacttaaccatttcgtttagaaaaatgcaataatatcactgttcaagaatcttctcttataaattaccataaagaatttaaggataatagaatgcttctttaaaaaccagtcgctcattatggaaaataggttgaaaaacttgtaagagagccgctatatattgggtaaatcgcaacgtgaataagagaaagcagggaatttcttattcatgttgcgatcaataatctgtcaacttacataaatggcagaattaaaaagtgacattgaaacattttttcgtctatcattcttctacgagataatggtaaatatcatattgcacgggttgttcaagaaccatattcatcgtgacgacagagatttctttgttatttttatcgtacatcgtctcttgctttggcgaattttccatcacatttgcctcgccaagataataaaaatcaaatccttccccatcatctttttttgtgaacatatgaatggttgtgtgggtatcttttgcagctaaaatggcttttacttcttttgactcaagcgttaatttactgcgagtgtaccaatggaacacatctggagcgattagttcatctccatagtcgacacttgcatccacttcctcttttttatggtaagtgacaaaaatcggcactgtttgatgcttaatccgatagccataaatggtggaagaatcatcatgctgccaatttagcaaacgacatacatcacgacgagaatattttttatacaatgtcaaaggacgtgtctggtcatactgtgcatttttgcatttcgcacaaatgacaatatcctctacaaaagatctaaaattataattgctcaaacttaattgaatctcagcattaaattggtaactgttttgtccgaataggatgatgggttttaatccatatttttttcgatcattggtactatgaaaagctaaagaaaaaatcctttccaccgattgaagtgtcttgtcatcgacataagtacctaaatcttgtaatcgttgaatatagacttctttggaaatcgattgttgttgtaataaggcttcgattaatacaatttcgtgaattcttttgccgtttaagaactcatgagaaaccattgttaagacttgttgttcatatgccgataaagcgggaatctcttccttcatttttaatagaaacttatagtagttgcctgcatagtcgcttataacttccggatccaatgaatgattttgcataaaatcattcattgatgggattttgccaagccgatttttcaattctgtatacgcatcacgtaatatttttaacgtagataagttcgtatgattaatagattcaaaaattcgtttttttgcaatttcttcaaagtggatggtcgaaataccctggagataattggtattgaccatttttcttcgtacattatctttattcatcgactggtcaccagaaagggcaatcgggattaaatagttatttttgtaattaccgataaaatcaatgatcgtcacatattcttttgaagcatgtttacgtaatccacgtcctaattgttggatgaaaataatactcgactgtgtctgacgcagcatgacgatttgattgataaatggaatatcaatgccttcattgaaaatatcaaccgttaaaatatattgaagatcaccagtttctaatcttttgatcgcttcctcacgctcatcttgagaatggtcaccagtgagagcacatgttttgaagccttttttatttagtgctgatgaaagcttgtaggcttcttccttagaactacaaaacattaatccgtggactttttcgccagaaaacccgtaataggtaatcctgtcgatgatatgttcaacccgttcgtcagaaataagtttttgaagtgcggttatttcgtcgattaatacaccattttgttcataatcaattactccgaagtaatgaaaagggcagagcatctcttcttccagtgcagcctgtaaacgaatttcataggcgacattataatcgaatcgttcaaaaatattatagttatcggttctttcaggtgttgcggtcattcctagtaaaaattgaggttgaaaataattgaaaatcttttcatatgatttagcacctgcacggtggacttcatcaattaatatgtagtcaaattccttaggatcaaattgctgtaagtattgttcagaagaaagtgtctgaatggtcgcaaatagatatcgcgcatgaatatcttttgaatgacccgataaaatcccataatcctcttcgttgccaccaagtatttttcggtaatctgccatcgccttctttaaaatttgttcgcgatgcacgataaatagcattttctttggctgaaaatttcgtacatcgaacgcggatagaaacgttttccctgttcctgtagcagaaataatcaaccctttcttggcaccagttgctcgtaaagcctttaattgttgcaatgcttctatttgcattttatttggtttaattgaaaggctgtcggcaagtggattggcaagatattcagtgtttacctcaataatttttgtagcattattttggataaaaggtgtgacaacatagttttcttgataatcaagaatccactgttcgtttaaaatagtgccttctttccaagcttcttcaaactgatttgtaaaatgctgaattacttcaccgttttcaagggaggttaaaaaaagattccattcataatttgccttaagagcatggtctgttaagtttgagctgccgacgatcaaagaataataatcatcgtgctcaaaaatatatcctttcgaatgaaaacctttaacacctgttaaacgaacctctacattttcaagctttaatagttctttaaacatcttaggctgattgaaatttaaaaaggtagaagttaaaatgcgtcctttaacacctttcttacgcaagtcataaagcattgtttttaaggtggctaatcccccctctgtgataaaagccacagagaaggtaaaggttttacacgtttttaactcctgcaacaatgtggaaagaacattttcttgtgcacgattggttaataattttggcttgaattgagcagagacatgcttgcgctgatcaataaagcctttatgtaaggaatcctcgattttttgcactaatggttccaaaagattcaccttatttctttgttatttttagggcgattttttgtacggcaggaatatcagcgggggcaaattggtaatggatcaaatcttgtggttgaatccattttgcgtctgcgtgttcactaatctttggtgttccatggctaattttagccatataggtttccaatcgaacgataatcttctcgtattcataggtagtatcttctaccttttcctcgacttcaatgtcacagctaaattcctcacgaatctcccggataagtgcctggtgaggtgtttctccagtttcaatttttccacctggaaattcccaatgatttgcaatagacatcaccggacttctcaatgcacaaaaaatttctccattttcattttcaataacagccccaacaacatggacggtttttttcattattatccgcttccttttctatttaaaacaacactcaatgttatattgggatcaattaaccgttgatctctactattatgccattttatctgattaatgggaaatcgtcattagaaaggaagttatttggtaaaattcagagtagagtcaaatattacttgtaaaaatacattttcctggaattttgaatttatattggaaaaatgctgcttgtgtactattataaaaatagtaaaaatttttaaatacagtttttttatagagcaggaatttccttattttttaaccaatagttttttaactgataataacgtaagtagcttgaaataagaatttttacttgtatgtgaatgatcttgtataaaatacttaaacaattaaagaaaattaatgacggactaattagttgattaaacataactatttaaagaggaaggtgtcaggtttggagaaatcattacgtgaaaaagcaaagaatttttttaaatatttattggagttgtcaactttaaatggaaaaaccattcgttcgatgaaagaatatgtgaaaacatgggattgctgggagcttgaaaaaatagagggctgttatattggggaacaatgtagcaacgagttcaatttacttgaaatacataaaccaaataaagaaagtccattattgaaagtacctacactgagtaataagttacaaaagtgggttaattttaattataccgatgaaacaagtacaccaacccatcatgaaagaatcactttaaatgacgaaaatatccattttcaagatcatccagatattgtgcactcatttgccttttaatggaagatgaagaagaatcggttgagtatgataaaataccgtttatgattgatatcacgttttctaataagtatggtttttaaagaaaatatgtatccatagatgtgtgaactacttgtattattaaagcactaaaacaaaaaagtgactatttattgtgattttcattcaatatacagttatttataactctaattcctccataatttttcatttttgtattgacagtgtcatattttatctttataataagtttatgacctaggggaaaggtcataaactcatatcatattagatcaagatttatagggtttttatggtaaggctttaagccgtggcgttggggatcgccttgctctgttgatacagagtttccccaaaatgactaaagcaatttagtcattttttttataggtatttttggaaatggacagaaaagatagaagattttgaagtgctgaatggcttaactcttgaatcgctacaataatttataaaatagggtgataactatgaagtataacattggacttgatataggtatttcttcagttggctgggctgttgtaaatacagaagtggaacgtattgaaaaaatgggagttcgtatgtttgatgcagctgaaaatcctaaaaatggttcatctctagcaacaccgagacgtgaagcacgttctgcacgtagaagattacgcagaagacgatatcgtgtgtcacgagtgcgagacttaatattgaagaggggtttactaacgcaagtagagatggatcaattgtatgagtggcagccggaggatttagatatttggttagttcgtgttaatggtattgaaaggaaattaacggatcgtgagttcgccagagtacttatccacttagcaaaaaatcgcgggtataaatccaatcgaaaaagcgaagaaacagagaggaatgaaacaggtgcggttttaagtgctgtcaaagaaaatacagctttaatgcaagaaaaaggttatccaacagtagcggcgatgctcctatatgaagaagaaaagtttaaaggacataagcgaaacaaaggtggagagtacacgcatgtcatatcacgtatagaattggaaaaagaaattcaaatgatttttgcatgtcaaagagaatttggacatacttttgcaacaatagaaaatgaagagatttatttaaaaatttggaattcacagcgacctttttcttcgaaagatgatgtcatgaaaaaaataggaaactgcacattcgaaccaaatgagaagcgtgctccaaaattcagctacacttttgaaaagtttcgcgcgttagatagactaaatcgactacgtattttatctacctctaaccctcaaagaaagttgacagatgaagaaagaaaaacagcgcttgaatcattattaagcaaaaaagaaatcaagtataaagatttgcgaaagttattaaaattaacagaaacagaaagatttaatgaattgttttacgatccatccctttcaattgaaaaaaatgaaaatgctaaatttttatcattagaggggcaatggaaaattcataagattattgaaaaagttgaaggtaaagtgttggctcattcttatcgccccattgatattgatacgttcgcatatgcattaacagtgtttaaagatgatcaagatattcgagactatcttttgaatatatatgtaaatgaaaaaggcagaaaagaaagaaatctcgctaatcgttcgtatgatgaaaaattaatagatgccttattatctttatcattcacaaaatttggacatctatctttgaaagcgctcaataatattcttccgtaccttgaagagggatatatgtatcatgaggcgtgtgaaaaagctggatatgaattttccaaaaaaatcaataggcaaaaacaatttttgcttccagttatccctagtaaagaaattgccaatcctgtagtaatccgttccttatctcaaacaagaaaaattattaatggaattatcaaaagatacggttctccatctggcatatatatcgaattggcaagggaaatgggaagaccctataatgaacggcgtgaaattgaaaagatgtacaataaaaaccgtacggtcaatgatcatgctagagagcatattcgtgaattgtatccagaaataagtgatcctcgtggtcatgatattttaaaatataaattatggcaggaacaaaatggagtttgtgcatattctcttcaatcaatccctattgaacgtttatttgatgcaggatatgcagaagtagaccatatcattccatatagtcgtagttttgatgatagtaatggcaataagattttggtcttgaagactgaaaaccagaacaaacaaaatagaacaccgtttgaatggtttggtcatgatgaaaaaagatggcaagcattcacctcttttgtcactactttaaaagtagcaaaaaagaaaaaagatttactattaaaggagaattttgatgatgaacaggcagaaaactttaaatcaagacatctaaatgatactcgttatattactagattcttaaagaattttatcgaggaaaatttacaatttcgagaagaagagggaagaaaacaatatgtatattctgtaaatggagcatacacttctttaatgagaaagcggtggggattcaataaaaatcgtcaagaaaatgaccttcatcatgctttagatgcggttattgtagctgttagtcatccatttagacatcaagtgagtacatattttaagcgaagagaaattagtgttgctaaacttttagatcgcaaaggagaacgttttcctgaaccatgggatgggtttgtaaaagaagttgaagtccggatgattcaagataaagaactaatgaaaagagcattactaagccttgaactatcaagttatgatggcccattctttgaagaagttcaacccatatttgtatcaagaatgcctaaacgatcagtaaagggacaaattcacgaagaaacactaagacgtaacagaggtataaatgacaaagaatatatcaggattgtcacaaaaaccaaactagaaaatatcacatttgacaaaaatggtgattttaaaatgttcaataaagaatctgatatgaaaacgtatgaagccatcaagcagcgatatttagagtatgggaaagataagaaaaaggcgtttagtataccattatataagccagcaaaagatgcaagcagagcttcaataattagatccgttaaaatcgaagatacaacaaatcgtgtagtgtcacttgatgacaaaacagttgctgcgaatgcaagcattgtgaggacagaagtattcagacacaaggaaacagggagattttatttagcacctgtgtatgtagcggatgtcatgaaaggactagtgcctaagaaatttatcactccaaataaatcatacaacaattgggttgaaatcagtgatgaatttgaatttttgtttaatctgtatcctaatgatgtgatcagggtgaaattgccaacggaaaaggaaactaaaaataatttaggagatattatttcatggcaagaaggtttattttattataaaggtgtagatattcatacggcttctattgcgataattgatcatatgaatagtcttaaagatcgaattggtactcagagactagctatttttgaaaagtatcaagtggatccattgggtaatctaataaaagttcatggagagaaacgttatggcgtacagacatatagttattcgtaaaccttcaaagctttcaaccagacatgaacaattgctcatcgctcaagaagaaacttttcaaattccgttagaagatattgcgactataacgatagaagaaccagccgttacgataaccagttcattgttgagcaaatgtattgaacatcatgtggaaattattgtgtgtgataaaaaaagaatgccaagcggtattttgcaaccttttcatcaacattcgcgacagaaagtagtattggaaacacaattggaatggtctaaaccttttaaaaaacgtatttggcaaaaaatcattatccgaaaattagaaaatcaagctagatgtttagaattagtagataaatttgaagaggctactaagatatatgcaatcagtaaaagtgttgaatctggagatcgaacgaatcgtgaagcctacggtgcaaaattatatttcaattttttatttggacaaggttttcaaagaagagatgataatgttcgaaatatctcgttgaattatggatacagtatcatgcgttctttagtagctcgttctctagtaagatatggtttttctcctagtcttggtatatatcacgatagtcaaacgaatgcatttaatcttgccgatgattttatggaaactttacagcctatgatcgatgtcactgtagtaacatacgttacagatgagtctgaatggtcatccgaaatacgcgaaaaattattcgcagtattgaatttggagactgtctggaaaaatgagcgattaagtataacgaatggcgtcgatcaaatggtaaagagttttgtggctgcatgtagacagcaagattcgtcatatttggtcttaccagaattaacgaatctaaatattcattcatatgagtaaatttatgcgactaattgtatttttcgatttaccaacgacgacgagaagagaaagaaaagcctatgcgaaatttcgaaagtttcttttaaatgatggttatacgatgatgcaatattcagtgtatacacgaatatgtaatggagaagatgcagttcagaaacatttaagaaggttgaatgaacatctcccacccgtaaatggtgcaatcagatccttaaagattactgaaaagcaatttgaaaatatggggatattattgggcagtgtaacccccgaagaaaaaatgggaacaaataagacagattttttctgaaaaagtacttgcaattcatgcaggtgcttttttcatgcttctaaaattcatttaaaaagggaaatttcagtattaaaatgtccacatcaattttctttttcaaaaaaagaaacccctgaaactggggaataccaagggtttcatagccatgtatcatatcacatcaagatttataggggaattatggctgacgcagatgcggatgagtgaattgcaagatcatatcacatcaagatttataggggaattatggctttagcgtgtcctaaccaactgtttaatatatcatatcacatcaagatttataggggaattatggcttaaatcgaaggaggtgtttaaagatgattatcatatcacatcaagatttataggggaattatggcgaaacacgcgcaattttgccaacttatattatcatatcacatcaagatttataggggaattatggccatcctcatattgaaccgattctaataaatatcatatcacatcaagatttataggggaattatggcataaaaaagagaagagtaagcaaatgagctatcatatcacatcaagatttataggggaattatggccatgaatggagtacttactttcgtatgtaaatcatatcacatcaagatttataggggaattatggcaaaaagatggggacacactttctcgtatgatcatatcacatcaagatttataggggaattatggcatgcgaaagacgataaatagcttctttcaatatcatatcacatcaagattatagtaatgttcagataatcaattatctgccgttccaagtattggttcatacatacttgtcaaatgttcaccaaggatttttcgtcttgcagtactattaaatcatatccctcactttttcaaccaaggatctattagaagaattaggtccttgtaagaataatttctgcttgtccattgtcctacaattcttattgacatgttgcaagaatagaaggctttgttttaattgatcaggaatgtttaggtatgtttaggtatctcgttgttttcttgtcttaccaatcctttcaactcatcctgcaatgctgtacgtctagggtaggtggctttaatttgttcgatgacatcttttacctctgctacatagccctctttttgcatttggcaaagtgattctcgcaaggctttgtaatcattacgattcttggcgatgtttaattggttggcgatgctttgaaaaaatagggactttacttcttctggaaattcttttcttagatattttgaatagctgtagatgcgtttaggtgactgcctacagaaagtaatcaatttttcaaaagcttgttcttcaattaatagagtaggataccatgtagggtagcttgacaaatcatcaaatgaatccattaattcatttataataggcttccattcttcggatgtgtataactcttttagttcatgatagaagtgaaaatcgccctctgcggcacgtataaaggcaatcctttgcatgtcttcttgattgcctaattgtttatgagcttcataggcatatttttcccattttgctcgaatttttatttccccaaaatgattgtcgattccatctgaggaaagtttgagtactttgtcgtacttcttattttcaaaagccatttgaatcattttttctcgaatatttggattttttgggtgactggctagaaacgcttggattttctcctcatcctctgaaataagtagtgcttcaattattaaatcatctgcttgattttggtcattttcagattcaaaagataggttttccacctttgtgcaaataatatctgagaaaatcggatcttggcaaaaaggcagtgctaattctagaagtttaagctgccaatgaggtgtaaattttaaaagatctgctgtctttaagagctttgtgaagatatcttcttgagcttctaatgtccaatttgttagacctatttgaatgattgtttctaaaaaatgatcaatttccaccaattcattatggataaacgtttcgtcatctatttggtaaagttgtgctgtttttgaatagcaaagtatagcaagttcaaaggcatgccgaaattcttttttatccatctttttttctacttgatccattatttcataaacacctgatagaacgatatcttcttctccaacagcaacatatttatatcttaaagcgtgtctcatcggttttaaaatggttttttcagctatttctaaagtttgttgatgtgtagctgtagcagtattgttcataaatgtctttattattttttgttggaaatgtgaatctgtacttgctaatttgagtaaaaaatcaatcagcgattcttttgtctgtttcattaaaatagtttttaatggggaagcattgtacaactctttggctgttcttttttgtaatgcataaaaaacagccacttcatgtttgcagtaaggaccatcataaggacaactgcagcttgaagtcaagatttcattgtcgcttgctaatcgcactttgactgtataatcatgcgttccctcaacctctgcaagccagttgccatttggtaattgtacaagttcagtgatatgaccgttgttataataatttttcccacgttttaaaatggtgttcgaaatattgtcttgaaaatgagctaagttcatctatctatttcctttcgtttcagttctgtttttcatctaaatgtcttaagcattgttatcactaggaaactagatgtctctttctatggaaaaataaaaattctatactatttataaaacactagtgagtttatgatgacaagtaatccctttggcctgattcataagtctaaattttaatgattgaatagatttccgcgtatctacagttttaaatagaacaaatgtttgttataatattttccagatagttagtactcaagggtggttggcacactcccgatttgaaagggggtgatgcgatgtcgatatttgaggcattgatgtttgcacttgcatttgcgacattagtgatttcaattttgtcatttaatcataaaaaataacccatccttgagttaacggctcagatgggttatcatcccgtatagctaatcccttttaggaactgactatcacattgaccgttcgatggactaacatcgaacggtctttttagcatatgtttcttttatttctagtatacgttgaggctgttattttttcaagaagtgatgattgatttaaggtagagaaggaatcagaaaaggaatgaacagaaaaggaaatttttctttcgcctattaacaaggatagtttttatgattaggctataacgatgagcgatttgaaaaagcaataaagattatagtgggacttggatgttcaccacttttatcattgccaattaacagtgattacagattactaaatattggattgcggctaaaagattgcttaaaaaattggatggattttgtcttgttcaaatttcaatttcaaaatgtaatgataaaaaggtagattaaggaaaaatgtatgaagaaaaaataactcttctatctaactagaatgaaaatataaaaaactaaaacaattttctcgtaaatttttgaaaaacaactggcaaatagcttatgataaaagaaggattttgtcgaataagaaatactaaaaaagaaagaactcatttgacttaggcgcaattgttaatctaaacgaagatgaacttttcacaaatttgcgttgatcaatctttcaagaaggtggtgtatgccgtatgtttatggagatgctttcaacctataaaagaacatttatcccattagaagtatttgaaaaagcggtttcatccaacatgacgtatgaacaatttgcacaagaaatccagcgacttgaagatcaaggaatattggttccagtgaaaagtgctggtaataatggtcgtatgccagcgctttcttataaatataaaattcaaagaacaaaacttcatcagaaaacccataagcaaattgaaaaattgcaaatcaaatgtcatagagaactctccttggataactattacagtttgccaccatcagcatgggaagaagatctcccttatattgaaaaaattaatcaatacattatgcagcatgattggccacaggaagaagtacctgcacctgaacgtagtctcgcacttacaggagatgaaaaatggatacaagagaaaaatggtaaaagagtactggaacgtttgcaaatatgggagcgtatgaagattgttcctgtatatgatcctttaagttttgccattcatcctcaagtcttgcaaaataagcatcaattccatttagtcgtcgaaaataagacaacttatgatggattactaggtgcgttaactgatacccctttttctacgcttatctatggacaaggttataaaattatcaaaagcatggagcatttcacaagacagattcctctcccaaatgtagaacataccatttattacttcggagatcttgactgggaagggattcaaatatggcatttactgatgaataaaattcaggttataccagccattcccttttatcaggcaagtctacaaaaacaagcaatgccgatcaagacaaaacaaaagataaatgaggaagcgttacaagattttttgcagtatttttcagaaaaagatcaacagcaaatcgatactattttacataaccatctttacttagcgcaggaggtgttatcttctgctcaattaaaacaaatttggagtgaaaacacatggagtcatccttctccgaaatcattcaaaaagacttcaaagagcgaatgaagcggatccttttatttgaaccaatccaagaactttcccaaaaaagaaaatccgatcaaaatggtcatcctgtcgatatgaggagtttggggttatttacattactttatttttatgagatgaagttgatccgagaacggaaaacaggcatcgctgaaattatagaattattgcagtctatcacggttcaatcatatgtcttgagtgataaacagtgggaatcgattgttcgagaaattatcaatgtttttcgtcctgccaatgggaggataaaggcctatacattttttaactgggaaagtagaaaggaagattcgctggaattttcttatataaaagcgacggattttgatgtacaaaccaatcgacaatactacacattagatgatgatggattggagcttgtttttgcgacgaaagagtatttccaagagtttcaattatccattcatcagttaatgctgcgaaaattattagaaaagggtgaattccagggagcattacgacaaattaatgaaatgcggattgatgttgaaacgatttatgaacgacttgttaaattagaacatgaagtcaagcgaaatatcgtctcgattgaaacgcaaaatcgctttatccaagcgattgatgatcgaaattttcgacttaatcgtgaaaatgaagagtttcaagaattaaagcagtttgtcaatgagatgaaagccaattattattatcaaccagctcaaaacaaagaaaaagaagcatttgaattactgactcaaattgagaaagaattatcactggttcatggacaacatcgagcattattaaatcaaagtttgattctaaaaagagaagttttacaagcggcagaagaatcactttactatgtagggattgatacatttaattttgaccaagatattacgtcgcgaattgttagtacaccgctcccgctcgaatcgatgaaagggatactaatgcctttcttatcactgaaaaagaaaaaatcatggtcgcttttatcgatctttgcaccgcattcttggtcagaagaagagcaaacaacgaacaaaaatatttttgccaaagtagcagatgaacaacaaaaagaaaaatacgctaaaatggttcgcgctttttatgcggaaattatgcgagaaatgcttcaaatgttggaagggaaaacagattggacacttagtcaatttatcgaaaaattaaaagaattaaagcatccatttctcgatcaacgactattttatagtttttttatactttgtcatcaaagaagcccattatatgctgaaaatgattgggatgatgaggaatctcttcatttattagatggagcattagaagaattacatggtagaaaattgattgtaaaagaattacccgacgtgttatcaggcagtgatcggtatgaaattcaaaatatgtatttacatatggaatgatggaaagaatcatcttataaataggtttttctatcataaaaaacggatcaaaacgttgaaatatcaacatttattggaggagagaatgtagtgcggtacgaagaagaacatatttttaaagccttttcactttttacgcagcttgcacaaaatggggttgtttcgggtgatttagcacgcgcttataaaattgaggaacctgttcgttcattaacagaccactttgttggagaaatggcagccgtttgtatttctgttggggaggaattgtatttgatacccgaaacaaaattatcacccttccatataagcaatgaggaattaaagaaaacgtacttatattcaaaggcaacgaatgtggatctatatttaatgtatttttgtacgattgtactacttggctctttttatgacagttatcattcagtagaaccaacattaagatttatcacaatggatcaatggctacaagaagtaaataagcgtatggctagtttaaaagaacatgatgatgaacaactaaaaagattagaaaaagaattttcgtatcgttggatagcattagtggagaaatgggatgcactagacgatgtgaaagaaacttctaccaaacaaacagggaatacaataagcaggcttagttttattgatacgactagacgttttctagaaaaagaagatatcatcacatctattggaaatggcgaactggagttaacggaaaaaacaaaagtgattattggtcgctattttatggatcaggattttaaccgaggaattcttgaattcctatattcttttgaagtaaaagaagatatgccaggagaaggagagggattgcatgccaacaatcagtaaaattcgtttgacaaatgttatttatgagcaagggcaaaaacgctatcatgatgagctttttatatttgatggttttaacggagcgattttacttgaaaatggtggaggaaaaacggtatttatccaaacggttctacaagcagtgatcccgcatacgaatttagctgaaagaaagattaaagatacgctttatttagaggatgggcccgctcatatcgctattgaatggattataaacgataaaccacgccgttatgttgtgacagctgtttcgctttacaaaagaaataataatctagaatcacttcgttacgtatatgaatacggactcaatgatcctcacaatattgagtctattccatttacagaggaaacatctgaagggacaacggtagcaagcagaaaagaaatggcagactactattcttatatggcaagtcaatatccaataaaagcaaaaacgtttccgaaatccatcagaagttttcaacaatatattgaagatcattattttatcgtccgtaatgaatgggaaagtattgtcaatattaacgcatcggaaggaagtatcgaagaatttttcgaggaatgtaagaaaacgaatgaattaatcgatcgcttactaattccatctgtagaactaggaattgcaggatttacgaagcatgaatttgcagatatatttgaaaaccaacgagcacaattaaaacaatataaaaaattacgtgaaaaaattgaagaaaatagattacttcaaaaagagttagaaaaatatgtggcacaatttaaaaaactagatgataaggaacagcagtacaatgcctcaagaagtatcgcaaaaggctatcatacattgcttgttgaaaccatcgaaagtattcaacaggctttatctcaaaatgaggaacagcttaaactctatcacaacaaattaaagcaattccatcaaaaacgtcattctgttgaaattctggaacaacaaaacaagctggatgtgttaaaaaaggaagaacaagaattacatgaacagctagaaaatcttgaacatcgcttacaatcgtggaaacacgaatattattccattcaatatgctgagaaacgcgaaaaatacaacctagaagctagtaatttagatttttatcgcgaacaattagccaagttagagcaagatgaaaatattgaagaaatcaataaccaattagagcaagtcaaagggcaacttcactatcaatttttgaacgataaagaatcacttgaacatcaattacgggatcaacagctcaaaaagagacaattagaagacgagcagcaagcattaaagaaaacagctaaagaacaacaagcgcttatacaacaaacgaatgtagaaaaagcaaaaacggaagcaaagaaaaatgatgctgaagaaatgatgagaaaactaaaaaaacaacttgtttccaatgaaaatgagaatattcatctattactttctagctggattgatgaagtgacgactttagataatgaaaatgtggaactaatacaacagatcaaaaaatcaactcaaacaatagagcaggagaagatggaagcggagcaacttcaaaatagagaaaatgatgtgaaagtttccatggcaaaagtggagcaaacgattcatcagtacgaacaagcacatcaatctttacgatctagcctagtacaaaaat

SEQ ID NO: 2069 - DNA, 23255 bp, synthetic construct
  variation 14577..17567: note = n is a, c, g, or t
  misc_feature 1..23255: note = Synthetic
  source 1..23255: mol_type = other DNA
aaacggcggacatctatgtttatggagagcctttagccattaaggagaaaaatccggtcgaccgaatcaacgaagcattccattcattgatccggaatctttatcacaaaatcgattacgttaccaagtttactgaaaacaaagaagaactgcttcagttactgaagcacccggaagaacaaatgactgcattcgatgaggatgtccccaatcatttggcccttcaggaagtcgatgcctatatttcccggatggctgcccgtcatgaagatgtgaccgtgaaaagtgtcatccgttattttgccggaaaaccgttcggctggatggatctggataccgaagcacttctgattcgcctttttctgggtcagtcgattaaactgctgctggaccgtgtctacctgcagccaaacgatcgtcaattagctgatgcctttacccgacgcgatctgatcgatcgagtgattgttgcgaagcgggagaagatttctcctgtcctgctgaaagcagtgaaagacctctgccagatgctgttcgatcgatctgctgtgccgaccgatgaggatggtctgatgcaggcgttcaaacacttgcttaatcaggaattacagcatcttaatgccatgctcaacgtctaccgggaccataccgaatatccgggcaaagatgtggtgatttccggacagcaagcgatgcagagtctggcagctcttggtgatgccgggacgttctataagcaggcatataaactgaggaatacgtttgaagattatgcagaccggatcaaagatgtcaaaggcttctttggcaaccagcgtgacaaatttgattctgcctatcgactgatgaaagtttatgaaaaaaatagaacgtatatcacagaatctgatttgatcgagactgaaaaagaaatcgaacacattattgaaaatacaacgccctatggacagattcagaagttgccggtcctttgtgatgcgttccgcgactcctttatgaaccaaatcgaaaaagaaagtaaaccggtcgaaaaaaatatcgatcatgactaccaggatgtactggccgaattggaaaaagatccgatctcaaaagaaaagtttgcgacgacatttcgtcaagagtttcttgatttaaaagaccggttactgaaagcagacagcatcattgaagtgattgccggacgagaggagagcgaccggcttaaactgcgctgcatggatcaaattgaagatgaacgggagcaaagagtgacggtgcccgttggacctgatccggataatacaggaaaaccaccggtcgtgaaagaacggcaaaaaaagacgaaaacgatcagtaaacatgtaatcatgcgcggtacacaaacaatttcgtctgaagctgacttagatcaatttattaatgaactgagaaagaaactggaagcagaacttgatgagaacacgatcatcaagcttgtgtgattgaggaggacaagcatgatgacagaacagaccaaaaatgatcctattgataaaaaggctattaagagctttgccgttgcagcacgcagaaaactgatcgaaggtgtggaacagaaagcctatgcgtttggcattaccaagcaacaaattcagaatgcagattctgtgaagattaatggctttccgatggatgagacgcagcagaagcagcggaaacatctcgttgaaaaaataaaacattctggattcaatgaggttattgaagaagttgcttatacgtggttcaaccgttttatcgccttgcgattcatggaagtgaatgattatctgcccagtggtatccggattctctcatcgattgatgggaaacgtgatccggatattctgagcaatatcgaactcgtcgctgatgaactgcaacttgataggaacaaagtttatgatcttcaggatcggaacgcattggatcaattattcaaatatatcctgattcatcagtgcaacgagttgagccagatgatgccgagcatattcgaaccgattgacgatgcaaccgagttgctccttcctgatcatctgctaagggaaggatctgtcatccggaaattggttgatgagatcaaagaagaaaattggaaacatcaaattgagatcatcggctggctgtatcagtattatatttcagaggagaaagatcaggtctttgcccgactgaagaagaatatcaaaattggtaaagaggatattccggctgccacacaattgtttacacccaaatggattgtgcaatatatggtagaaaactcactaggcagactgtggctggaatcacaccctgatcaggaaatgcgtcagcagtggccttattacctggatgaagcacaacaggaagctgaagtgcagaaaaaaattgatgcacagaaaaatcatcaactcagtccggaatcaatcaaatttctggatccgtgcatggggtccggacatattctggttgatgcgtttgatgttttcttttcgatttatcaaaaagcaggttattcggttcgggacatccccagactcattcttgagaagaatctttatggtctagaaattgatgaacgtgccaagcagcttgcttatttctcattaatgatgaaagcgcggcactatgatcgacagctatttcaaaagccggttcatgtgcatgtgtatgccattcaggaaagcaattcaatcactcaagatgaaatcgatcttgttgcaggagacaattcagatcgaaatcaggttgtcgcactagttaacctgttcaaagatgccagattatacggatcaatccttaaggtccctggtgaaattgatctcgacctgctgcgatcgagattgaaagctttacgtgaggataaaagtcataatctgtttatagaggaatttcaacagcgaaaccttaaattgtttgaaaatatgctagagcaggctacgatgctttccatgaaatatgatgtggttgtgacaaatccaccgtatatggggcggaaggggatgaatgataaactttcgatttacataaaaaaacattatcccgatgaaagtgcagatttatttgctgtcatgatggaaagatgcagatgcttttcagagaaaaaaggatttatcagtatgattactcagcaatcctggatgtttctctcatcatttgaaaaaatgcgcatccacctattaaatcaagaacaaatttattccatggttcatcttggtgcaagagcatttgcggaaatcggtggagaagttgtccaaagtacaatgtttgtatctcatcattattacattcctaactaccaaggcactttcattcgtttagttgatttcaaaagtgctaatgaaaagcgcaaacaatttaataataacaggttttattatacaagatctcaatccgctttttcagacatccccggttctccgattgcctattgggcaagtgatcaagttagaaaaatttttcgagagaatccaaaattaggagacgtagcagaacctaggcaaggaatggcaactgcggataataatcgctttttgcgattatggcatgaagttaattttaatagaattggatttaactataagagccgggaagaagcacttcgatcaaagcaaaaatggttcccatataataaaggcggagcctttcggaaatggtatgggaatatggaatatgttgtgaattggaaaaatgatggagaagagataaaaaattttgtcattaagcggtatccatatttgaatggaaattatgaatatgttgtgaaaaacatgaagtattattttcgtgaaggaatcacatggactgcgatttcacgtaaacatttttcagttcgatatgtagataagggttctatttttagtaatgcgggtatgatgatttttacacgtaacaaagttgaattattatttttattagggctagttaattcaaaacaagccttcatgttaattagtcagctctcgtctacattaaattttgatcaaggcgtggtacgacgcataccagtcaatgagggtaatagcgatgcggttataaatctcgtcaataaaaatataaatatagctacaattgattggtactccttcgaaacgtcctgggacttcaagcagcatcccctcatagagttccgtaatggtgccgcgactattgatgaggcatacaataattgggctcgcgaagcagagcgacgctttacaacactgaaagcaaatgaagaagaattaaaccggattttcatcaatctgtatggtctgcaggatgaactgacatcggaagagtcggatgatgaggtaacggtccggcgagcggatcgcgagcgtgatgtgaagtcatttctgtcctattgtgtgggcattatgtttggacgctattcgctgggcgaagacggactgatttttgccggcgggacgtttgatcggaatcgttatcggacctataagccggataaggacaatgtgatccctattacggatgaaacttattttgaagatgatatagtcggccgttttattgatattgtcaaacggatttttggcgaacagacattggaacagaatcttgattttattgctgaatcgctgaagaaaaagtcgggggaaaccgcgcgtcagcggatccgccgctattttctgaaggagttttataaaaaccacgtgcagatctataagaagcggccgatttactggctgttcgacagcggaaaagagaatgggtttaaggcactgatctatctgcaccgttatgaaccggggctggttgcccgagtacgaaccgattatctgcatgccatggagcggaaatatgaagaagagatgcaacgtctggatctgcagatggaagctgaggcaccggaacgggacaaggtacgagcaagaaagcaaaaagagaaactgcagaaacaactggaagagtgccgacagtatgatcaggtggtggctcatgttgccagtcaacaaatcccgcttgatctggatgacggtgtgaaagtgaactatgccaaattccagaatattgacgtgccggggaagaaagtcaaggtcaatctgctggcgaagatctgagacggatggaacttggggagatttgtcatgaaactgaaagaagtacagcgtgtcctgaatgagacgtttcataaaccgcttcgctgggggcaaaaacgccacctggtgttctggtatgatccggcaggcgaattcaaagaggatatccatgatctgcagctggatcaggtacacatctgggaattaacccctgataatttctttgcgaccaagtatgaactggagaagaaggaccctgaatcttcatttctgatctatgcaccaatggcgaaaccggcaccgcaggaagactggctctatgatcagttgaaaatgggtgtggaattctccacggataaaacaacagccatcatgcgtgaactcggtgtctccgacgatggactccgtaaagtgttccatcgttatatgaaatttttcaataataagcagcgctttgcggcatttcaagcatttgggattcagaactacgatccggaaaaaatagatgttgcggtgctggctgtgctgacccataacgcgatcaataaactagatgaagtcgtagaagtgttgatgcgtgaaacggcagcgggcggaaaccggtcctgggaaatgatcggaaaattcggcgacattgatgctttttggcacctggtcgagaaagcgtacggctatacccggggagaaaaatccctgccggatttgatcacttttttcatgctgacatatctcgtctccacggcaccggatctgaacctgccggaggactggaaggcttatctggcggtgcggccgatgaatgtggtggtgctgatgagtcagttcatgaaccagccacaggatcgggcagcattccagaaattgtccgggatggtggccaaaacgattcatctggagagccatttgaaggcatgggaggtgcagaattacctcaaggccgatgcctttaaagagtttgatcagtcattgattcaatacatcattactcagctgacatccggtgtcggacagtttgacacctatcagagtatgttggatgcccgtcggacattgcactggtatccggattacgttgatgcatatgaggcagtgggacaagccatttgtctttttcagctggacgcggagcagcaacacttcatacctgagtcatctgccggtcagatgtttcaaaaatacacagatgattattaccgctttgaccaggcatatcggaaattttatatgacctacgatcgctggcagcaggatgacagcctgatcccgctgcgtcggcaggttgagcacgcgtacactagtggctatttgcgtgaactgtcagccaaatggacacagagtctgaacaggcgggcgccggatcaatgggcgatcaccggtgtgccgcaacaaacacgtttttatacggagtgtgtgcagccctatgtgacacgaggtgagcgggttttcgtgatcatttccgatgcgtttcgctatgaggcgggtcaggaactgaccgatcggctgaatcaggaaaaaaaaggtttggctgaactctcggccatgcagagcaccttgccctcctatacggcactgggtatgccggctctgctaccccatcattcgctcagctatcaagggaactcgcagaaggagcctgaaattttacttgatcagatgacaacaatcgggacatatgcccgaaatctgattttgcagaaacgagtgaaggagagcctggcgatccaggcacaggatctgcgcgacatgcggcagcaggagatgcggcagaagtttcagtcgttgaaggtcgtctatatttatcataaccggattgatgccagcggcgatcacccggcatcagaaacggaagtatttgcggctacggaacaggctatcgatgaacttattgccttagttaacaaactggtgaataacgtcagtgcatccgcggtgattgtcactgcggatcatgggtatctgtatcagcgcgatccggtcaagccaagtggaaagctgcctaaggctgacggaatggttctggcattgaaccgccgttttatgctcagtgaagagaaaacagatgcggagggaacactgcagttctcaacagaaggggaactggctaatgatccgcctctgatgattaccataccgaatggtgatgaacggtttatggttcagggcggcggtgccaattatgtgcatggcggtgcgatgcttcaggaaatcgccgtgccggtggtcgcatttcgcagccgccgcaatgacgttttacgtcaggtcaatgtgaaattgatgagcagtacacggaagatcacaaatataattacattcctcgaattttaccagacggagccaatggcggagaaggtgcatccgcgtcgcctgaacctcttcttcacggattcagacaaggaaaagatgtcgaacgaggttcacctgctggccgaccgatcttccgaaaagcctgccgatcgggtctttcgtgagaaatttgttttcaaaaatagatcttacgaccggcacgcaacctactatctggttctggaagatgaggatcagacggtcgagaaaatctatgaacggattccgtttacgatcgatattgcatttgctgatgacttcggattttgaggcgggggatgaaccggatggatgatctggatcagaaattatatgaagcatttccaggaaaagtcgttcgcaaggacctgacgaagaagattaaagaaggcgctaatgtgccggtgtacgtgctggaatacctgcttggcatgtactgcgcgacagacgacgaagaaggcattgaggacggtgtgaggcaagtgaaaaagatccttgccgagaactatgtccggcctgatgaggcggagaaagtaaagtcgcggatccgcgagctggggcattataccgtgatcgatcgaattactgcccggcttgatgagcggaatgacctttataaggcagagttctcgaatctggggctctccgatgtcgtgatttcctctaaatatgtcaaggacttcgacaaattgctgaccggcgggatctggtgcattatccagatggcttatttcttcgatgaaaatgataaagcatcaagcccgtttacgattgaaaaactgaccccgattcagatgccgagtatggacttgaaggaactttttgctgcccggaaacggtttcataaagatgaatggatcgacattttgattcgttcgatcgggatggagccgacacaatttgaaccggccgtcaagtggcaccttcttgagcggctggtaccgctggtcgaaaacaattacaatctttgtgaactgggccctcggggtacaggcaaatcccatgtctataaagaaatttcgccgaattccattcttgtttccggcgggcagacgactgttgccaatctgttttttaatatggcgacgcatcagatcggccttgtcggcatgtgggatacggtcgcttttgatgaagtggccggcatcaaattcaaggatcaggacggcattcagattatgaaagattatatggcttccggttcattcgcccgtggccgtgaggagaaaacggctgcggcatcgatggttttcgttggcaacattaatcagagcgtcgatgtgctgttgaagacatccaatctttttgaaccctttcctgaggtgatggctgcggattcagccttcttcgatcggatgcacttctatctgccggggtgggagattcccaaaatgaggccggaatattttacgaataattatggttttatcaccgactacctctccgggttcatgcgtgagatgcgcaaacgctcgttctccgatgccattgatcacttttatcatctcgggaacaatctgaatcagcgcgatgtcattgccgtgcgcaaaaccgtttccggtttgatcaaactcgtgtatcctgacggtgtgtttaataaagaagaaatagaagaaattcttcgctatgcactggtcggccgccggcgcgtaaaggaacagctgaagaagatcagcgggatggagttttatgatgtcaacttctcctatatcgataatgactcgatggaagaacagttcgtctcggttccggaacaaggcggaggaaagatcattcctgaagggctggggaaaccgggtcatgtttataccgtttgccgtgggaagaccgggatgattggggcctacaagattgagacagagatgacgtcaggcaacggaaagtttgagcgtgccggatttggctcagattcagccgccaaagaaagtgttgatacggcatttcatttttttaagtcgaatggcaagtcgatcagcggcaagatcagtacacagaagaaggattatctgctgcagattcaggatatccatggcgtcggtctgaatgatcagttatccttggcggcactcgttgcgttgtgttctgcagctgtcggtcggcccgttcagagtcagctcgtgatcctcggatccatatcgatcagtggaaccatccaaagagtagacgacctggctagtgtcctgcagatctgtctcgattccggcggtaagaaagtcttgctcccgatgtcggctgctgcagatctgggtacggttccaccggaaatcttcgccaagtttcagatcattttctatcaaagtgctgaagacgctgtgttcaaagcactgggcgtgtcgtaaatcggatacatactcaaatgaaagcgcaacaaaaaatgttgaaaatagccgaaaaggtattgacaagatgtcctatgaattttacattataggtaagcgatttggggaaatcgccgtatcacatgtatcgtatcagatcaagttttgcatggtttgtatggtaaagcattaagctgtggcgttagggatcgcctcccaaaagggaattccctcaattaagtgactaggccttgggtttagtcatttttttgtatcagatataactgaatgtttaaaaatatataaaattaatttcgtctggggctgatttttatgaaatatagtatcgggcttgatattggtatctcttccgtcggctggtcggtgatcaacctggacagagaacggatcgagcttatgggcgcccggctatttgatgcggcagagaatccaaagaatggatcttctctggcagcaccgcggcgtgatgcccgttcggcgaggcggcgtctcaggcggcgccgttatcgcgtcggcagagttcgccattttatcatcgaccgcggattagtgacacgtggtcaggccgatcaactctttgactggaaagacggtgaccttgatatctggctcgttcgggtcaatgctcttgaacggctgctgactgatcgcgagtttgccagagtactcattcatattgccaagaacagaggctaccggtcgaaccggaagagcgaggctaaatccggagaaaacgggcaggtgctctccgcaataaaggctaacaaggaactgatggaggagaaaggctaccagaccgtggccgaaatgctggtcaatgaaccggaaacttttgccggacgaaagcggaaccgtgggggagaatatacacatgtcattgcccgatcggaactggagcacgagattcggctcatctttaccaaacaacgcgctttcggcaaccggtttgccaccgaagagaatgaaaatacatatgtaaagatttgggcagcacagcgcccagttgcgacgaaagatgatattctgaagaaaatcggtgactgcacattcgagaaaggtgaaaagcgggcgccaaaagcttcttatgcatttcaatactttcgcgctttggataaattgaaccggttgcggattctgtcggttcgtgagccttcgcggaatcttacagatgatgagagaaatctcattgttccggcattgtttaatcatgacaagcagaaatactctgatttaagaaaaattctgcagcttcgggacgatcagaaattcaatgaactgttctacgatccgggtaaatctttgaaagaaaatgagaataaaacttttttatcacttgcggagcaatataagattcgcaaggtcattagggacgtacaaggaaaagatggtctgctccagtatcggccactggatatagatacgattgcctatgcattgacggttttcaaagatgatcaggatacaagagattatttgtcgaacacgtttgtgaatggaaatggaaaacaggttctcaatctggcaaatcgggcattcgatgccgagctgatcgatggcttgctcagcctctcatttgctaaattcggccatttgtctctaaaagcacttcataagttgattcctcatatggagcagggattgtcctattatgatgcgtgcaagaaagttggttaccacgataacgaacaggtcgggaagagcaagcaacatttactgccagtaatcccagcggatgaaatccgtaatccggttgttgtacgttcactctcacagacaagaaaggtcattaacgcaattattaaaagatacggttcgccaacctttatgtatattgaactcgcccgggagatggggcggccatataatgaacgcagggatttggagaaacaatacaataagaacagaactgtgaacgatagtgctattgagcaaattcatgaattatatcctgagattggtgcaccacgcggtcatgacattctgaaatacaaactttggcagcagcaggattgcaaatgtgcttactcattagaaaagattcctgctgagaaaatatttgaacccggttatgcggaggtggatcatatcatcccgtatagtcgaagctttgatgacagtaattccaataaggtgctggttctttcacgaatgaatcaggaaaaaaagaatcgaacaccgtatgaatggtttggtggcgatgaacatcgctggaataaattcgaatcttacgtcaatgcacttaaagtcaatcggaagaaaaagtcattactgaccaagaaaaatatggatactgaagaggaagatacctttaaatcccgtcatttgaacgacaccaggtatattactcggtttattaaaagcttcgtcgaagataatctgctgttccgagagatagaaggggccaagcagcatgtcttcactgtaaacggagcatatacttctttgatgcgcaaacgctggggattcaataaaaatcgggaagagagtgatctgcatcattcggtagatgcagtaattattgcggtaagccagccatttcgtaatgaggttagccggtatttcaaacatcgtgaaatcagtcttccgcagttgctgaaaagaacatgggactacttcccggaaccgtgggaaggctttgtgaaagaactcagagcccggaccttgcaggatccggagaaattgaaactagctttggagagcctcgatctggatagctatgatccagagtttattgatgaggtaaaaccaatcttcatttccagaatgccgaagcggtcaattaaaggacagattcatgacgagacactgcggcgaaatagaggaaagacaaaggatggttttgttaaaatagtcacccgcacgcggcttgaaaatattaagtttgataaaaatggagatttcccgatgtatggtagagaatctgatccaaaaacctatcaggcgattaagcagcggtatctagagaacaataaagataagaagaaagcctttatcgaaccgttatataaacctgctaagaatccgaataatgcatcgctaatccgttcggttaagattgaggacaaagctaatcagatcgttcctttaagagatgaagcggttgcatataatgctagtatcgtgcggacagaggtataccggaataaagaaacagggaaattttatcttgcgccagtgtatgtgtcggatgtgtttgcagggagagaaccaagaaggttcattcgagctaatgtaccctatgaacaatgggtcaatattacagataaattcacgttcctctttaacctttatccaaatgatgtaatatatataaaaatgaaaaaggtaaagactaccaaatcaaacattaataaaactatttcatggcaggaaagttacttttacttcaaaggaactgatattcatactggggcaatcacaataattgatcacatgaacagctttacagatcgtgttggaacgcaaggccttcagctctttgaaaaatatcaagttgatccgctcggaaatttatcaagggtgcatggggagacacaatatggcgtaccggcacttagtcattcgtaatccatcaaagttgtcaacgaaggatgaacagcttctgattcatcaggaagaaacgatccgcattccattagaggatatttgtacaattacgttggaagatccgtcgattacgatcactagtgctctactaagcaaatgtacggaatatcaggttgaagtgattctatgtgaccataagcgaatgcccagtgggattattcaaacctttaatcaacattctcggcaaaaagaagttctggagattcagctcaaattaccaaagccctttatcaaacgaatctggcagaagattgtcatccgaaaattggaaaatcaggcacattgtctggagctgttaaacaagggagaagaagcaaaccggcttttttcaattagtcgcagtgttgagtccggagaccgcagcaatcgtgaagcgtacggagcaagggtttattttatggctgttttcggagatagatttcagcgacgcgaagaaaacacgcggaatgtagcattaaattatggatatagcattatgcgttcactggttgcccgcgcgttagttcgttacggatttaatccttgcttcggtgtgtttcatgatagtcaaacgaatgcttttaatctggcagatgacttcatggagactctgcgcgcctttgttgatgttatcgttgcagtgaatgtgaaggagaatgacgagtgggacgcagacatccgaaagaaattatttgaagtgctgaacattgaagcagtttggaacggtgaaaaacagagtattacgaacggggtggatcagatggtgaaaagttatgcaactgcatgccggcagacagatgcttcacttttgcttctccctgaattagttaatgtgcatattcattcgtatgagtaagtttatgagaatcctggtattctttgatctgccggtaacgtcgatccgtgaacggaaagcctatagccattttcgaaaatttttactcaaggatggctataccatgcttcaattttctgtgtacacacgaatctgcaatggagaagatggggtcacaaaacatatgaaacggctgaaagaacatcttccgccggtaaatggtgcaatccgttcaatgaaaatcactgaaaaacagtttgaaaatatggacattctgcttggagaggatactccggaagaaaaattgggtgcaaataaaacggattttttttagaattgagggttgcttttttagcaatcctcttatttttttacatagatcgcattaaaagaagaatagataggcaaaaaagcaacgcttttgcgctgcttttttgaagtgagaactccctgaaatggggatgtatcnnnnnnnnnnnnnnnnnnnnnnnnnnnnnnnnnnnnnnnnnnnnnnnnnnnnnnnnnnnnnnnnnnnnnnnnnnnnnnnnnnnnnnnnnnnnnnnnnnnnnnnnnnnnnnnnnnnnnnnnnnnnnnnnnnnnnnnnnnnnnnnnnnnnnnnnnnnnnnnnnnnnnnnnnnnnnnnnnnnnnnnnnnnnnnnnnnnnnnnnnnnnnnnnnnnnnnnnnnnnnnnnnnnnnnnnnnnnnnnnnnnnnnnnnnnnnnnnnnnnnnnnnnnnnnnnnnnnnnnnnnnnnnnnnnnnnnnnnnnnnnnnnnnnnnnnnnnnnnnnnnnnnnnnnnnnnnnnnnnnnnnnnnnnnnnnnnnnnnnnnnnnnnnnnnnnnnnnnnnnnnnnnnnnnnnnnnnnnnnnnnnnnnnnnnnnnnnnnnnnnnnnnnnnnnnnnnnnnnnnnnnnnnnnnnnnnnnnnnnnnnnnnnnnnnnnnnnnnnnnnnnnnnnnnnnnnnnnnnnnnnnnnnnnnnnnnnnnnnnnnnnnnnnnnnnnnnnnnnnnnnnnnnnnnnnnnnnnnnnnnnnnnnnnnnnnnnnnnnnnnnnnnnnnnnnnnnnnnnnnnnnnnnnnnnnnnnnnnnnnnnnnnnnnnnnnnnnnnnnnnnnnnnnnnnnnnnnnnnnnnnnnnnnnnnnnnnnnnnnnnnnnnnnnnnnnnnnnnnnnnnnnnnnnnnnnnnnnnnnnnnnnnnnnnnnnnnnnnnnnnnnnnnnnnnnnnnnnnnnnnnnnnnnnnnnnnnnnnnnnnnnnnnnnnnnnnnnnnnnnnnnnnnnnnnnnnnnnnnnnnnnnnnnnnnnnnnnnnnnnnnnnnnnnnnnnnnnnnnnnnnnnnnnnnnnnnnnnnnnnnnnnnnnnnnnnnnnnnnnnnnnnnnnnnnnnnnnnnnnnnnnnnnnnnnnnnnnnnnnnnnnnnnnnnnnnnnnnnnnnnnnnnnnnnnnnnnnnnnnnnnnnnnnnnnnnnnnnnnnnnnnnnnnnnnnnnnnnnnnnnnnnnnnnnnnnnnnnnnnnnnnnnnnnnnnnnnnnnnnnnnnnnnnnnnnnnnnnnnnnnnnnnnnnnnnnnnnnnnnnnnnnnnnnnnnnnnnnnnnnnnnnnnnnnnnnnnnnnnnnnnnnnnnnnnnnnnnnnnnnnnnnnnnnnnnnnnnnnnnnnnnnnnnnnnnnnnnnnnnnnnnnnnnnnnnnnnnnnnnnnnnnnnnnnnnnnnnnnnnnnnnnnnnnnnnnnnnnnnnnnnnnnnnnnnnnnnnnnnnnnnnnnnnnnnnnnnnnnnnnnnnnnnnnnnnnnnnnnnnnnnnnnnnnnnnnnnnnnnnnnnnnnnnnnnnnnnnnnnnnnnnnnnnnnnnnnnnnnnnnnnnnnnnnnnnnnnnnnnnnnnnnnnnnnnnnnnnnnnnnnnnnnnnnnnnnnnnnnnnnnnnnnnnnnnnnnnnnnnnnnnnnnnnnnnnnnnnnnnnnnnnnnnnnnnnnnnnnnnnnnnnnnnnnnnnnnnnnnnnnnnnnnnnnnnnnnnnnnnnnnnnnnnnnnnnnnnnnnnnnnnnnnnnnnnnnnnnnnnnnnnnnnnnnnnnnnnnnnnnnnnnnnnnnnnnnnnnnnnnnnnnnnnnnnnnnnnnnnnnnnnnnnnnnnnnnnnnnnnnnnnnnnnnnnnnnnnnnnnnnnnnnnnnnnnnnnnnnnnnnnnnnnnnnnnnnnnnnnnnnnnnnnnnnnnnnnnnnnnnnnnnnnnnnnnnnnnnnnnnnnnnnnnnnnnnnnnnnnnnnnnnnnnnnnnnnnnnnnnnnnnnnnnnnnnnnnnnnnnnnnnnnnnnnnnnnnnnnnnnnnnnnnnnnnnnnnnnnnnnnnnnnnnnnnnnnnnnnnnnnnnnnnnnnnnnnnnnnnnnnnnnnnnnnnnnnnnnnnnnnnnnnnnnnnnnnnnnnnnnnnnnnnnnnnnnnnnnnnnnnnnnnnnnnnnnnnnnnnnnnnnnnnnnnnnnnnnnnnnnnnnnnnnnnnnnnnnnnnnnnnnnnnnnnnnnnnnnnnnnnnnnnnnnnnnnnnnnnnnnnnnnnnnnnnnnnnnnnnnnnnnnnnnnnnnnnnnnnnnnnnnnnnnnnnnnnnnnnnnnnnnnnnnnnnnnnnnnnnnnnnnnnnnnnnnnnnnnnnnnnnnnnnnnnnnnnnnnnnnnnnnnnnnnnnnnnnnnnnnnnnnnnnnnnnnnnnnnnnnnnnnnnnnnnnnnnnnnnnnnnnnnnnnnnnnnnnnnnnnnnnnnnnnnnnnnnnnnnnnnnnnnnnnnnnnnnnnnnnnnnnnnnnnnnnnnnnnnnnnnnnnnnnnnnnnnnnnnnnnnnnnnnnnnnnnnnnnnnnnnnnnnnnnnnnnnnnnnnnnnnnnnnnnnnnnnnnnnnnnnnnnnnnnnnnnnnnnnnnnnnnnnnnnnnnnnnnnnnnnnnnnnnnnnnnnnnnnnnnnnnnnnnnnnnnnnnnnnnnnnnnnnnnnnnnnnnnnnnnnnnnnnnnnnnnnnnnnnnnnnnnnnnnnnnnnnnnnnnnnnnnnnnnnnnnnnnnnnnnnnnnnnnnnnnnnnnnnnnnnnnnnnnnnnnnnnnnnnnnnnnnnnnnnnnnnnnnnnnnnnnnnnnnnnnnnnnnnnnnnnnnnnnnnnnnnnnnnnnnnnnnnnnnnnnnnnnnnnnnnnnnnnnnnnnnnnnnnnnnnnnnnnnnnnnnnnnnnnnnnnnnnnnnnnnnnnnnnnnnnnnnnnnnnnnnnnnnnnnnnnnnnnnnnnnnnnnnnnnnnnnnnnnnnnnnnnnnnnnnnnnnnnnnnnnnnnnnnnnnnnnnnnnnnnnnnnnnnnnnnnnnnnnnnnnnnnnnnnnnnnnnnnnnnnnnnnnnnnnnnnnnnnnnnnnnnnnnnnnnnnnnnnnnnnnnnnnnnnnnnnnnnnnnnnnnnnnnnnnnnnnnnnnnnnnnnnnnnnnnnnnnnnnnnnnnnnnnnnnnnnnnnnnnnnnnnnttcgtatcgtatcacatcaagttttataggggcagtatggctatctcacctatgagggattgaatcactcagtcagtttatcatatattttataatttttggagtcctgagaaattagacagtcttctcattaactgaggtggttggcaatgatcatttttctcagatataatttaattagttgtcttccgaattttcatattcttttctatccgaaaaaagatagtcaatctctttaaaaaacaacagaggttttcacgatggacaataatgagcaaattcaaaaattaatgatggaaaataaacgtctgggaaaagaaaatgcttatttaaagcgtttgaatgcaaaactcatgagggaaacgccggacaaaacaagtgtcactccggaaagggtgacagaacatctttctgattacgaaccaatgaccagcgagaagcaacttatctctcgatatgccacttctgtggaaaaaataagattataccggtctctttttcgtggcagggatgatacctatgcaaagcgttgggaatcaagtaaaggaacatcaggttacagtcctgcttgtaaatatgaatggcaacgacctatttgccagaaaccagcagttaagtgtcatgtaagtaagcatagaatattgctgccattgacagatgaagtgatctttgaacacttaagcggtgagaagacaattggtctctatccccttttaaaaaatgataagtgctggtttcttgctgttgattttgataagaagaattggcaggaagatgtcctggcatttttgaaaatcagtaaaaaattgaatctaccttttaatatagaacggtcgcggtcgggacaaggtgcccacttgtggctctttttttcagaaccggttccagccaagacggcaagaaaattgggcacgatgcttatttcaaagacactggaagtgcgccatgacatgggtcttgattcctatgatcgccttttacctgatcaggatacgatgcccagcggtgggtttggcaacttgattgctttgcctttacaaagacataaaaggttgcttggaaacagtgtttttgtgaatgaagactggagaccttacccggatcagtggcttttcttatcgtcaatacgaaaattaactctcgacgaacttaaaaaagccgtcgcaaataatgacgaattgaagctaacagccaccagtccatggcctaaggaaatttctgcggtgctcaagaatgggatctatattgataagcagcagctcccatctgaagttttgtcccgagtgactcgtctggggcgcttctctaaccctgacttttatcgaaaacaggcaagaaggatgtctacatccggaacaccaagagtgatcaattgtgttgatgaaacagatcaacagttgattcttcccagaggatgtctggacaaacttcaagaacttatgacgcagcatgattcaattttacatattgatgatcaaaagttttccggctcatctgtcagcgtagaatttcagggagaattaacgtcacggcagaaggacgcacttgatgaactgatcaaaaatgatacaggaattctctctgcggttccgggttttggaaaaacggtagtatctcccgcattaatagccagacgtagaattaatacgctgattgttgtccatcgcctgcaactactggaccaatgggtggaacaattatcaatttggcttggattgccaaagaaggaaatcggacagatcggcggaggtaaaaagcaggttacaggaaagattgatgtagcaatgttgcaatcgataaatggaaaaagcggcttgaaatcatttatcactcaatatggacaggtgatcgtcgacgaatgccatcatgtggctgcaattagttttgaacacgttctgcgtcagattcgggctaaatatgtgattggactaactgccacacctgttcgaagagatggatttcatccgattattgagatgcagtgcggtcccatccgttatcgggtcaatgccaggacacagtcaaaagttcagagtttcaaacatctgctaatcctaagaaaaacgagctttgtttcggagacaaaagaaattcaacctctcctgaatgagttagctactgacgagcgacgaaatgatcaaatttttaatgatgtcctgcacgtaatggaagaaaaacgtaagccaatcattattacggaacgggttgcgcatgcgcatctgcttagaaaacgctttgatccattcgttaaaaatgtttttgagctgacaggccaggggaagaaaaaagacagacaaaaggaactgaaagatttggctgcacttccagaccatgaagaatgcctggtgatcgcaactggaaaatatattggagaaggtttcgatgatcctggtctggacacacttttccttgtcatgccggtatcctcgaaaggaatccttgaacagtatgttggcaggctgcatcgtcaatacatgaataaaaaagaagttcgtgtttacgactatgttgacatcaaaattcctgtgctgaatcggatgttccagagaagaaacaaacgttacacaacaatggggtatcgtattgctgatccatcaaaatcagaaagcgagcagatggagctattttgaaagcgagtacttcgtttgacagatagatagcgctactgaacatacaaaaaaaaccgagcgttgtgattgatttgacttttttaaaaaaatttgccactgattttttcgaaggaaagatgtctgaggtgaaaaggtttccaataaaagagtcagccatgtcttgatgacgtagctgatgataatttaaatggacatcttgttttaggatcaacctgtcagcagacgtccggctattccttttgatagtaaataatatccggttttgttcatgtgaaggccgtcagtatcaaacatgaacagccaaaaggaggagttcattgagaatttttcgggcgccttagcagaagcagacttttcatcgtaaaatggttcgctttgatcacaaaggaagataggaacattagctaatgaagggcaagccctacattacattgattctctacgcatatcatctgcttaacttcatcaccatatattgattcaaactgactccttcacgttctgcttctgctgcgagacgctgatgcaaggactttggcaatctgagatttaatcttcctgaatattcattaggacttttcggttcaggaatatgatcaccatattctaatttagctgcgatatatccttccatagcttcgtgaacattatttaaagcttcaggaaccgtttttccatcactttggcatccgtcaagttcaagaacttgcgcataataatattctccggattcatctttgattttttgaaccatttctgtgtatggaagattcaaatagtaattaagatcctttttcattttttcctccgtcaggtaagacatagtgttaatttcaggcattatatgcctattctcctcaggacatcttttacataaaccgtcttaacaggatccccgttccagccatctgatttcatcctttattagaatagtaccatatgaagtaccaaaatacaacgcataattaacctaaaaaattaatactgttcgcattctataaatggtcatgtgacgaaacgagtcctttcgcgctggttgtcgaacttgaacctggatgtattgaaacgagcgatgcctacgacaatgggttaccgaatttccgacctggatgacatgcgagtaagcgctgaaatgagcaggctatattctagaaaagtgtgtgttgccgttttctccggctataaaaaaaaagccgcgtttcgaggacacggctgagattatgtctattcttaatctgtcatagaattgattaccgatagtttttatgtaaatcgccccggcagaggctcaacttccgggacgatcttgtcacaaattcttatccatcgtaaatgtcagcttcgacagccccatggcatcggttgccagttcgcgtagcagttcgtgtgtcttctccagtgcgaggccggcgttttgctcgttggttttgttgagcagctcaatcagcttctcagaatccagtccggctgcctgttcatcggttttcgccagactgccgagaaaactgctgtgcaggctgccgaggtaatcggtcagctgcttcagaaaggcttgatagtgcggctcgacgatgacggggacgaatttgaacagccagtaggcggaatcgattgagaatttttccggtgcatgtgcgtaggcttgcggaacggccgtcgcgttggcatagaacggcacataggggctgaaggccatgacgccgaagttcagccagtggatggcggcgatgccgtccggtacgccggggcggatctggagaatatgggattcctgattgcgattgagcgagatgggccggaatgccagtcgatctgcgtcattaccgccgccgagcggatcgtaaggcgtttcctggtagtgggagctcaggatatagccaacatcttcgacaccgattcggcgattggcttttctcaggaacggcaggtcttccgacatcggatcctgatcaatttccggattgagatagcgctggccgtaccagacgcgtgaggtgttgtagtggcggtcaaaaaccgtcgacgtgccgaagatcttcctgagatttatggtgtcgtcgccggtgttcaggtgatatttttgaataaattcaaccagacccgtggaagtcatgaaaaagtcagcgttgccgggatcgatttcctggatggccatctgattggcacagacggcataacagtcatcggggattcgctgcgccgcccagtggtggccggtcaccgtttccatgtaccagacttcttttttgtctgaaaaaaggatcccgttcgactcggcggtaccgtgtttttcgataatggcaccgagccgccggatgccttcgcgggcagaatggatgtaagggagcacgacggtgaccatgctgtcttcggcgatgccgttagctacaagcggatcatagccgagcacacggtcgttcgcgtaaatgctctctgtggcgctcatcgcaacatttttttcattaatcccgtcttcttcaaatgtgtcatactttgtttccccgtccggagtggccgtatagcggagccgttcccgcggcagtttcatcgtaaactgattatcgggtgaaacgaaggtttcctcttcatccagaacctggtgcggatgaatgaccatccgtttcggcccgagcacggtataattatcttcattgcgcgcgatcaatgtcgcgccgtccagcgtggctttccggccgacgagcaccgaggtgcaggatgtgcgtttattcttctgcattctgttttgccatccctctatgaatgattttaaatgaacctttttcttctattataatggaacagccgccgaaataaacagtgcgcgctggtgataaagcgaaatccaccaggctttacgttctgatacaataagaacagaggtgaagatcggaaatgctggattcgcagtcgctgacattcctgagcgcgtattttttacgaaaagatgaagcatttgaaagcggcagtatgctttccgctaccctgatgcagctcccggtggtgaaatccacggcgcggacacgccgccagacgggtgttctgacattaagccggaacc

SEQ ID NO: 2070 - DNA, 23237 bp, synthetic construct
  misc_feature 1..23237: note = Synthetic
  source 1..23237: mol_type = other DNA
attagtagaataataatactgatgataaccatggaaatccggcttacatttaataaagtcctatctgaatagcttgtaccgcgtgattgctcaagaatatctctggcgatgctgcttccaattaattgtaagaaagttgcacaggatgaaagcgctgctgccataattccgctaactataattacaccaagccatgttgggacaatattcattgctgcccatataaatactttttctgttgggtctatgtcaggtttaatattgttaacggttgtaatactaagatgtaaaaataaataaatagtgataattgaaatcatcgcccatacacctgaacgaatggctacatgttcattttttgccattaaataacggctgctttgccaagggctaattgcgacaacggatccccaaactaagcctaaaatgatagcccaaataatgacttcagccggtgttcccatatacgcgttcggacctgtaatgccatgccaacttaataaatcaggtttttcaacaactttcgtagcgttaattatagcatcaggaaatccgcctgttgctttcatgataaaggggaatgaaacataagctgccactgaaaaggttggcgaagattttacagttggcattcgcatgagctcagtcgacatgacgatggacggaaccatattaaaagatgctgtgcaaatcgtagagttcccttgttgataagatccgtgtccatttcattaatgtaacagcaggtgattcaagcacatacgcaggtcaaacccatatcgttccccctcaccaattaaacatgcctatctctcccccatgcgttcaaaattcgaaccaatgaatatatgaaaaaactttacgaatgcaatattaaaatgaagactcaccatgattttggcggaattaaaaatggaaaagttgttatcagaaaccttttttcacatgaaaaagaagaaatggatcagtgggattcgattgtgctttctcttggtcgtgttcctaacattgagttatatgaagaaattaaagatttagcgcctgtagtaaaaccgataggggattgcttggcgccacgtacaattgaagaagcaactttagaaggacagctagcgattttgaaaatgtaaagaataaattaaggtagatcgttttctttccgggacattgttggctaaaatgataaagagggaattttaaataaagaaagaatgtttaaaggacaatatctttgggaggaaggcagatgaagcttgccactgcagtaataaatggaaaaccaacaattggagtcatcattggagaaacattttttgatttgcatgccgctacaaatggctctttgccaaaaacgatgctcgaagcgattcgcctaggtgacgattttattaaaaaagtaacagagttgcaagaaacaatggatggtaaagggattcctctttcagaaatcaaacttcttgcaccaattccaagaccggcaaaaaatattttttgcgttggaaaaaactacgttgatcacgcgattgaaatgggcagcaaagatgatatcccgacagcgccgatggttttttcaaaaacgccgacaactgttattggccccaatgaacggatcccccttcataaagaagtgactgaacagctcgattatgaaggggagctggctgttattataggaaaacggggcaaggcaatcaaacgggaagaggcaatggactatgtttttggctataccattattaatgatgtgaccgcaagggatttgcaaaagcgccataaacaatttttgatcggaaaaagtcttgatggttcttgcccaatgggtcctgttattgtgcataagtcacaaattacagatccgcacgacttaaaaattgtgacaaagataaacggggaggtgcgccaaaacgcttcaacttcacagtttatcttcgacataccagaactgatttccgtgttatcaaagggaatgaccttggagccgggagatattatcgctacaggaacaccttctggtgtaggggcaggatttaatccgccgaaggtgctttctgctggcgatgttgtggaaattacaattgaagggattggcactttagcaaatagggtagacaccgagtaaaagtataattttaaggaggaagacgcatggataaattactctacataaatggttcgtggacgggagaaaacttagacaaagttgaagtgaaaaatcccgcaacaggtgagctggtcggtacggtccccaatgcaggaaaaaaagaaacgcgagaagccattgcggcggcttatgatgcatttccaacatggtcgaagttaacggcgtatgagcgggccgggtacttagagaagctgtatgatttaatgattgaatctgcagatgaaatgggggaactgatgacgcgggaaatggggaaaccgctaggcgaagcaatcggtgaagtgaagtacgcggcagattttattaaatggtttgccgaggaaggaaagcgcgtctatggaaggacaattccttctcatgttgataataagcgtatgctcgtaacgaagcagccggtcggcgtcgttggggcgattacaccgtggaatttccctgccgccatgattacgagaaagcttggaccggcgcttgcttcaggctgtacgttcatcgtgaagccaccgaatgaaacgccattaactgcaataatgctcgttgaactgtgtgaaaaagcgggtatccctaaaggggtcgtaaacctcgtaacaggcgaagcatcggaaatcggtgaagaaatgctcacgaatcctcacgtaagcaagatcacatttaccggatctactgaggtcgggaagttgctgttaaagcaaggagccgatcaagtgaaaaaaatgtcgatggaactcggcgggcatgcccctatcattgtgcttgatgatgcagatatcgacaaagcggttaacggggcattgttatcaaaattccgcaatggcggtcaaacttgcatttgcggaaaccggatttacgtccaggaaggcattcacgacgagtttgttgaaaaatttgttgctgaagcttccaagctgaaagttggcaatggccttgaagaaggaattgacatcggtccagttataagcaaaaaaggctacgaaaaaattgacaggcatgtgcaaaacgcgatcaaacaaggagctgactgtgtattaggtgggcaaggaaaagtagaaggcgacacgtatttctacaatccgacgattttaacaggcgtccaaccaggcatgattattatgaatgaagaaacatttggccctgttgccccgattcaaaaagtgaaaacgatcgaagaggctgtgaaatatgcaaatcaaacccattacgggctcgctgcttacgtgtttacggaaaactacaaaaagggaattgaagtagccgaaagccttcaatatgggattgtcggctggaatgatggcgtgccgtcagcgccgcagtctccatttggcggaatgaaacagagcgggcttggacgcgagggcggaagcgaaggaattgaagagtatttagaaacaaaatatattgcagtaggattgtaatagggagggccacccttcctttttgaatgtgaagaaaaaatatgggggtatgaaacatatggatttcggtttaaaaggaaaaacagcacttgtccttgcatcgagcaaaggccttggaaaagcaaccgcgatgaaattcgccgaagaaggcgcaaatgtcatgatttctagcagaaatgaggaagaacttcaaaaaacagccgacgaaatccgcgaaaaaacaggcgcaaacattgcttacaaagtttgtgacatcatggataacgagcaaatcgtcgatctcgtttacgaaacgggcaatcgttttggcacgattgatattttagtgaataatgcaggaggtccaccggctgggaattttgacgattttgctgaccaagattgggtaaatgctttcgaattaacccttttaagcgtcgtccggacagtgagagcagtattgccttatatgcgaaagcaaaaaggcggccgtattgtgaatatcgcttcgtcatctttcaaacagccgattgaaaatttaactctgtcgaatacgtttagaaccgggatcatgggtctcggaaaaagcctttcccaagagcttgcgaaagacaatattctaattaatacgataggccccggaagaattgaaacggatcgcatcattgagcttaatcagaaaacagctgattcaaaaggaataagccttgaggaagtaagagcacaatctgaggccatgattccgctagggagatacgggacacctgaagaatttgcgaacatcctcgtgtttctctgctcagaagccaatacatatgtaacaggacaagcaattttagttgatggcggactaataaaagcaatgtaacaggtgcttttccacttaacctttgttaaaatggaaacggaaatgaaatagaatgggggaagaagattgccttatgctgcattttaccattcccatgtgacatcatgggcgcttacattgcttttctttttgattagctatttattgcttcgttctgggaacgaaaaaggacagaaaatcacccacatgattttgcgtcttttcttcattttgacgattattacgggagcaggacttgttattaaactaaacttcatgcttatcgccatcatcaaaatgctcgtagccatttggctcatcgcttcaatggaacttatccttactaaagggaaaaaaaggcaaccaacaggtggtctgtggattcaatttctaatctccatcattgtcgtatttatcattggatacgggtttatttaatgtaaaaaagctgctaatcacatagattggcagcttttttaaatattaaatagccagcgaaggactgtatcgtttataatcgatatggaagaagcgagtatattataaaccttttaggctagagcttcttccttaatggtacaacgcgcagaaagcggctaattcgggctttattatgcttgaaaataaattcttttaacgaaaaagttcggttaacttttttaaattattataatattcacaacaataaatgtgtagttgtgcatgactttattaaaattatttattttcttaaataaggagtagtgaaatgagcacaaaaacattcataggtttgcttgaggatcaagattatcggggctcaattagcatctttttggggcagttccaaagctatataaaacaaaataaattatcgggaatcagaaaccttgcgaatcttccggaagaacatatgaaagatttgctatgggttatggatgttgctttaatgcaccaatggaggcgtatcctaatcaattacaagtacagaaggcgagaatctccatctgcaaccatttggtattgtgaccaattaatcgatgacgagaagctaatcgaagcagaggaattgttaaaagatctggaaaaagaggatttatctccagaattagccgagaagctgtatttcaatatggcagtggcgctcattcacatgcggcgctttcgagaaggctatttttatatgaaaaaatgtgaaaaagcatcggagaatagtatgaataccaggtgggcttactattaccttaataaaggtgaatggagcacggcccttcgtcttcttgaaaaaggcaaaaaggaccagaaagattcggcacttgcttatacttttcttgtccagcattactccatgcagggagatatgatgaaagcgggaagctatttagaggaggggttaaagaagcatccacattatccaaagcttttggcggagaaaatcaggtttcattacagccaaaagcagtggcataagatgagggagacaattgctctgttagatcatatttctccttatcacgataataaaaaactgtatgattattacgtagcagaagcttattatgaggaagaaaaactaagcctgcttcatcagcatctagcttcccacccggatctcaccaagcatacgcattttaagcattttgatggcaataaaaataaaggcctcaaaaaattgaattacaaacctgttgtacaaaaatataatttctgtgttcctgcgggtattgaaatggccttaagcatgttttcgtatgaaatcagccaggatgaaattgcagaatcaatctttgatgtgactggaacaaagatatccaaagcaatcgactacttagaagaaaatggattttactgccgtctcttccatggaaatgaggaaagatttaagagtttaatcgaccagagtatcgccgttatgattaccattgattatccaacatcctcacatattcaaattttaacgggttatgacgataatttacaggtgtttcacattcaggatccgaatttcagagaacctcaccacctggaatataaagattttgaaaaagagctgggaaataactttgccttatctgtggcgattgtccctgctaatgaagcggataaacttcattttctggataacgtagagcatgaaacgaacaaaaagctgctgctgcttacagaggaatgtaaccactcgctggaacaagaagatcttatgtttttagaaaacaataaggaaaatccgctagttgcagtatatgctgtcaaatatttggccaatttcctggatacggagttcctggagaagcttatagaagtaacggagcgccatataagtgactcccaatataggaatcttatcattgccatggcatatgtaacggtcaagaaggagaaaaatgctttccaatgccttgaaaaactgggaaggaaagatgatcctacttatcattatcttaaaggcagattatatgataacaagggagattattttgctgcgtgtaatgaatttaaaaagggaataaaaaatgaaccggatgattatatactctggtcgtatttggcgatttcaacctcaaaccatggccaatacaaagacgccttaagattttcaaagattgcgcttgatataaataaccgtgatatttttccaataacaaaccacggaatgatcttatttgataacgaacaatatgcggaagcaaggaatttttttaccacagctctaaaaatgaaaaaagacgatgcccttgtttggtatgaaagagcccgctgtgataatcagctaggacgccatcataaggcggaaagaggattcaaagtctctattcgtttagacccaaaagtttcattcccttatcgtgaactggcaaatctctatgaatttgcctatgaagatatgaaaatggcagaagaagttctaaaaaacgggcttatgaaaacggataatgatacccttcttctccaagaattaggcgagctttatgaaaggaacaaggaatatgataaggcgaggatctattacacaaaagctgctgaaaaggtccctgaagatccggaagcatttatttcgcttgcattcttattgaaagaagaagaaaaaattagtgagtttttctcttacattaccaaaatttacgatcaatttaaggatcataacgaatttttgatcaacatcggaaagatcatttgggaaacagctatggaaagggaactagatgaaacttattttaagcaggccttaacttatatggaacagggtataaggaagactgcctctcatttggaagaggctctggaattatacacaggccttatagaggacacccctttctacaggagaggaatagaatttcttgaatgtgaacgtgagaatagagaagacgattttctgctcttatgttatattggcagtttatacgaaaataacggatatttggccaaagcgagaagctattataagcgtgctttagccatgaaagaagacgttcttccgctatacaggcttggtgacatttattctaaatttgaagatgttgagaaagctaaaggatattatcacaaagtgcttgggcttgatccgtgccatgaacaggcgctgctggatctcgccaacattgcgagcctgcaagaaaacaaattagaagagcttcattatttaatggaagcattccgtatcaatccctattgcgtttctgttgaagcaatcattgaattaatggatcaaccatcgatgcttgaagattttttgcaaaagtttagggatctggacaagaaaaaatatgagaaggaatttatatacgattccatggcttatatttatggaaagctcggtaacataaaggaggaagaggcctatttaacaaaggcactggagcattctccagaattgccggagctgcggcatcatcaggttaaactttttataaaaaaaggcgatcttaaaaaagccaaaaacgaatgcctccaagcgattcaggaaaatttccataatagggaatggtatgaaacacttgtcgatatttattcgaaaacaaagtcccttgcgcaaatcgaaaatgatttaaaaaaattaaagctgacaaaaaaggaaaaaagcattgtctttatgcatagtgcggcggcttatgaaaaaatggtagccgatttgatggaggatcgggaagatcatgaaggcaagggtttatttaaaaagctcacagggtttacgaaacttagttttcatatcggcacagctgttactctctatgaaacggcaataaagctggaccccgaaaatagtactgctaccgactggctatcggatttttacctgcaaatgtctagttctgaagatgcgatcaaagttttggaaaaaacgatcaaaatccagtggaatccggatttggcctataaacttgcaagcctttatgtaaatgaaagggtggaaatcagcgagaagaaacaaatgaaatatttatttaaggctcaaaatataatggagactcttgttgaggaatacgatgagccggaatatatgaatttgcttggcttaattttgtttttacaaggaaagcttaaggacgctgaggctgtctatgtgaaatgcctggatatagagcctggtgttgatagagggtattttcacttagcaaaagtgtatgccgagatggaggactatccgaatgctgagctggcaatgaaaaaagccttggagcttctgcctgaggatatagaggccttgaacgaactagggatcatctatcgattacaagaacgcgccatcgaggcactggaatgtgtggatgatgctttgaagctgcagggtgacgatttgtacgttaaatataatcgagcttgctatctttcgttactgggcagatttgaagaatcggcaaagcaactaggagaagtgtttgctttagacgaggagggcatttttcttgaaatgtcagttgatgatatcgatcttcttccgcttaaggaagccggcttatttcctcaagaaggaatggcggtaaattaaatatacaaaacgtatctttaacgaattgaatgaggagcaacctttgaaaggtttacccgttgaaaaatttgcttaccgacttgcttattttttatcggaattgaacgctcttcgcccttttcgagaaggaaatgggagaaccattagggaattggcaagacaaattgctttgaaatccgattatgagctagattggagcaaagctagtagcaaagaaacaatagaagctttcattcagtcttttcatggtaaattatctgatttatcttctttaattttccggtgtatatgttatttcctatttttactaaaaatgaatacaaaaaattgctctcatttctaacctccaagaaagacgcaaagcttaaaaaaaagttgtgtaggtctttttaaatgcgaaaaaagttttaaaaacactttacaaggttggtaatatttgctatattggaaatgtggtttggggaaaccacaatcgtatcaaagcaaagttcatagggttcatatggtaaggcatgaagccgagacgttagggatcgtctttccgtttagtcggagtctccctcaaaaaaatgactaaagaaatttagtcatttttttgttatcatcgcattgcgccgtgaaggagtgtgttcagattgaggtatcatatcgggttggatattggagtgacatctgttggatgggctgttattaatttagataaagaacgcattgagaacctgggcgtcagaatgtttgaagtggctgaaaatcctaaagatggttcctcattagctgcaccaagaagagaagcaagatcagtaagaagaagacttagaaggagaaaataccgcgtatcacgcgtccgtcattttataataaaacaaggcttgcttacaaaagtgcaagcggaatctttatatgattggcaggacggcgatttagatatttggcttcttagggtaaatgcattagagcgaaaattagaagatcgcgagtttgcaagaattttaatccattgcgccaagcaccgaggctttaaatcaaatcgaaaaagtgaaacgaaagaaacggaaaatggattaatgttgtcttcggttaaagaaaaccagcaaataatgaaagaaaaaaactataaaacgattgcccaattattagtctatgaaacagagcttttcgatggaagaaagcgtaatcgaagcggtcaatatacgcacgtcttcgcgcgcgatgatttggaaaacgaaataaaaatcatttttgaaaaacaacgggaatttggccatccttttgcaacgaaagaaaatgaacagaaatatttgaacatttggagttcgcagcgtccatttgcttcaaaagaagcaatcatgagcaaagtcggtgactgttctctcataaaaggtgaaaaaagagcgccgaaattctcttatcagtttgaacggttcagggctttggataagttgaatcgtctgcgcattttatccattgatcaaccgggacgaaaattatcggagattgagagagaacttgcccttgatctcttattcgataaaaaagaagtgaagtattctgatttgcgtaaagcgctgtcacttgatgaatctgcacgattcaatgaacttttttatgatgaaagcaagtctgttaaagaaaacgagaaagttgtattcatctcacttgaaggacaatacaaaatcaaaagtatcataaaaggttcggaaggcaaaacggcagtccttgaataccggccagttgattatgatacgattgcttatgctttaacggtatttaaagacgaccaagacatcaaggattatttaaaaaatgaatacgttgactcgaaaggaaaaaaattaaaaaatctggcaaaccgggtgtacagcgacgcactaattgaaggattgctcggtctatccttttcgaaattttctcatctctctttaaaagctcttaaagaattgcttgtacatatggaagccggctattcatatacagaagcctgtgagttatgcggttacactattaaccaaagaaacaatatggaaaaatcaaaattacttccggtaatccctggaaatgaaatacgaaatccggttgtactccgctcactttcccaatcgagaaaagtaattaacgcgatcattaaaagatatggaagcccttctggcctttatatagaactagcccgagatatgggacggccttataatgaacgctcaaaaatttcaaaagaatacaatgcaaaccgcttggtgaacgataaagcaagaagccgaattcaggagcttcatcctagcattagcgatccaagaggacacgacatcctcaaatacaagctttgggaagaacaaaatggaaaatgtgcttattcattggaacccataacgatcgaaagattgtttgaaccgggctatgcagaagtagatcatattatcccgtacagccggagctttgatgatagcaatcaaaacaaagtacttgttctaggcagggagaatcaaaataagcaaaaccgaacaccttttgaatggtttggccatgacgaaaaaagatgggagaaatttatttcttatgtttcttcgttaaaagtcggtcggaaaaagaaaagccttttattgaaaacagcttttgatgaagaacaagaggaagctttccgcgcccgcaacctgaacgatacaaggtacaccacaagatttttgaaaaactttatcgaagaaaatcttcaattccgcgaagaaaaagggaaaaagcaatacgtttacaccgttaatggcgcgtacacctcattaatgagaaaaagatggggatttaacaaaaacagagaagaaaacgatcttcaccatgcactggatgctgccatagtcgctgtcagccatgacaactaccacaaagtgagtgcattctttaaaagaaaagaaataagcaccgcacaattgctgaaaagagaaaaagagcaatttcctgaaccatgggaaggattttcaaaagaattagaagcgcggttgctgcaaaaccctcttcacttaaaaatggcacttgaatcacttgccagcgatgcgtatgatgaacaatttatcaatgaagtaaagcctatttttgtgtcacgaatgccgaagcgcggggtaaaaggccagcttcatgaaaagactttccgaaggcaaagaggcgaaaatgataaagggtatactgttgtagtgacaaaaaccggcctagataaaatcacatttgacaaaaatggtgactttccaatgtacggaaaagaatctgatccaagaacttataatgcaattaaagagagatatctagcatatggcaaagataagaaaaaagcctttgctgaacctctttataaaccatctaaaaatccagaaaaagcgccgattattcgttcggtgaagattgaagacaagcgtaacctttttgttgcgttagatgaaaaaacagcagcagataatgcaagcatcgcgagaactgatgtgttccaacacagagacaacggaaaatattatttaataccgatttatgtgtctgatgtcaaagagggaagggtgccaaatcggtttataacacaaaataaaccttataatgattggttggagtgtactgaagattaccaatttaaatttagtctctatcctaacgacttaatacatgtaaaattaccgcaatctaagcaagtaaaacttacaaataaagaggaaatattgtggcaagaaaatttcttttattataaaaaggtagacgttgcaagcggtcaaattacaataatgtctcaagaaggaagtttattagatcgtattggcgtccaaagacttgtaacatttgataaataccaagtcgatccactaggaaacattaaaaaggtaaataaggaaactcgccatggcgtataggcatatcgtaatccgaaatcccgccagattgtcaacaaaaaatgagcagcttttaattcagcaagaagaaaccattcgaattccgcttgaggatattagcacgctaacattagaagaaccggcagttacaataaccaatgttttattaagcaaatgcaccgagtatcatattaaagtaatagtatgtgacggaaagcgaatgccgagcggattgttgcagccgtttcaccgccattcaaggctaaaagcggttatggatatgcagctttctttatcgaagccgttcaaaaagagaatttggcagcaaattgtaattagaaagctggaaaatcaagctcgatgtttggaacttattcataaagcagatgaagcacagaaaatatacgcgatatcacggagtgttgagtctggggatcgtacaaatcgggaagcgtatggagcgagattatattttttaaaactatttggcgaggcatttaatcgtcgagatgaagatgtgagaaacatcgctctgaactatggatatagtattatccgctctcttgtttctcgttctcttgtccgatatggtttcacaccatcattgggaattttccatgacagccagacgaatgcatttaatctagccgatgatttcatggaagttctaaggcctttcgttgatgttacagttgcgctatatgttgatgaagaatcggtttggtcaaaggaagttcgggagaagctatttgctttgttaaactatgaagcgatttggaagaatgaaaaacaaagtttaacaaatggcgtagacagaatggttcaaagctttatatcagcttgtcgaagctcagatccatcgttgcttgttttgccagaactagtatctttaaatgagcatgtgtatgagtaatttcatgagattaatcgtattctttgatttacctgtggtcacttccattgaacgtaagcaatatgcaagatttcggaaatttcttttaaacgatggatatacgatgcttcaatattctgtttacagccgtatttgcaacggcaatgatgctgtgcaaaaacacctaaagaggttaagggagaatattccaaatgtaaacggtgcaattcgttgcatgaaaattacggaaaaacagtttgaaaatatggaaattcttcttggtgtaagaacatcagaagaagaattaggtgcaaataaaacagatttcttctaaaaaaagtgcttgcaaattgatgcgagtgcttttttattgccgtttaaatttttaaaggaaccataaatcattaaataactttagttataagtgtgttttttcaaactagaaaccccttaaaagccagtgatttcaaggggtttggggatgtgtatcgtatcacagcaaagttcataggggaaatatggctcatgccgttagtgaaaacccctctgccttatcgtatcacagcaaagttcataggggaaatatggcgttctttgctgatacctcgttgagaagacgatcgtatcacagcaaagttcataggggaaatatggccaaccgtgttagataggctcggtttacttgatcgtatcacagcaaagttcataggggaaatatggcaataaaggtttaaggtgcaatctaactgcaatcgtatcacagcaaagttcataggggaaatatggcccatgcgtttaagtattcttggttttggttatcgtatcacagcaaagttcataggggaaatatggttaattactcctctggtgttctatctataaaaaggcgagttacttcggtggaattgccttgtttaatttttttttagttgctttcttttctagagaatcatgagtattcatgccaggtgctactgttggttcatttctttttaaatttttattatccatacttttcgagctccttgttttagtattatgattccaaaaaacaaaaattgtattcaaggattttgttttattcagcaagccctaaattgaatggctacacattacgaaatttaatttaattgtaccccacaaagttcttagaaaagaagataaagtttcatcaaaacgtacaaacatacgtacgtattatgttataataaatagacaatagcataaaggtttctcaagggtggtcggcaacatccccagaacgaaagggggtggtgctgatgacagtgtttgaaacattgatgctcatctttgttttcgctgggcttattatatcaatcctgtcatttaaccataaaaaataatccacccttgagtaaatgacggctcaggtggattattcccagggccgatccccttaaagggaacctgctattgtatagccacttcgatgctggaacatcggagtggcttttctaataatatgcttcatttaattctattatacatcaaattgaaaagatgaaaagtattcagcttttcaatttcgagaaattgtcgaaaagccttaattagagttaaaaattacatattgaggttttaaaggaatgattggtaacattccggatagctaaacgagatactgccgtgacaatccatagctcttgcaagttcttttttgtcaatcctgtcactttaccataaaaataaactacccttgagttaatggcccaaaagattattttcgcccgtgccgatcccttaattaggaacctgcttttgtatgacagatcggttctgcaacatctagcgatctattatatggttcattatacataaagtggcattttttatagaaaaacaaaattccatctattaaacagtggccggggaaagcacactgctaaaaagttcataggggaaaatatggttgttatttttaaaattttaaagtagcacacccctaacaaggtcgctctttgtatgatctttgtatgagacaatatgtccgctcgatctaaggggtgtggaaaaataacgaaatttaacgtttgttcttctttctttttgcgtctaacgttcttttgtattcatatacatctggactaaaaaagagtcggactttgccagtaccttctccaaattcttttagaggtttgatacggcaattggtcactgcctgctgaaatgcagatctgctcatttgtagcaagctacgtgcttcagcaacagtgaatacacagtcgagtgcttctttcaccatttttctatccacccttacccgccacctcctttctcatcaaatttcctacttttacctcccttttaaaatattcagccttattatacaaagattggcttcattctgggataagcagttgtctagttagacaaaaacattgagtctgatgtcctaaaaatgtgctaaaatagaaataaaatctacctaagggactggattcgattgcaaaaagagtggaagtatcgctcgacaatcaagacccggccatttttctatttggaaaccaaaaaaatggcggaattgctgcttcaggaattggacgaggcacagttaaggcaaattgtgattcaagaaaatctgtttcaaatgaaaacagagaaccggagaaaagaagtggctaacacgattcttcgaaggctggagctgctcgatgcctttttattgcagcaaattgcccatggagatacggccacaagcaaactgctcgtcctttactccatcttaaagaccgaccgccttttctatgaatttatgaacgaagtgttccgtgaaaaagtaagcgtattggatatgaagttgacaaaccgagatttttcgacctttttcgagaataagcgacagcaaagtgaaacggttgcttcatggaaggattacaccttttacaagcttcagcaagtatacatccgcattttgtttgaagccgggcttctaaaaacgcaaaaagaaccaagagagatgctgaatggaatgataaatatgaaagtaaaagaacatttactgatgcacggcgagcaaatctatgttgaaattctgacaggtgaacgaagatgatgacaatccatgaaagactggatgcaatctatcaaaaaatcacagatccagcttttcgcgaaagcaaagggatgagcaatgaagtcggctatcacatctttgattacgatccggaacacgagatgattgttagagatcatatcgcctatttaaaagataggattaataaagaagacgctgatttttacatacgtgaatttgatttatacgaaatcatcattgacattctcgaacaaaagagttacctggaaaaaaactttgaaatggaaaaaaagaaaggcagttcctttgtcttaaatgccacacagaaaacattgcgccttacattaaacaatgatctcgtcatccgatatatgggggatcgtgtccagccgaatgacatcgtgttcattacaggggttggcaaagcatttccatttattcgttctcacacaattttgaataatatccataaagccgtcgggcggttgcctgtcgtcatgttttttcccgggcaatacgacggccagtcgcttatgcttttcaatgaattaaaagacgacaattattacagagcctttccattagtaggctacaggtaggagggttcggacatgcaaattagaaaaatgttcagaaagcgaattgatcgggatatcccgggtgttgtaaagatagggaatgaaggggaagatattcatcaggaacttgatgagtatgtcgtaacaaatgagatcgagcgacacatgaaatcattcttttccgcttataaaaaaggaatcactggttctacggatgccatcggcgtctggatctcaggattcttcggctctggtaaatcgcatttccttaaaattctctcttatttagcaaaaaacgacatcattcaaggaaaacgagcgatcgattattttgaagataaaatccaagatcatacgattttggaagatatgaaacgagcgggagaagtttcaaaagatattattttgttcgacattgatgcaaaaagcgaatcagacgcgaaacatgataaaaatgccatcgtcaaagtgatgaacaaagcgttcaatgaaatgcaagggttttgcggagcaattccttggattgcggatatggaacgattaatggttgagaacggggaatatgaagcgttcaaagaaatattcaaggatatttccggcaaagaatgggtcgattctcgcgaagatttttattacgaagaagatgcgatcattgaagcactcgtcaaaacgacgagaatgagcgaggaagcggcacgtaactggtttgaacgggcggaacaagactataccctcagcattgaacggtttgccgatcgtgtgcgtggctacatcgaatcaaaaggcgacaaccaccatgtactctttttcattgatgaaatcggccagtatattggtgaagattcccgtttgatgttgaatttgcaaacgatcgtgcacgaactcggcttgaaatgtaaaggaaaagcatgggtcattgtaacgagccaggaagactatgattcttatatgtcagtaaagggaaacgacttttccaaaattcaaggccgttttgatacgaagttaagcttatcaagcgcttttgtcgatgaagtcattacaaagcgacttttattaaaaaatgagcatgcgaaagacgaactgtcacttctatacgataaagaaatttccagcttgaacaacatggtgtcctttcccgacaacatggcggaaatgaaaaaatatagtagtaagcaagaatttattgacgtctatccattcatcccgtatcaatttcatttattgcagcgggcgattaccgaaattgcccaccattccagttcgacgaaacaccaatcacgaggagaacgttcacttttaagtgcgtttcgcgaagcggctatccaatatgcggatgaaaaaacaggctcgcttattcctttttcagctttttacgggccaatgattgcgtttcttgatacgagtatcaacatggtcatcattcgcgcgtctcaaaattctcgcttaacggcttatgacattgaaattttgaaactactctttttaattaaatatttaaaagaaatgcctgcaacaattgaaaacatcgcaacacttatggttaagcatgtgaatgatgacaagctcgagatgaaaaaggaaatcgaatcctcactcgctcgcttgctaaaagaaacactcattcaaaaaaatggcgaggaatatgatttcttaacgaatgatgaacaagacgtgaatcgagaaattcagaacatgccgattgactcggccgacgtcattcaaaaaatcggggaagaaatattcggcggcatctatactgaacgaaaataccgacattcgcctcaccatcactttgagtttaacgcacttattgatgaccgcccgatcggctcgcaagcttatgatatcggtcttcgtatcgtgacgccagactatgaagcggcacatgatatccattcatctgaattaaaggcaatgtcgatgcgtgaaaacaatgtcattgtccacatgcctccccaaacgacatacttggatgaaatggtggaagtattaaaaatccaagcttatcttcttcggaaaagcggaacaacgttgtctcaaacgattgaagacatccggacgaaaaaagcaagggaagtggacgagcgcaaagaacgcgtctccacttatttaaaagaagcattgcaggctgcggacatctatgtcaatggcgggcagcttgatgtaaaggcgaaaaagccgttagaacgcatcaatgaaggatttaaagcattgattcacagcttataccataagctcgattacatttctgaaccgacagatttgaagcagcttcaggaattaatcactcaaccgtccgaccagctatcatttgaaggcagtgaaaaccagcttgcgttgaatgaattaaacagctacattgaccgattaagcaagcgaaatcagcccccgacggtaaaagggattacggcccattttaaaaagcagccatacggatggaatgaacttgatacgactgcactcatcgttaaattgttaaaaatgcaagaaattaagctgcttatgaacagtgcttacattcagccaactgataaagatttatttcagtatgtgacgaaacgtgattacatcgatcgtgtcaccgttcagaaacgggaacgaatttccccaatcttaatgaaaaacattattgatttaagccgggaagtttttggcattacggcccttccgcatgatgaagacaatcttatgtcgagatttaaagaattaatagatcgtgaacaaaaaaagatcgagacacttcttgaaaattacaaacatcattcctaccctgggaaagatgtgcttgaagaagggcagcagatctttgaacagttgctctccattcaagatacagccactttttacaaaaaagcgcgtgattaccgtcgcgatttgaaagactatgcttcggagtcccagcaagtgaaagactttttcaaatcacagcgggacatttacgataaagccgtcaagaagttaacgatttttgaaagcaaccggacgtatgtccatgatgaacaattgctagacaccgtcagtcagatggaaaagattgtgaaacatgcgaccccttattcgaacattcaagaattgcctgcattgtaccagactttcgatgatcggtttatcgacttgctttcagaagaatgcgaaccggtaaaagaaaaaatcgaggaagatcaacaaacggtcatggacgaacttaaccggcatccagaagtgaaagagatttttaccgcacatgtccttgatcagttcatgtcattgaaagatcggcttgatcgggtcaataacttttacgaagcgcttgcaatggaagtcgaaagcgatcggttgaaagtacggcttatccaagatatccaacggaaactcattgatttgcatgaaaaaaagaaagctgttgttccggacaaaggtgttactggaccatctaaaccgctaaagcctatgaaacggacgaaaactttaagtaaagctcaaattatgcgtgggacaacgaggattgaatcacgagaagatatcgatcatttccttaatgaactacgagtaaagcttgaatcagaactagatgaagatacagtgataacgttagtttaacagggggagcttgctctcccttttttacaggaggaaagaaaatgaacaaacaagcgatacgtcagtttgcggtgaatgcaagacgcaagctcaaagaagatatcgaacaaaaagcgtatcagctcggtataacgaaagaagaaatcaaggagccggaaatctatcaagacggctttcgtatcaacgggcaattttacaaaaaatacgaaattaagcagcgggaacagctcgttaagcaaatcgaagaaaaaggctttgagcaagtcattgaagaagtggcctacacatggttcaaccgcttcattgcactaaggttcatggaagtgaacgactatttgccgacaggagtaaggattttttcctccattattgaagggaaaaaggaaccggatgccgtaacagaggtcgatatgttggatggcgagcttgaccttaacttggacatcgtctacaggctgcaagacgcaaatgatacgcatgatttgttcaaatatatccttattaaacaatgcaacaaactaagcgaagtcatgcctgtcgtatttgaaacgatcgatgattacaccgaaatcctcttgcctgatcgcctgcttgacgatggttctgttgtgagagacatggtgacaatgattgacgaaacagactggacagaggaagttgagattatcgggtggctgtaccaatattacatatctgagaaaaaagatgaagtattcgcaggcctaagaaagaataaaaaaattacgaaagaaaacatcccagccgccacccagctattcacgccaaagtggatcgtccaatatatggttgagaattcactcggaagactatggctggaatcacatccaaatgaagacttgcaggcgaactggaaatattatttggaagaagctgaacaagaaccggaagtgcaggcagaactcgataagctgaaagatccaagtctcaaaccggaggacatcactgtgctagatcccgccatgggatcggggcatattctcgtctatgcgttcgacgttcttcatgaaatctatgaatcagccggctatgcaaagcgcgacattccaaagcttatcttagaaaacaacttgtacggacttgatattgatgatcgtgctgcccagcttgcttactttgcattaatgatgaaagcgtgtagctataatagaagaatcctagatgagcagattaacctacctatttgcgccatccagcaaagcaataacctaacaaaagaaatggttcaaaatgtcattcagatgagcaattattcaggggataaagaaaaactaacggatttagctgaatatcttcttgaagttttctatgacgcgaaagaatatggttcgattcttgaagtggaaaagaatgattacgaacaactcgagaactggttagaacttcttaaagaagagcattttaatgatctatttgtggagcaagagaaaaaaacgatattaagtgaacttccagcacttgttcagcaggcaaagattatgagcaggaaatataatgtggttgtgacgaatccgccgtatatgggcagcggtggtatgaataaaaagctaagtgattatataagaaaccattatccagtatcaaaatcagatttatttgccgtgtttatggaagtttgtcactactttttgagagaaacaggtttcttcagtttaatcaaccaacaagcatggatgtttttgtctacatatgaaaaattaagagccagtcttttagaaaaaagtataatttattctatgcttcacttgggttcgaaagcgtttgaggaaatgggaggagaagttgttaatacgacaacctttgtattaagaaaaaatatatttaagactaaatataaaggtatttatattcgcttaaccgaagagagaacatcccgtggaaaaagagatattgcctatg

SEQ ID NO: 2071 - DNA, 23234 bp, synthetic construct
  source 1..23234: mol_type = other DNA
  misc_feature 1..23234: note = Synthetic
atgatggagtagatttgtattatgaagtaagtggggaaggcccccctgcctgtttttgcatggaggaccagggtattggagtaaagcctttcagcattacgcaggtagttttttagaacagaatttaaagatgatttatttggaccaacgtggatgtgggagatctgaacatagtctggcaacggactattctttaaatagattggttagggatatagaggagttacgcacccatttaggttataaggaatggctggttatggctcactcttttggaggtatactggccgttagttatgcccatcaatttcccgacaaaacaaaaggattaattttatctaacgtcacacttcatatgtccgattcttttcagaaacaaattaccaaaggatcatttttactaaataaaagtgtgcaagaagtgagtaaagacactttagagttagttatggaaaactattatgaaatggttaccagcttgctggataatgggttatatttcaccctacaatataacgatttagaaaaaaagaaggaagtcgaccaaattgatcagacaggtctccatagtgaccctgatttccagaaatttgttttctcatctgaagagtacttccaagatttttccttgcttacgagtaagattagcaaaccagttttaattattgctggggaatatgatgatgcagtgggtccaacacatcatcatctctttcaatttaaaaaccagatagtaaaggtgttagaaagcagtcaccacccatatattgaaaatcaaacagaattcaatcaggctatccttcattttttaaaagttggtttatagttatacctttcattattcatagaaaagtagttcaacacggagggacatcatgaaattaaatttttacataagaatagcaatagttgccacctttctgttctttttagtaggttgtggaacaatgaatgacatcgagacgaagggaacatcatctgaggaagaagataaagttgcaggagagaaggaatctgacctaaaggaaaaagaaatagagaatgaagaaaaagtcacacaacaacagcatcatatagctgcaaaagtgagccgggtagttgatggtgatacagtgaaagttatctataacggaaaggaagaaacggtacgcttgctgttagttgatacaccagagacaaagcacccatcaaagccagttcagccactaggtccggaagcgagcagttttgcaaaagaagtattggaaggtgagcaagtgggattggagtttgatggtcctaaacgagataaatatgaccgcctccttgcctacctatgggttgatggggtgatgtttaatcaaatgctgttagagcaagggcttgcccgccttgcttatgtctatgatcccccttataaccatttcgaagcatacatgaaagcacagaacaaagcaaaggaagaaggtcttggtatttggagcagagatggttatgtaacggatgaaggattttattatcaagatgaggaagaaaggtctgtaaacaatagagatacagagcctggaacttcaaataaagtaaattacgaccccaatgggcctgacagggactgtggagattttaatacccaaggggaagcgcaaatattctttgaggcagcaggtggtccgcatgaagacccacaccgacttgatggaaatgatggagacgggttagtttgcgaaagtttaccttagggtaatactaattgtggtgtacggtgaagttgtgaacaaacatagtagtatacttaaattaattgaaggagtggttaggtgtctgaaattatattcgtttcaccaagtaagtatatccaagggaaaaacgcattagagaaaataggaaaacatgttaaagaaactgcaagcaaaaaacctttaatcctctctgacgaaacggtatggggaattacaggagaagcgattgaaaaaagttttaaagaagaagatttgaactatcattatgtcgaatttaacggcgaggcttcatggacggaaattaacagaattacggatgaaggtaagaacgagtccgttgatgcgataattggagttggcggaggtaagaccctcgatacagcaaaagctattgcggatcagttagagacaggtgttattattgttcctacaacagcttctaccgacgcaccaactagttctctgtcggtaatttattcggataaaggtgtatttgaatcctataacttttataaaaagaatccagaccttgtccttgttgatacaaaagtagttgctggcgcaccaccaagattatttgcttcaggtattgcagatgctatggcgacatgggttgaagcaagagccgctattaaaagtaacagtgatactatggctggtgggaagacaagcattgcagctaaagctattgcagaaaaatgtgaagaaacactttttgcatatggacaagcagcctataaagcagtcaaagaaggtcttgtaacccagcatgtggaagctattgtggaggcaaatacgttgctatccggtcttggctttgaaagtggtggactagcaggggcacattccattcataacggttttaccgtattagatggtgacatacatcatctaacacatggcgagaaggttgcgtatggaacactcgcacatcttgttttagaattacacccagaagcagagattagaaaatatattgatttttatcaatctcttgggcttccgacaacattaaaagatttacatttggaaaatgcatcttatgaagaccttgttaaagttggcgaagcagcaacaagtgaagcagatactatggggaatctttctcctgcaattacagcagaagatgtggcagaggcccttctggcagtagaccaactaagtaaatcataaagttttataaaacagatcagggatgagttccttgatctgtttttatttggtggctctataatatatgttggggtacagagaaaattcagctaaataaaacacgcaaactccgaattttgttagacttgttttaaccacaaaacaataacaaaaggagttgcgtgtaagtgaattttaacatttctttcccaggtttagaagagtttcgtattaaaaaaacgattgaaaatggtggagtttttcagctgcatgtggaactggattccaagccccatcgttgtccagcgtgtaataccctaacacaaaaggtgcacgattatcgcactcaaaagatacagcactcaaaactgtttatgagagagacgctaattttttaccgtaaacgtcgctataaatgtgaacacccacaatgtaaaaggcgtttttatgaaagtaattcattggtagaacgctatcaacggcagtccaaagaactaaagcaagctattgcgttagagctaattcatggaaaaaactttaaagcaattgcctctcgatttaacacttctgcaactactgtaatgcgtaggtttgatgaagtgggatctagctttttggaggaaacacgagagttaccttctgtaatcgctattgatgaatacaagggagattcagacggagaaaaataccaaactattattgccgatccggtggatcggaagcccctcgagatattgccggataggaaaaaagaaacggtagaggcttatctaagagagcatggtcagaaagtagaaaaagttgtaatggatatgagcccttcattcaaagcagctgtggaccaagcattagggaaacctattgtagtagctgaccgttttcatttctgtcggcatatttattgggcacttgagcgtgtaagaagaaaagaacaaaagcattttagcgactacgaccgtaaaaagtgtaagcggatgaaacatgtgtttaataagaagcatgaagatttaacggagaaacaacgctggtatctggaacgttacttgaaaatgtctgataccttgcggacagcataccaattaaaagaagcttttcggttttggtttgaagaagcaaaggccctaggtccttctaatttaacggcagtcaaagaacgtttgtatgagttttacgacttggtaaaagcgtctggaattgaggaatttaaaaaggccatggaaacctttcaaaattggcaaaaagagattatgaatagctttgcctttaatttacataatggctatgtggaggggattaacaaccaaacgaaagtaataaagaggaatgcttttggataccgtcgttttgatcggtttcgaatgagagtattattacatcatcaatataaaaatataaatgggcgagtcgcataaagaaggagtgagcgttagctcaccccaacatttgacttagaacctatttggttagggacgatgatagccctctggttcggatgccattgcttgggctttcgtttcatgaacggtgccaaatgggtgctctggtggagcataaatagaatacaatttcagtggtttgttaccagtgtttgtaatgttatgccaaaatcctgctggaataaagatagcatcatcatcagatacacggcgtttgaacgacagattgtctttctttttgcccatttcagtcaatccacggccctgttcaatgcgcagaaattgatctacatctcgatgtagctctagacctatgtcctctccaactggaatgctcattaacgtaacttgcagatggtctccgctccataaggcagtacggaaggtattgttctgtttggttgctctttcgatattggtaacaaagggttggtagccataatctttaagtgtaattctcggaaggtcgctttgtggccagttacttccgtagtaatcaggataataacgaacagtaggataataagtgtactcaggtggaaaaacattatagtgtgtagccataacatgcggatgaggatatgggtaataatacatagacttcaatcctttcacaatttgttcttatagtatgtaagagattgggtaaatgtcattgaaaattgtgtagaattaatgtagttggctcgattacgaagcaatatagcagcatgagcgtttatctttccttccgctacgtaataagggaaaatggaacaaaaaggggtttcacgatgcggttaggtgtgttagatcaaatggcacagccgaaaggaatgagtgctgaagaaacggctgtgcgtacaataaaattagcaaaatatgtggaaaacttgggttatgagcgatattggtttgcagaacatcatgggacaaagggtcttgtatcaagtgccccagaaattatgatggctgcccttgcaggacaaacgaagagaattgcggtgggaagtggcggcattttgctaccccaatacagtgcatataaggttgcagcgcagctgctacagctccaagctctttaccctggtagaattgaagctggcgtagggcgttcacctgggggaagtgaaaccattcgctctttattggcggatgggaagccgaatcaaatggctgaatatccagaaaaactaagaagtctcctgcattttatacagggagaaggaaaagttagagccgctccacgaactgaagtgtcacctggcttatttagccttggattaggagaaaatagtgcagaatttgcagctgaactagggataggctatgttttcggtcacttcataaaaccggaaagaggagaagcaagccatcgacaataccgtgagatgtttaatccaggtcttctctcttcacctattgcccgtacggctatctttgtagtatgtggagaggatgacacacatgcggaggagcttgcacgtagccaggatatctggcttctacaggttgaaaaggggttggatagtcgtgttcctagtgtgcaggaagctaatgaaaaacgacttagtgtcagagatgaggagaaaattcagtacaacagacgccgaatgattgtgggtggtccagaaaaagttaaatcagagctccttcggttatcaaaaatatatcagtgtgaggactggttaatcttaaccaatctctttgattttaaagaaaaagagcggtcgtatcaaaggattaagaatttgttctcttaaggattaaaacaggaaggaacatgggggtatagccatgttcctttttacaaaagcttcgaattacattattggtctgcaataggagactggaaaaatttcctcctggagggtaatacacttgcaccaagtaagacaaccgacaacacgaacataaggaaaacgcccaggctgacagtgaaccgaattgaaatgaataatgtggctacacccatcaagccagttgcaacaattatcaagattgcttccagcaaattatagaagcttccaatccgtcccatcatatcagaggggatgtgatgctgatagaaagtaaggaaaccagtattagcaaaagagatgaaaaaggcaagaataaaaaagcctatccctgcaattaggaagttagtggagaaggcatacacaatatatccaattgtaacaaatacagccccacctcctattaaaagggaggtttttagtttttgaacaattagtgtattaatgctagctcccattataatgccagccccagcaatggtaaccagaaatccgtattcactatctgataagaagaggacttgtttcgcaaaggcagcctccagtgaatccactgcacttgccaaaaccatcaagactgaactgaatagaaagtaaatgacaaaaatatatcgattcgtaaggctgaaggttaagactgcttgccaatcttttattaaaacccttatagtattggctttctcttgctctgaaacgatcttccctttctcaagatccggaagtagccatgtaataagtcctgcgataattaaagcgaaaccattgatgtaaatagccaatgtgggtgtacctataaaaaacagaatgccggcaacagcagggccaactaaaaaagcccctgatgtaacaaagctatgaatagaattgaattgtttacgttttttaggtggaattaattttgtcatataggacatagaagctggttcaaacatcgaacccgccatatttatgattaataccgtcacatagataagcggaagggatgttgcaaataagggaagaaagccaatgactattcctctaaataggtctagtccgatcaataatctccgtttgttcattcgatcgataagactgccagcccaaaaatttgtgagcaggacagccattggttttattaaatagaggccagttacggctaatgcagagcctgtcatatttaagacaataagattcagtgaaatgaaataaacccattctccaatgtttgaaatgccaacctttaacaaaaatagcaatggatacttgctattggactttgctttcattcttcctctcctcctttaaataagtagtacaaaataaaaaaatcccacccccaagacttaatgtcttggggacgagatttaaaattctaaatcgtggtgccaccccagtttgttaatatgttgccatattaacctcttcaagtacgacaaagataactttgcttatactttagctctgtaacaggagcgcctgtcacgctatcatgtatcaatccagcgtgctactctgagtcttgtttcaatgagtaaatacacactccttttcagcgcccggagctctctgttgtgcattgtcctcatttacttttctcgtcatcgtctttttagataattttaaatagtttagcagggaatatcgggtagcgcaagctttatttttatatttatgggaataattttttagttactagttctcagtaaaaattaattctgcattaggtataaaggcctgacttccgtctttacaatataaaaaacagtaaaaaggttctgttgttatacctcctctagtttagctatgatgtaaacagatgtataacatgagaggtgtttagtgtatggaaaaaacgaagcaaatggtatggttattcggtttgacaatattacttgtggcttgtaatgcgaatgagcaggactcgtcagctaatgaagctacaggtgaacaaaaagaagaaatggcagaagacgtagatgatgactctaaagtaaagggtaaggaggaatctgcgaaaacggaagcaagtgaagaagcttctagtagtaaacaaaacgcacctgaggaccagggtgccatggagggctggtttgaaggtgaaattgcaatcgttggtaaaacggtaactgcttcagggactaccaatttattaccaggttctgagcttacgcttgtaactgaccctgaagaaggtactgtaattggaagtaaatcaagtactagtgtggttgaggatgatgggacgttcctaattgaaagagatgttccagataacatggaaggactagtcaatctagaattaaaatttgaagttgtagaccaggaagaggaggtcaatgctcattacgaggataagctaggaggtgattttgtcagagtgagtaccgatattaataatgacacgttatctaaaaagctttccttcaaagaaacgatttccattgacgatggtaatcaagcaattgacatagtggaaccgaactgggaagcaaatgatgaactaggtaatacaaatgtacaaatagatgctaatgttagccgtaaaggtaactatctggtagtaaaactaaatagtaacctagttgatgggacgtacgtaagtgggaaaccaattattcctggatacgtagctacaggtttcatggcttttacctatacgaatcctgatggtagcgcacttctttacattaaaaatcctgaaaaagatgacagaataaaagacttagaggaatttgaaattttgattgaaatggacccaagtcgtcatgaaaacagcttacatgttcatgaagcatatggagaaaatggagaaaagcttaaaggtgagcttgttaaggatttagatgatagcaatgttattgagaagaagatcactgttattgcggaaaattagttagtgttagaaggggctgctgatattagtggctttttcttttatattctgttgtatgccacatagattgcgtgatcccccatccccatttaagttttgatatggtaaacttgtattaagtgtgtctgcgttggtagacaatcttaaatgagaagggaacattagtatgtttggcagattaatatcaatgatttatcttaaagcaattcgtttctttgtccattctgttttgaagaaaagaggtagaaaggaaaaggattataaagaagtgaacaaggttttgaaatccttgcataagagtcttttagagaatgagcagttgaatgaggatttaaccgaagggccagtccctgtacagaataagagctccaaagagttagtagcagcatttatcacggttcgcaataagagagtggaagaagaagatttttacatagaggtaggtagagcctgggttaaagatcttggtagcagaaatcttaaagcgtcgtttatttgtgttgtaggcttttttgccgtttggttcggtggtatgttactaagtgaatacattagcggcgtcataggaatggtatatattttaggaacattgctatttcctgtctttggtatttattatgcgtttagaggagaacgtgctttaaaatgggttctagcagcagtgaatattttcaaccttatgacagctatgcaaataatatactaaaaatcgataaattggttgaaactaatattgatgagaatatattgatagccaatttttaattagttgactaattaaaaaaactaaaaaatattgacaatttagaaatattgtagtaaattttaattaacaaccttggggaaggttgttgaatcatatcacatcaaggtttacaggtaagttattatggtaaggcattaagccgtggcgttggggatcgcctagcttcgcatatattgcggagttccccattcaaactatgactaaatgcttttagtcattttttttatacctaaaacaggtatatagtactaaaacacacgaatagggtgattctaatgaagtatagcattggtctggatattgggatttcttctgtggggtgggcggttattaatctagacaaagaaagaatcgaggacttaaattctagaatgtttgacgtggccgaaaaccctaaaaatggttcatcacttgctacaccaagacgtgaagctagatctgcaaggaaaagattaagaaggcgtcgttatcgtgttggacgtattcgtaatcttataattaagaagggccttttatctgaagtggaagctgatcatttgtatgaatggcaggatggagatttcgatatttggctaataagagttaatggactggaaaggaaattaactgagcgtgagtttgccaggattttgatccattatgcgaaaaatagagggtttaaatcaaatcgaaagagtgagaccaatgagagtgagggaggagtccttttaaaagctgttagagagaatgcattgttaatggaagaaaaaggataccgttctgtcgccgaaatgctggtcttggatgaaaagtttaatggtaaaaaacgcaataaaggtggcgattattcgcatgtactagctagagatgaaatagaaaaagaaataaaagatgtttttgaaaatcaacgcaaatatgggaatgaatttgcaacgataaatattgaaaaagaatacatagatatttggagttctcagagacctttttcgagtcaagatgatattgctaagaagattggaaattgtactttggaagaagatcaaaaaagagcaccgaagttttcctatacttttgaaaaattccggggtctggataagataaaccggttacgaattatttctacagaaggaccacaaagatcactgactggaaaagaacgccaagaagtgatgaatagtatgttgactaaaaaggaaataaaatacaaagatctcagaaaagtattgcaactcaaggattgtgagcgctttaatgagttatattatgatccaggcgatactaatgagaaaaatgaaaataaaatatttatatccttggctgggtactatgctctaaaaaagattgttaaagaagtagaaggaaagacattagcagaatcttaccgtccgatagattatgatacgtttgcctatgcagtaacagtgtataaggatgaccatgatgcacgtgattatttatcgaatgagtatgtaaataaaaacggcaaaagagtaagcaatctggctaatagacactatagttctgaattgatagaagcacttctaaacttatcatattcaaagtttggccacctatcattgaaagctttgaataaaatcatcccctttttagaagaaggattactttataatcaggcttgcgaaaaagcagggtataatttcaatcaaaaagttggtgataaaaaggaaaagtttcttccagtgattccagcggacgacattgctaatcccgtggtcattcgtgcattatcacaaaccaggaaagtaattaatgcaattattaaaaggtatggttccccttcttccatttacattgaattagcaagggacatgggaagacattacaaggaaagaaaggaaattgagaagcaatataataacaactggaaactaaatgaaaaggccaaaaatcaaatacatgagctgcatcccgaaattagtaatccaagagggcacgatattttgaaatataaattgtgggaagaacaagatggacgctgcgcttattcgttaagaccaatttcacaagaaaaattatttgattatgggacagcagaggttgatcatatcattccctatagtcgtagtttcgacgacagtaatgcaaataaagtattagttttagcaagagaaaaccaaaataaacaaaatagaacaccctatgaatggtttggaaatgatgaagttagatgggataaatatatatcctatgttaattcattaaaagtacgcaaaaagaaaaaagatttattactgaaacaaaattttgatgatgagcaggcagaacagtttaaatcccgtcatttaaacgatactcgttacattacaagattcttaaaagcatttatagatgataacttacaatttaggggagaagaggggaataaacaatatgtatatactgtaaatggagcttatacatcgttgatgagaaaaagatggggatttaataaaaacagatctgaaaatgacttgcatcatgcactggatgccgtattggtagcagtaagtttacctttcagacatcgagtaagtaattattttaaacatagtgaattgcattcttctcaaatactaaagcgaaaaggtgaacgttttcccgaaccttgggagggtttctctaaagagttagaagctcgtatgcttcagaatcctgaaaaactaaaacttgcattagaaagcttatccttggcaagttatgacggcgattttctgaatcgggtgaagccaatatttgtgtcgagaatgccaaagaggtcggttaaaggacagattcatgaagaaacaattagaagacaccgtggttttacagaaaaagggttaaatttaatggtgaagaaatatgcacttaaagatatcaatttcgataaaaatggtgactttccgatgtatggaaaagaatctgatccaaagacatatgcagcgattaaagaaagatacttggaatatggaaaagatgctggaaaagcatttagtactgtgttgtataaaccttcaaagaacccagaaaatgcacctattatccgaagtgttaaattagaaacaaccgcaaaccaagtgtttcacttaaatgataaaacagttgcagaaaatgcaagtattgcccgaacggaagtattccgtcataaagagaatgggagatattatctggctccagtatatgtaagtgatgtattaaagaatagagtacctgaaaaatttattacggctttaaaaccttatagtgaatgggaagaaatcacatctgattacgaatttttatttagcttattctcgaacgatataattaaactaaagatgcctagagaaaaaaagtcaaaactaaacacaggggacttagtcacatgggacgagggaatgttttactttaaaggtgttcatacagggactgcacagataaatataattgatcatatgagcagctttaaagatgcaataggttctaaaagtctgcaatcttttgtgaaataccagactgacccactaggtaatttaactcaagtgcaaaaggaaaaacgctatggcgtttagacatcttgttatacggaatcctgcaaaactgtcaacaactaatgagcagttagtcataaagcaagaagaatctattaaaataccactagaggatattgtaacaattacactagaggatccggctattacgcttaccaatggagtattaagtaagtgcaccgaatatcatgtagagctaattatctgtgatagaaagcgaatgccaagtgggattgttcaaccattccacaggcattcaagacaaaaaacagtattagaaatgcagttggctttaggtaaacctttcaaaaaacgtacttggcaaagaatagttattcgtaaaatagagaatcaagcaagatgtttggaattgttacataaagctgaagaagcacagaaattgtatagtattagccgcggagttgaaactggagatcgtacaaatcgtgaagcatatggagcaaaggtatattttgaagcactgtttggagctggatttcataggagagaagacaatgtatataatatctcattgaactatggctatagtattattcgttccttggttgctagatcgcttatcagatatggatttactcctagttttggtgttttccatgatagccaaacaaatgcatttaatctagctgatgattttatggaagttgttaggccgtttgtagatgtgttaatagccacaaatgtaacagaagataaagaatggtcacctgaaattcgtaaagatttatttcaagtccttgatattatagctatttggaatcatgaaaaattaagtattacgcatggggttgataatatgatcaaaagttttgtttcagcttgccggcagcaagatgcaaactatctaatcttacccgaacttactaatattgctgtccattcgtatgagtagatatatgagaataattgtcttttttgatttgccggtagttgtaccaagagaaagaaaagcttattctcgttttcgaaagtttttattacaagatggatatactatgttgcaatactcagtttatacaagaatctgtaacggagaagatggtgttcgtaaacatatgcgtcgtttgaaagaaaatatcccaccagttaatggcgcaatacgggccttgaagattacggaaaagcaatttgaaaacatggaaattcttttaggaactactacagcagaggaagagttaggtgcaaataaaatagatttcttttaaaagatgcttgcaaatacaatagcaagtatctttttctagaatttttttaggaaaaggaagaaatagtgggacgtttataagaaaaattacttctttttaaaaaaagaaaccccttgaatggttgatttatcaaggggttcagggccatggatcatatcacatcaagatttacaggggaattatggcatatatagagataaaggctgtggatatacatcatatcacatcaagatttacaggggaattatggcagacgagagaatattatataaaagggtacgatcatatcacatcaagatttacaggggaattatggcccgtatatgccgtaactataaaaggcgaaaatcatatcacatcaagatttacaggggaattatggctgcacgatcccatgcttgagtagctgtcttatcatatcacatcaagatttacaggggaattatggcccttcaagagatattatgatctttaatacatcatatcacatcaagatttacaggggaattatggcagctcctgtggcatcttcttcataagctttatcatatcacatcaagatttacaggggaattatggcagattatgcgaagaatgaatagggggtttcatcatatcacatcaagatttacaggggaattatggcacattttcagttggtagtctccagtattttatcatatcacatcaagatttacaggggaattatggcataaattggtctatagaagaaaatctaaaaatcatatcacatcaagatttacaggggaattatggccctgtcagcataatatacgaattactcaacatcatatcacatcaagatttacaggggaattatggcctaggaacggcaataggcgcagttatagcgatcatatcacatcaagatttacaggggaattatggcaacatttcgtaatagtgttaaatggtggtaatcatatcacatcaagatttacaggggaattatggctttcctgcctgaaaactctttaccgcagttatcatatcacatcaagatttacaggggaattatggcgtattaataatcagggtgataaaataacgaatcatatcacatcaagatttacaggggaattatggctcatccaacgtccagttatgttgtttatcgatcatatcacatcaagatttacaggggaattatggctatccattaagacacctgctcaataacaaaatcatatcacatcaagatttacaggggaattatggcccctgcttgagagcccactccggcttacggatcatatcacatcaagatttacaggggaattatggcaaactcgtaattaccttcgctcgacctattatcatatcacatcaagatttacaggggaattatggcgagtgccacgccatccagtaacgggtggggatcatatcacatcaagatttacaggggaattatggctggtttaacctcggccaacttctattttcaatcatatcacatcaagatttacaggggaattatggcggctctgtcggcgacaagtcggtcacgcgcatcatatcacatcaagatttacaggggaattatggccattatatcgcagtttgtagattattaaatatcatatcacatcaagatttacaggggaattatggctgattccatttcagctataagtggcaacatatcatatcacatcaagatttacaggggaattatggcagcaaccgatatacaacccgcaaatgataatcatatcacatcaagatttacaggggaattatggcatatgcttatcattcttctcaagggtcttaatcatatcacatcaagatttacaggggaattatggccgtacatctaccggattaccatctactcgaatcatatcacatcaagatttacaggggaattatggcgttaaagggtatctttccccgctagatttaatcatatcacatcaagatttacaggggaattatggcaggaatatagatggcaacagttggattgaatcatatcacatcaagatttacaggggaattatggcaatgtgacgagggatacattcgcattgcaaatcatatcacatcaagatttacaggggaattatggcgtatctggaagaacaggaacaaacgcaaaaatcatatcacatcaagatttacaggggaattatggcctttttcctctgggaaggagatattctactatcatatcatattaagagaattatgttgaaagtgattactattgatgatagctagaataatatctcatacaaaagtttacatatcattacatgtcatggcatgataaaataggattaaatactggcccaaaggaatggaataatgtggaaaacaaacagcaatatcgatcaacaattaagtcccgaccatatttttatatggaaacaaagaaacttgcagaattggttttacaaggatttaacgaaattgaattaaaaaaacaggttgttgaaaacaatatctttcaagtaaagacagatgcacgaaagagggaaattgcttcagtaatcttacagagattgaaagttttagatgattaccttattaatcagttaaatataagcgacataggaacaagtaaattaattgtactgtatacaataattaaaacagacaggcttttttatgaatttatgaatgaagttttcagtgataaaattgcctatcgggatctatctctaacagacagagattttaacatctttttcgaagggaaaagacagcaaagcgaaatagtagctaaatggaaagaatacacgttttataagatacaacaggtatatattcgaattttatttgaagcaggtatgttgaagaatcaaaaaggaaacagagaaattcttgttccagttgcgaatccagatgtactagaacatattaggaataccgatgatcctaggttcattaatttaattgtaggggggacttcagtatgaaaacaatacaggaacgattagatcagatactaccgaagatcacggatccctcttttaaagaaaacaaaggactaggaaatgaagtaggttatcatatatttgattaccaaccagaacaggagatggttgttcgtaatcatgtggcttttataaaagagcggattaataatgagcaatcagatcaacgagttgttgaatttgatttatatgaagtaattctggatattttagaagaaaaaggatatttgcaaaagaacttcgagatggaacaaaagaaagggagtcaatttatactaaatgccacgcgtaaatcactacgcttaactttaaataatgatctagtgatcaagtacatagcagaccgagtacagaaaaatgatcttatatttataaccggaattggcaaggtattcccgatcattcgatctcatgtcatactgaataatctatataaagcagtaaaccaaattccagttgtattattttttccaggacgttatgacggacaagagttaatgttgtttggagaaattaaggatgataattattatcgggcctttcaattagtggattactaaaagggggaagcaccatgcaaataaaaaagatgtttacacggaaaattgatcgtgatattaaaggtgttgtaaaagttggccagaatgacgatcaaaatatttatcaagaattagaagaatatgtagtcacaaacgaattacaaaaacatatcggtgatttttttgcagcatataaaaaggggatcgacagtcctacggataaaataggtgtgtggatatccggattctttggttctggtaaatcccatttcttaaaaatattatcctatttaatagaaaacagaacgattaatggaaaaaaggcaattgattactttgatgataaaattcaagatccaatgattctggcagacttgaaaaaggcaggcgacattacaacagatgtggtccttttcgatattgatgcgaaaagtgaatcggattctatggctgacaatgattcaattgtaaaagtattgaacaaggtatttaatgaaatgcaagggttttgcggagcgattccatggatagctgaaattgagcggaacatgcacaaagacggaacttatgagtacttcaaagcaaccttccatgagatctccggcaaccaatgggaaaatgcacgtgaggatttctattatgaagaggatgctattattgaggcgctgtctaaatcaacacaaatgagtgaagcatcagcacgaaattggtttgaacgtgctgaacaagattattcaattagtatagatcgtttcgcaaagcgagtgaaagaatatatcgatgaaaaagggaagaatcatcatgttgcatttttaattgatgaagtaggtcagtacattggtgacaactcccagtctatgctgaacttacagacaattgttcatgagttgggacaccaatgtaaaggaaaggcatggatcgcagttacgagtcaggaagatattgactctgtattaagtgtaaaaggaaatgatttttcgaaaatccagggacgttttgatacaaaattgagtttatccagtgcatttgttgatgaagttattaagaaacgtatcttaacgaagaatgaagccggacaacaaacattggaagaagtatatcgcaaaaacagttccattctacaaaatctattaacattctcagataatagtgcggaaatgaagaaatatacaagtgaacatgatttcattgatgtatatccatttatcccataccagtttaatttgctacaaaaagtatttacaggggtacgtatccacggggcatctggaaagcatttggcagaaggagaacgttccctgttaagcgccttccaagaatctgcagttcgttttgctactaatagtgaaggaaaacttgtaccattttcagcattttatcaaacaattgaaaccttcttggactctactattcgaagtgtcattattcatgcccagggcaacgagaaactaaaagacttcgatgtggatgttctaagactgttgttcctcattaaatatgtaaaagagcttccagccaatctagaaaatatctcgacactcttggttgatcatatggatatagataaaatagaactaaaaaaagatattgaaaaatccctgacgcgtcttattcagcaaacattaattcaaaaaaatggcgaagagtatatattcttaaccaatgacgaacaagatgtaaatcgtgagataaagaatatgcatgtggaaacatcagaagtcattcaaaaaataggggaagaaatatttgagggtatctataaagataggaaatatcgttattcatctaaatatcatttttccttcaatgcctttattgatgatcgtcctgttcgtactcaagtaaatgatataggcataagaatcttaacaccatatgcggatgcaacaatggagtataatgcttcagaattgaaaatgatgtcaatgcgcgaaaataatgtcattgtgaaactaccacaggatacatcttatttggaagaaatggaagagattttaaaaatccaagcatatttaaaggttaagagcggaacgtcagtctcacaggcggtagaagacattaaaacacgtaaaattagggaagttgctgatcgcagggaacgaattacaacatacttaacagaagcattaaagtctgcggaagtatttgttaactcacagcaaatggacattacgaagaaaaaccctgttgatcgaattaatgatgcatttcgtacattaattaaaacacaatataaaaatctagattatattacagaatttgttgattctacgaaagggttacaagacattttaacggattctacgcagttatctatggatgataaagctgtaaatcataatgcgatcaatgcggtcgatgactatatttcacgtcttacgtcgagaaaacaacaaatgacagtcaaaagcatacgtaattatttcgcaaataagccttttgggtggctggaaatggatattacagcattactactccatttatttaaatcacaaaaaattaagtttcaattaaatagtagtgagctacagggcgaggatcctaattttattaactatgtgacgaaacgagattacattgatcgagttgtcgttagaaaacgagaacaaatttcagccttattgctgaaaaatgtgaaggatttaagtaaggagttatttgggatatcagcattaccaacagatgaagatggtctgaaaaataggttcaatgaattactaagccaggaaagggataaaatcaccgatttattagcaaattatcgcaataaatattaccctggggaagccattttaatagagggtaagaaattgattgatgaattaataaccattaatgatacagcaacctattataaagaagttcatcatttacgccgtgaattacaatcatatgctgctgactccaaagaaattaaaggattcttcgaaaatcaacaagataaatttgaccaagcaatgaaacgattaacgatctttgaaaataaccgaacatatgtaaccgatgaaaaaattaaccaaacggtggatgcaatagaaaaaatcgtaaaaaatgcagagccatatgatatgatccaagatctgccaggcttgtatcaaacatttgatgatcattttgtcatattactagaagaagaatgtaagcctgtaaaagcaaccatacagcgtgatttgcaggctgtgttagaggcattagagaagcatgaagatatgcaccgtaaattcgctggtactttcagggcgagattccatacgttagaggagcggttgggcacggttaataatctttatgaagcaattgcgatggaagtggaaagtgatcggttaaaagttcggtgtatgggtgaattagaacgagaatggaatagtcaaaagcctccagttgtcggcccgggaccgggtcctgatatagtttcaccgccaactaaaccaaaaaagactaaaacgttgagtaaaaacatgatgattaaaggaacaaaaacacttaaatccaaagaagatgtagatactcttattgaagaattaagaacgaaattaatgaatgaattagatgaagatacaacaatcaatctagtttaaataggaagggatagaccttattaaaggctatccttcattcctatcattggaggatgtaaggatgaacaagggagcaataaagaagtttgccgtaacagctcgtgtgaagttaatggaagcagtggaacaaaaagcctttgaattaggaataaccaaagaagcaataaaagatgcagaagtctatcaagatggatttatgattaaccaaaagttttacaaaaaatatgaaattaaacaacgtgaaaagctagtacaagaaattcaacaaaaagggtatgaccaagtcattgaagaagtggcctatacatggtttaaccgatttatcgcattgcgttttatggaagcgaatgattatttgccaacaggtgtgcgaattttttcttccattgaagaagggaaaaaagaccccgatgccctaaccgaagtactgatgcttgttgatgagctaggacttgatgagcaaaaggtatatgaattgcaggataccaatgagacggaagatttgtttaaatacatattgattaaacaatgtaacaagcttggtgagatcatgccaatgatgtttgaggagattcaggattatacagaactgcttatcccagacaatctgttagtagagacatctgtagtacatgacatggtgacaatgattgacgaaaatgattggcaaacagaagtggagattattggctggctctatcagtattatatttcagaaaaaaaagatgctgtatttgctgacctgaagaaaaacaaaaaaatcgcgaaggaaaacatccccgcagcaacggagttatttacaccacgctggattgttcaatatatggtggacaattctttaggtcgtttttggttggaatcccactccgatactaacctacaaggtaaactcccatattatctagaaagtgctgagcaaccggaaagtgttgttaaccatcttgaaacattgaaagattcaaacttgacccctgaatcgataacgtttttcgatccgtgcatgggttcaggtcatatacttgtatatgcgtttgacgtattgtatcaaatgtacaaatcacaaggatatcgagaacaaaatatacctaaacttatcatggaaaataatctatatggattagatatagatcctcgggcggcacaattggcttattttgcgttgatgatgaaagctagaagctataattatcgattatttgatcaagagttaaaaacgaatattcgttggatggaggaaagtaatcaactaacagagcaagacattgagatatgtgtccgtgatacagatctaaagaacgatatgacgttgctattggatacgtttcatgatgcaaagctatacggttctattatagaggtgccagaattagatatttcaagcttgagagaaagagccaaatctttaaaagaaaaagaaagcaatgacatgtttgagatagattttaaagataattcacttacggtaatagaaagaataattgatcaagctgagattttatcaaaagcatatgatgttgtagtaactaatcctccttatatggggcgtaagggaatgaatgcagaactttcaaagtatgtgaaaaagaattataaagattccagtgctgatctatatgctgtatttatggaagtagctagccggtcggtgagagagaatggatttattggcatgattaatcaacattcatggatgttcttatcatcatttgaaa

SEQ ID NO: 2072 - DNA, 23234 bp, synthetic construct
  misc_feature 1..23234: note = Synthetic
  variation 2543: note = n is a, c, g, or t
  source 1..23234: mol_type = other DNA
cggcccgataaagatgaatcgccaaggttgacggacgccgtgtgtaggggcccagatggcatcttctagcagttctttcacggtttcctcagtaactggtttatcattatatccctttttgaccgaacgccggttgcgaattgtctgttgaagtgctgttggcgttttgacagaatccaaattatgtcatcctccttaagacgtatgtttatgtacatgattgataactgttttcaattaattgttattgtagctgataaaacggtaaaaggcaattacatgcggtaacacaaacattgtaatggagcacaggtgacaccagtaacacatgaacagccgtttttgttacactagggacagagtgcagctaaaaaataggaaagggtgttgtatatggatcaatttatggaacgcgcggtggaattggctgtagagaacgttcgtaatggtggtgaaccatttggtgcagttctagtgaaaaacggcaagcaagtgacagaaggtgtgaatgagctgcataatcgctttgacattacagcccacgccgaaattcaggcgatgcgcaaagcacagaaaatgatgcatacgcatgaactgaaggggtatacgatgtatgccagtggcgagccgtgtcctatgtgtttaacggcgatgtactatgcagggttggacaatgtgtactattgttcttcgttggacgaacttatagaagcaggtctaggcaaggctgaaactgtttatgaggaattaaagaaaccgaaaagtgagcgtcggcttgaaatgacccacgtgcctttgcaggatggccaggaagacccggtggcattgtggagagaacgttccgaataaaacgcctgcgaaaaggagcattttgatgaatcctttcattgaaacagcattgcaacaagcgggtgatgattccccacttaggcaaaaaaaacgcgttaccggtgggtccatcaatgcaagttattttgtggaaactgctcaagctagctattttattaaatatcatccggatgcgccagcacacttttttgaactagaagcaaaagggctggagttgatcaggcagacagcttcaatttccgtgccaaaggtttatacttactcggatgaggaaaataatgcatttcttgtgatggaatggatcgatggaaaacgttcccgagatacggaatggaaattgggggaccgtgtagcacgcatgcatcagacatttgctgaaaaacacgggtttaccgttgatacgtttatcggcacactaccccagccgaatggtttattttcaagctggttggactattaccgcgaccggcggctaactgcacagctcgagcttggtattgaacgaggcagcattaccgggaaacggcgtgaccgtctggaaaaattaatggaaaaccttgataggtgggtcccggatgatgtggcaccttcctatttgcatggggacttatggggaggcaattggcttagtggccccggtggagatccatatgtgattgacccgtctttcctttacggggacaggcattttgaactggctttcaccgaattgtttggtggttactccgttgacttttataaggcttatcaggaacggtttccattgtcaccggattacgaggatgtaaagccgttatatcaactgtattatttgctcgtgcatctaaatattttcggggaagtgtatggccccgctgtagatacgatcctaaaaaggtacagcggctgatgtgtttgacacggttttgtcacaaatctagccaggattgtgctacatatcacaagtactccctgccctttatcgtgtaagatggaggtacatgaatgaaatggtgggataaacaatgacattttatgaactgcttgtttttgtccatattttttcagcgatattgggaatgggtcctggctttgtgatgatttatattgtgacaaaagcggagacaatgactgaattacggcacgcatatgatatccgcaaccgtctgcatatttttgtgatggttggcgggacattgcttttgataactgggttatggatgggctttttaaattcatatcttttcagtcaaggctggtatgtaacgagtctggtattatatcttatcgcattgggattgggtccgaccatgctgtcaccaaaatccaagccggtaaaagcattactaaaggagcatcagggtgaagttatccctcctgaatattatacactttccaggaagctatttttctatgagcggctggaaaatatgctattcttaattattattgcgctgatgattttgaagccgttttagttggatatcaagggtggcaaggaacatcaccggttgagcaggtgactgattaatagagaaacagcgggggcaatacgtttgggtgccctcgctgtttgtgtttagacgggtattttcagtttttccggccaataatgcagtataacggaaccaatgatgaccgttaaggtacggacatcaacggaatagagcgagatatcaacggaataggaccggacatcaacggaaaagggccgnataggaccggacatcaacggaaaagggccggacatcaacggaatagggcgagacatcaacggaatagggcgagacatcaacggaaaagagcgagatatcaacggaatagagtgaggcatcaacggaatagggcaggatatcaacggaatagggcgagacatcaacggaaaagagcgagacatcaacggaatagcgcgagacatcaacggaatagggcgagacatcaccggaatagggctgatatcaccggaatagagcgagacatcaacggaatagggagagacatcaacggaatagggcgcgacatcaacggaatagggctgatctcaacggaagagagcgagacatcaacggaaaagagcgagatattaacggaatagagtgaggcatcaacggactagggcaggatatcaacggaatagggcgagacatcaacggaatagggctgatatcaccggaatagagcgagacatcaacggaaaagggcgtgacatcaacggaatagagcgagacatcaacggaatagggcgagacatcaccggaatagggctgatatcaccggaatagagcgagacatcaacggaatagggcgagacatcaccggaatagggctgatatcaccggaatagagcgagacatcaacggaatagggcgggacatcaacggaaaagagcgagacctcaacggaaaagagcgagacatcaacggaatagagtgagacatcaacggaatagggcaggacatcaacggaatagggctgatatcaacggaatagagcgagacatcaacggaaaagggcgggacatcaacggaaaagagcgagacatcaacggaaaagagcgggacatcaacctgtgagcttgaaattagcaactcgaaagcagggaacatgtatccgaggggcagcgaaaaggcgcacatgttagaaatgtgcgcctgcattatgcctctcccaaatattcttccagtgttattccctgttccatgatggttgttgcggcttttttgccaacataccgcaaatgccatggttcgtattgatattcggtaatggcgtctttgccttctggatagcggatgataaagccatattcggcggcatgctgtttaatccactttccttcgtccgtttgtccgaattctttaattaaccgataattaacatccgggctggtgacatccatcgtcaagccggtctgatgttcactttctcccggccttgcactgaatttattggccgcctcttcaccgttcttgcggacattggaagcgaaaatggcatcctgtctttcataagacctgtagccggattgagcgaatagttctagtccggcactgttagcagcttgaaacatatcttccattgctttggcagctactttccgcatttgtttttttggcaggaaatcctcaaacggaaaacggacatctggaacagtcaggttgcgtggaacaaaatcacttggcaacctgttttctttattgactaatgccaggatatcatgcgggttgtcaacggtatccggcttgttgtcaggttgatcgagaacagctccggctttgatagcttgatgttcatccagaatcttctgcaatgatcttcgggttgactcattataaacaccagtagctatcaatgcttgctgttgcagttgaaaatcagtaatcgcccatgttgttacatcgtcatatgtaccgttgcgatcgatggaatagccgactttgttcaaagctttttgcagtgttttgactgcttgaccctggtcggttttttgtaggtgctcttcaggtagtcggatatgatcagtttctgcttcaggcattttcttttgctggttatctgttttatctactggtgcatgtgctaccgtttctttagtttccggattatcaccatcacaggctgttgccacaagcatgatagcaagcagcatagaggtagcgatcaggttcttttggaacatttttttctctcctatgtgtgtatactctttgatttatcatatcactgcatgaatgctgtggtctatgcctgggcacacaattttttataggcttgcagcataaggttgggaatgtgtgaatcggacacgtactaccatttatatgcatagtaaaaataagagagccggattcattagtgtgaacccggctgtcatttgtttatatttaactcccggattctgcttcaaacaaacgacaaatttcgacgataacattggttgccttttccatattattgactgaaatatattcatacttcccgtgaaaattttcgccaccagtgaaaatattcggtgtcggcagccctttgtatgagagctgtgaaccgtccgtaccacctcgtaccggtttaataagtggtttgatatccaggttttccattgcctggtacgcgatgtctacgatttcttttaccggttcgattttctcgcgcatgttgtaatattggtcgttcatgtcaatttcggcagtaccctcaccatgtatggcgttaatttcatcggtgcatttgcgcatcgtttctttccgtgcttcaaaattatctttgtcaaagtcacggatgatataggtcagttgcgtcttttcaacatttccattcactgaaattaagtgataaaacccttcatatttttccgtgttttcaggtgtctctttgttaggtaatttgttaatgaattcggctgcgattgtccccgcgtttaccattttgtccttggcggtgccagggtggacactattgccgttgatggttattttggcagcggcagcgttaaagctttcgtactgtaattcgcccaaaggaccaccatccatggtgtaggcatacttagcctggaaacgatccacatcgaatttatgcgggccacgacctatttcttcatcaggggtgaaggccactcggatggttccgtgtttgatttccgggtgattgattaagtagtccattgcggtcatgatttctgtaataccagctttatcatcagctccgagcagggtcgtcccatccgttgtgattagtgtatgtccttcataatctggaagctccgggaattcatcagctgacaacacgacattcttttcctgatttagtacaatatcttttccatcgaaattttctacaatctgcgggtttacgtttttaccggtgaaatctgttgccgtatcaacgtgagacaaaaatccgattgtcggaacatctttttccgtattggctggaagtgtggccattaaatagccgttttcgtccattgatacgtcttccataccgatggattttaattcttccgcaagttgtttggccagttctatttggccggatgtggacggagttgtttcactggactcatctgattgggtgtcaacagtaacataactagtgaatcggttgattaattcatttttcattatgtattcatctcctttctttttattttaccactttcgtttaccaggggggaaggataagcaggtctgttcattggcttatctatcggttaaaataaaggaaacgaaatttctgataaacgttaactaaaataggaggggttttatgtccgttgtagtgagtccgacttggctgaaggaacagttggcgcatcatgctgacaagacagttgttgtggatacacgttttaaattgacagatgaagatgcaggtaggaaagcatatttggaagagcacataccgcatgccgtttaccttgatttgaataaagatctatccgcaaagccggctaaacatgggggtaatcatccattgcctgatatggatatgtttactgcaaaaattgctaatatcgggattgatcatgaaacaacggttgtcatttatgatcagcagaatgacatgttcgccgcacgcttatggtggctgttgtattatgtaggccacgaccatgtttatttgcttgatggcggctttgatgcctgggtggaacagggatatgaagtgacaacggaagtgccgaagctggaacaagcaaatttcacaccgcagtatcgagaaaacgaagcagtagatatcgaggaagtaaagaaaaagctgacggatggatcagcgacattaattgattcaaggtccaaggaaagataccttggtaaaaccgagccgatgtatgccaaagcaggtcacatccctggtgcaaagcatttcttctggaaagatatttttgacaaggatgggaagtggaaagatacgaaggagctagaggcgcattttgggtcactggacaaagaagatgaaattattgtttcatgtggctcaggtgtatctgcttgcccgaatgtacttgccctgaaatcggctggcttccggaatgtaaagctatacccaggcagcttcagtgactggatctcctatgaggaaaatgacgtggagacgaaggaagaatgacagataaccgcaaacgctgtggctgggtgacggatgatccaatttatatagactatcatgatcgtgagtggggcaggccagttcatgatgatcggaaattatttgaaatgctttcacttgaaggcgctcaggctggtctgagctggattaccattctgaaacgccgggatggttaccggaaagcatttgactattttgacccggaaaaggtcagtacttatgatgagcataaagtaagcgaattgctgcaagatgccggcattatccgaaacagacgcaaaattgagtctgtcattaaaaacgcccatgcttttttaaacatacaaaaggagtttggcagttttgatacgtatatctggcaattcaccggtggggagccgatattaaacgactgggatacgcatgcggacgtaccagcatatacgaaagaatcgaagcacatgagcaaagatttaaaaaaacgcgggtttacctttgttgggccaacgatttgctatgcgtttatgcaggcaaccgggatggtcaatgatcatacgaaggattgtctcttatatcacggtaaaacggataaacagctctgaaaccgtttgatgacatgctatagccggcgtttttcctctgaggtcttgaagcgaacgctatctttctagtacaatacgagattgtgttcgtttttgacggaaaggaggtcaacaatggtacagcatgcatttttggaagatacaaggagtaaagatgatataaagcaagaacttgacaccttggaaatacaacttttccggatgcgggaaaacatccgaaaaattgcccaaaatgcagaagtgattggtatcgatcaaacgaatcaagacgagtgggttgttgtttatgtatatagggatgcaaacatgtgtcaactcatgctgcataattgttctaagccgtacaaaggtgattggcagacggccattcaagcggagtataaagctggtcaaaggctccatattgcggacattaaaggtatgcagaataaaggatatggatcagtgctgatgaagcatttaaaagaagaggcacgaaaagacaacatcccgtttattacaggtgacattgtcaaacgcgacttcgatcatgtggaacgattaaaacacttttatcacaagcattcttttgaggtgaacattgatcaccaagcacaatgcggtgacattgtttggaatagagaatagaacgggctactttcctatatcgggaagcagccccagcccgtctattttcaaattaatttcggcggaatccggtgttgtgttacttgttcatatgcatatgccatttcaatcagttttgcttcggtaaaggcttgccctgtgaatgttacgccaactggtttgccggcagatgtatagcctgccggaacggttatggacggataacccgctttggctgcaatgcctgccccgtagttattgacgaaaatgagtgcatccaattgatgctcgctcatggcttgatcaataccttctgcctgtgactgctctatatcatttaaacgagcattaatatattccgcctccactaaattcccgcttgttcggtcggcctgctcaaggattgtttgaccgtatgttaacgactctattttatggtttttgttaaactgaatgacatcctgcaatgagtgaaccgggacatgtgacgatgcgttcattaagtatgcattgacgccatttttgaattcatggagcatgacgttcatgttgtttacatttgttggtaactgaacttggtctacgatggtcgcacccagttttttcatatccgctaaagcagcattgatgatggctgtttcttcttcatcaagcccctccatataagcccgcggtacgccgagctgcacatggtttaatccatttttacgtagtgatgccgtatagtcgattgagccattatcaggtgaaatcagtgttgctgcatcgttatcatcaacaccggctagcacgttcagcataatagctgcgtcttccacggtacaggtcattggtccggcggtgtcttggctatttgaaatggggataattcccgagcggctcaataggccgacagtaggttttataccgacaatggaattgctgcttgccgggctcagaatggatccgctcgtttccgtaccaagtgcgccagcagcaaacccggcggcaataccagcaccagatcccgcactcgacccgccagtgtcaaaatccccgggtccatacggattcaaaacttgccctcctaacgaactgtacccatttggcatgcctatagtcataaagttagcccactcagtcagattggtttttcccaggatgaccgccccggcctcacgaagtctgcggacaataaaagcgtcttcttttgcataattattttccagcgctagggatccggctgttgtatgtgtcttatctcccgtctcaatattatcctttactaagataggaatgccgtgaagcgggcctcgtgcacctttttgctgtctttctgcatcaagggcctcggcgatatgtattgcttcaggattaatctccaatacggcgttgatctgttcattgaagtcagcgatttgcttgaggtaatgcattgtcagttgtttcgctgatagattaccagtttccatttcgtgctgtattttggtgatggttgattgtgattgttttggcattggtagcctccttcatttagtaatctttatataatattctgcttttttgatgagactcctgtttaatacaaaaactttaaggttctattacaataatcggggtttataaaaatgacgcgagagtcgaatcaaaatttaacatttgaaagcgttgacaagataatctagtataattataatagacttaacgacctaggggaaggttgttagtatcatatcacatcaaggttcacaggtaagttattatggtaaggcattaagccgtggcgttggggatcgcctagctccgcactactagcggagttccccgcacatctatgactaattcaattagtcatttttttatatctaaatgaatctagaaacagggtgatattagtgcgttacagcatcggcctggatattggtatttcttcggttggatgggcagtcattaatctggataaagagcgtattgaggacttaaacacgcgcatgtttgatgttgctgaaaatcccaaaaatggatcatcattggcaactccgagacgcgaagcaagatctactaggaggcggattagaagacgtcgttaccgtgttagccgtatccgaagcttcattatgaataaaggtttactatcggaaattcaagctgatcagttatatacatggaaagacgacgatttggatatttggcttgtaagagtaaatggtcttgaaagaaagctttctgaccgtgaatttgctcgtatcctgattcattacgccaaaaaccgtggatttaaatcgaatcgaaaaagcgaaaagaaagaggcagaaacaggaagattattagaagcggtaagtgagaataccagaataatggaagaaaacaaataccgtactgtagcggaaatgttattactggatgacagatttgaaggaagaaaaagaaataaaggtggagactattcacatattttagcgcgaactgaaatagaaaaggaaatacgtttgatttttgccaaacaacgcgagtttggtcataggtttgcaacaacggaaaatgaagaagaatatattcaaatatggggatctcaacgtccgttttctacacaggaagatattgttaagcggattggcagttgtactttcgaaccgggtgaaaaacgtgcgcccaagttctcctacacatttgagcggtttcgtgcttatgataagatgaaccgtctgcgtattatttctgacaaagactcgcaacgaccattgacggatgacgagcgtgacgacattatacgaatgctgttcaacaaggaggaagtgaaatataaagatataagaaagacccttcagttacagcattatgagcggtttaatgagttatattatgacttaaacgaaacaaatgaaaagaacgaaaataaaacgtttctatcattggaaggtcagtataaactaaagaaggttgtttcaaacatagaaggaaaaacattagcggaatcatacaggccgattgattacgatactttcgcctacgctgtaacggtttataaagatgaccatgatgcacgtgaatatttgttaaatacatatgttaatgaaaatggtaaacaggttaaaaatctggctaatcgtgcctataatgaggagctaatagaagggttattaaatctttcattttccaaattcggtcacttgtcattgaaggcactgaataagataataccatatgtggaacagggtcatgcctatcacgaagcatgtgaaaaagcgggttaccaatttaatcagcgggttggaaatgaaaaacaaaaattactccccgttataccaacgaaagatattactaacccggttgtcattcggtcgctttctcaaacgcgtaaggtcattaacggtattattaagcgttacggacagccgtcggaaatctatattgaattggcaagagatatggggcgccattatagcgaacgtcgagaattagaaaaacaatacaataaaaatcggaagctaaacagtcaggctaaagaacgaattcatgaattgcatcctgaaatcagtgatccaagagggcatgatatattaaaattcaaattgtgggaagaacaggacggccgatgtgcttattccacaaagaaaattaaaatggatgatttgtttgatcatggtgttgccgaggtcgatcacatcattccgtatagtcgaagttttgacgacagtaatgcgaataaagtattagtacttaaaaaagaaaaccaggataagaaaaacagaacaccatatgaatggtttggtaatgattccgtgaaatgggatcaattcacttcatatgtcaacacgctaaaaattcgcaaaaagaagaaggatctacttctaaagaaaaattttgacgacgagcaagctgaacagtttaaatctagacatttgaatgatactcgatatatcacacgttttataaagggtttcattgaagacaatttggagttaagagaagaaaaagggcgcaaacaacaggtgtttacggtcaacggcgcttatacgtcgttaatgcgaaagcgctggggctttaacaaaaatcgggaagagaatgatttacatcatgcagtagatgcagtccttgttgcggtaagtctgccttttcgccatcgagtaagcaactatttcaagcgacatgaggaacatgcatcacaattgctgaagcgcgagggtgaaaagtttccagaaccatgggaaggatttcggaaagagctggaagcaagattgatacaagatccggataaattaaagctggctttggaaagtttagcattaccaagttatgatgaagacttcatccttgaaatcaaaccgatttttgtatcaagaatgccaaaaagatcagtaaaaggacaaatacatgaggaaacgatacgcagacaccgtggattcactgataaaggtcttaatttaatggtgaagaaatacgctttggaggatatcccgttcaataaaaatggtgatttcccgatgtatggaaaggaatccgatccaaagacttatgaggcgattaagcaacgatatcttgataatggcaaagatgtaaaaaaagcattcagcacaaccctttataaaccgtctaggaaaccggaaaaagcaccaattattcgcagtgtgaaaatcgaaacgacggctaaccgtgtatttcatttagatgataaagcggtagcagaaaatgcaagcattgcgagaacggaagtgttccggcataaggaaactgggaagtattatttggcaccggtttatgtaagtgatgtattcgccaaaaaacagcccgagagattcattacagctcataaaccatataatgaatggcaggagataacaacagactatgaatttttgtttggtctatttccaaatgatgtaattaaagtaaaaatgccgagagaaaagacttctaagacaaattcaggtggatttttaaagtgggtagaaggtgtattttattataagggggtacacactggtactgcacaaataaatatttcggaccatatgggcaggtttgtagatgctattggatcaaaaaacttacagttatttgagaaataccaaacagatccattaggtaatcttaccaaagctcacggaggtaaacgccatggcgtatagacatcttgttattcgtaacccggccaaattgtcaataagctatgagcaactagttattaagcaagaagaatccgtgaacatcccgttggaagacatatgtaccatcaccttggaagacccggcgataacaatcaccaattctgttctaagtaaatgtacagaataccatgtggaattgattgtatgtgacaaaaaacgaatgccaagtgggattgtccaaccattccaccggcattctaggcaaaagtcagtattggaactgcaaatgaatctgggaaaaccatttaaaaagcgtatctggcaaaaaatcgtgatacaaaagctggaaaaccaagcccgtagcttggagttgctgcataaaggcgaagaggcgcaaaaactttatgcaatcagcagaagcgtcgaatcgggtgaccgaacaaaccgtgaagcatacggtgcaaagctgtattttgaatcaatgtttggtgcaggattccagcgacgacatgataatgtttataatatttcattgaactatggttatagcattatccgctcgttggtagccagatcgattgttcgatatgggtttactcccagccttggaatatttcacgacagtcaaactaatgcttttaacctagcagatgactttatggaagtgttgcgtccgtttgttgatgtaaccattgcggggaatgtcagtgatgatacagagtggtcgtcggaaatcaaaaggaaattatttgaagtattggaaatagaagcagtatggaataatgatcgactaaatgtcacgcatggggctgataatatgattaaaagttttgtatctgcttgccggcagcaggatgcaaaagtgttaactcttccagaacttacaaatatcgtagttcacgcttatgagtaaatatatgcgaattatagtcttttttgatttgccggttgttattccaagagagcgaaaagaatacacgcggtttcgtaaatttttgctcaaagatggttataccatgcttcagtattcagtttacaccagaatttgtaatggtgaagatgctgtaaaaaaacatatgcaacgactaaaacaaaatcttcctcctgttaatggagcaatccgtgcgttaaaggttacggaaaagcaatttgaaaatatggaaatattacttggatcgacaaccacggaagaagagttaggaacaaataaggtagattttttttaggaaaaatgcttgcattaataaatgcgagcattttttatttacgttttttacaaaaaatcctttgaagtgaatcattttacagtcgataatcattctttttctaaaaaagaaacccttgagaaaggggatgtatcaagggtttcagcgccatgtatcatatcacatcaaggttcacaggggaattatggcaatctatccagcgtggtgatgtagacggtgatcatatcacatcaaggttcacaggggaattatggcaatctatccagcgtggagatgtagacggtgatcatatcacatcaagcttcacaggggaattatggcaatctatccagcgtggagatgtagacggtgatcatatcacatcaagcttcacaggggaattatggcaatctatccagcgtggagatgtagacggtgatcatatcacatcaaggttcacaggggaattatggcgatgcacgaataacaagccagtcatatgccatcatatcacatcaaggttcacaggggaattatggccaatgttagtcattattgattatttgcagtatcatatcacatcaaggttcacaggggaattatggccgacggataaaggcacgcaatcaccgccaaatcatatcacatcaaggttcacaggggaattatggcgagattgaatatctttcaaatgatgttagcatcatatcacatcaaggttcacaggggaattatggcaggaaatttaaatcaaacaataatcagccaatcatatcacatcaaggttcacaggggaattatggcgagattgaatatctttcaaatgatgtgagcatcatatcacatcacggttcacaggggaattatggcgagattgaatatctttcaaatgatgtgagcatcatatcacatcacggttcacaggggaattatggcttgcgagatcagttaaatgtacgaggtgaactcatatcacatcaaggttcacaggggaattatggcttgcgtgatcagttaaatgtaagaggtgaaatcatatcacatcaaggttcacaggggaattatggcttgcgtgatcagttaatttttagaggtgaaatcatatcacctcaaggttcacaggggaattatggcactaattttcatgtcctcagagggaattggatcatatcacatcaaggatcacaggggacttatggcttgcgtgatcagttaaatgtaagaggtgaaaacatatcacatcaaggttcacaggggaattatggcacttcttttcctctactcatagggaattgtatcatatcacatcaaggttcacaggggaattatggctcgctacgcccagtgccgtgattgctatacatcatatcacatcaaggttcacaggggaattatggcctgcattagcacgattcgcttcgtctgtacatcatatcacatcaaggttcacaggggaattatggctccagctaggttattcccttgaacccttcaatcatatcacatcaaggttcacaggggaattatggctggaactctgtttggctccctcgaatttccatcatatcacatcaaggttcacaggggaattatggccttcgcgtaaaggaaaaggaccagataaggatcatatcacatcaaggttcacaggggaattatggccatcgcgtaaaggaaaaggaccagagaaggatcatatcacatccaggttcacaggggaattatggccatcgcgtaaaggaaaaggaccagagaaggatcatatcacatccaggttcacaggggaattatggcctaagcgcaccaatgaataccaggaaagcactcatatcacatcaaggttcacaggggaattatggcataagcggaccaatgaatacaaggaaagcaatcatatcacatcaaggttcacaggggaattatggcgaggttggcgcaatagaaagacaaaaggcgatcatatcacatcaaggttcaccggggaattatggcgaggttggcgcaatagaaagacaaaaggcgatcatatcacatcaaggttcacaggggaattatggcgaggttggcgcaaaagaaagacaaaaggctatcatatcacatcaaggttcacaggggaattatggctttctttttaaatacaataaactgttcgtggatcatatcacatcaaggttcacaggggaattatggctttctttttaaattcaataacctgttcgtggatcatatcacatcaagggtcacaggggaattatggctttctttttaaattcaataacctgttcgtggatcatatcacatcaagggtcacaggggaattatggctataggtttcaccgaaatacaagttttcctatcagatcacatcaaggttcacaggggaattatggctattggtttcaccgaaatacaagttttcctatcatatcacatcaaggttcacaggggaattatggccaacagcaagttttgaagatcaatttacaaatcatatcacatcaaggttcacaggggaattatggccgccacaacaactctcccatcatcattattatcatatcacatcaaggttcacaggggaattatggcgtaactgacattatcaaaccgcaagtatttatcatatcacatcaaggttcacaggggaattatggccagccaccagtgacggaacagttagtgctgatcatatcacatcaaggttcacaggggaattatggcacatggctatcaacagttggcccgcgtacgatcatatcacatcaaggttcacaggggacttatggcacatggctatcaacagttggcccgcgtacgatcatatcacatcaaggttcacaggggacttatggcacatggctatcaacagttggcccgcgtacgatcatatcacatcaaggttcacaggggaattatggcacatggctatcaacagttggcccgcgtacgatcatatcacatcaaggttcacaggggaattatggcggaattgaatacttaccaaatgatattagcatcatatcacatcaaggttcacaggggaattatggcggactttaatactttccaattgatattagcatcatatcacatccaggttcacaggggaattatggcggactttaatactttccaattgatattagcatcatatcacatccaggttcacaggggaattatggcacatggctatccacagttggcccgcgtacgatcatatcacatcaaggttcacaggggaattatggcacgatgtaacatatatattacatatgatgaatcatatcacatcaaggttcacaggggaattatggcacgatgtaacatatatattccatatgatgaatcatatcacctcaaggttcacaggggacttatggccggcatcaattgaatttgagacaaccaaacatcatagcacatcaaggttcacacgggaattatggcggaaatgaatacttaccaaatgatattaggatcatatcacatcaaggttcacaggggaattatggccaggagtttaaaaacaatgtgaatagtacaatcatatcacatcaaggttcacaggggaattatggccggcatcaattgaatttgagacaaccaaacatcatagcacatcaaggttcacaggggaattatggcacgatgtaacatatatattacatatgatgaatcatatcacatcacggttcacaggggaattatggccaggagtttaataacaatgtgaatagtactatcatatcacatcaaggttcacaggggaattatggccggcatcaattgaatttgagacaaccaaacatcatatcacatcaaggttcacaggggaattatggcaatctctttaacatatctgtcaatcgcactatcatatcgcatcaaggttcacaggggacttatggcaatctctttaacatatctgtcaatcgcactatcatatcgcatcaaggttcacaggggacttatggcgacaattagttcataactcatgacggcaagatcatatcacatcaaggttcacaggggaattatggcaatctctttaacatatctgtcaatcgcaatatcatatcacatcaaggttcacaggggaattatggcgacaattagttcatacctcatgacggcaacatcatctcacatcaaggttcacaggggacttatggcgacaattagttcatacctcatgacggcaacatcatctcacatcaaggttcacaggggaattatggcgacaattagttcataactcatgacggcaacatcatatcacatcaaggttcacaggggaattatggcctgacgcagttcatgaacgcaagacctaaatcatatcacatcaaggttcacaggggaattatggcgacaattagttcataactcatgacggcaacatcatatcacatcaaggttcacaggggaattatggcgacaattagttcataactcatgacggcaacatcatatcacatcaaggttcacaggggaattatggcgacaattagttcataactcatgacggcaacatcatatcacatcaaggttcacaggggaattatggctaaaactataatttaattaaaaggagaatgatcatatcacatcaaggttcacaggggaattatggccaacattaaaagctgcagatctagtcaaatatcatatcacatcaaggttcacaggggaattatggccaacattaacagctgcagatctagtcaaatctcatatcacatcaaggttctcaggggaattatggccaacattaacagctgcagatctagtcaaatctcatatcacatcaaggttctcaggggaattatggccaacattaacagctgcagatctagtcaaatctcatatcacatcaaggttcacaggggaattatggcgacaaggcggactattcaagtggcgatattatcatatcacatcaaggttcacaggggaattatggccaacattaaaagctgcagatctagtcaaatctcatatcacatcaaggttcacaggggaattatggccaacattaaaagctgcagatctagtcaaatctcatatcacatcaaggttcacaggggaattatggccaacattaaaagctgcagatctagtcaaatctcatatcacatcaaggttcacaggggaattatggccaaaatggtgaagctgatgccaaaatagaaatcatatcacatcaaggttcacaggggaattatggctagtacagccgcatcactgacctaaatattatcatatcacatcaaggttcacaggggaattatggccaacattaaaagctgcagatctagtcaaaaatcatatcacatcaaggttcacaggggaattatggctaaaactataatttaattaaaaggagaatgatcatatcacatcaaggttcacaggggaattatggccaacattaaaagctgcagatctagtcaattatcatatcacatcaaggttcacaggggaattatggctagtacagccgcatcactgacctaaatattatcatatcacatcaaggttcacaggggaattatggctagtacagccgcatcactgacctaaatattatcatatcacatcaaggttcacaggggaattatggctagtacagccgcatcactgacctaaatattatcatatcacatcaaggttcacaggggaattatggctagtacagccgcatcactgacctaaatattatcatatcacatcaaggttcacaggggaattatggctagtacagccgcatcactgacctaaatattatcatatcacatcaaggttcacaggggaattatggctagtacagccgcatcactgacctaaatattatcatatcacatcaaggttcacaggggaattatggccaaaatggtgaagctgatgccaagatagaaatcatatcacatcaaggttcacaggggaattatggccaaaatggtgaagctgatgccaagatagaaatcatatcacatcaaggttcacaggggaattatggccaaaatggtgaagctgatgccaagatagaaatcatatcacatcaaggttcacaggggaattatggctccaaccgcacatcaacatccgggcaaaggatcatatcacatcaaggttcacaggggaattatggcttatatataccgcaatttcttcatcgtcagatcatatcacatcaaggttcacaggggaattatggccgagtttcattttgtaggattttaacgaaatctccatacaaaatcttgcatacccaaacgtgtcgttacgtgctaaaatgaatataaatctggcccaaaggaatgtaaataattggtaaaaaaatggcgatatagaacaaccattaaatcaagacctttcttatatacggagacaaaaaagttggcacaactactgttacagggatttaatgaattggaattaagagaagaagttatcaatcaaaatattttccaggtgaaatctgaaagtcgaaagagggaacttgcgtcaatcattctttccaggcttggtatgttagatgaatatcttacaaggtgtatcgttgaaggtgatgttgaaaccagtaaaaccgtggtgttgtacaccatcgtcaggacagaccgtttgttttacgagtttatgcatgaagttttcagtgagaagctcgcctttcaggaccctgtcataaccgattcggacttcaatacgttttttgaatcgaagcggcagcaaagtgaaaaaatcgccagttggaaggaatacaccttttacaagttaaaacaagtgtatatacgaattttgttcgaagcaggtttgctgctgaaccaaaaagacgatcgaaaagtcgtcatgcctattattaatccggatattatcgatcatattaaaaatcatgatgatccaagatttatccatgtgatagcgggaggttgaaaatgagaacgatagaaaagcgtttggatgagatccttcccaggataactgatccttcatttagggaaaataaaggacttggtaatgaggttggctatcatatattcgactatgaaccggaatatgaaatgcttgtacgggaacgtataaaattcatcaaagaatcggtcaacagtgatttaacagatcaaagggtaattgaatttgacctatatgaagtcgtactagacatactcggatccaaaggttatttgcagaaaaatttcgagatggaacagaagaaaggtagtgcgtttattctcaatgctatgcggaaatcgttgaggctgacgttgaataatgatttggtcatcaaatatatcgcggaccatgtcaaggaaaacgacattgtgttcataactggagtgggaaaggcctttccaatcattcgttcacacgtcatccttaataatcttcataaagcagtcggacaaatccctgtcgtcatgttcttccccggccgctatgatggacaagaactggtgctgtttggcgatattaaagacgaaaactattaccgggcattccaactagtagattattaggaggttcaacatgaacatacggaaaatgtttgaccgtaaaattgaccgtgatataaaaggtgttgttaaagtaggacaagatgccgatgaaaatatttatcaggaattggaagagtatgtcgtaaccgatgagctacagaaacatatcggggagttttttgcggcgtacaaggaagggatcaacgggccgaccgataaaatcggtgtctggatttccggtttcttcggatctggtaaatcccactttcttaaaattttatcgtatttgattgaaaatcggacagtgggtggtcaacaggcaatcgacttttttgataagaaaattaacgattcggccattttgtcagacttgaaacaggcaggcaatgtcacaaccgatgtcatgttgtttgatatcgatgcgaagagtgagtcggattcaatggcggacagggattccattgtcaaggtattgaacaaagtattcaacgaaatgcaagggttctgtggctcaattccgtggatagctgaaatcgaacggaatatgcataaggatggtagttatgtggcgttcaaagaaacctttaaggaaatttcgggtagcgactgggaagatgctcgggaggatttttattatgaagaagatgccattatcgaagcactctccagaacaacacaaatgagtgaagatgcagcaaggaactggtttgaacgggcagagcaggaatataccatcagtattgagcggtttgcgaaacgtgtaaaagaatacattgattcaaaagggggcaaccatcatgtggccttcctggtagatgaagtcggtcagtatattggcgataattcgcagtctatgcttaacttgcagacgattgtccatgaactcggtcgtcattgtcatggtaaggcgtggatagtcgttacaagccaggaagacattgattcggttcttagtgtaaagggtaatgacttttctaaaattcagggacgttttgatacgaaattgagcctgtcgagtgcgtttgttgatgaggttatcaaaaagcgtatcttaacgaaaaatgaagcgggaaggcagacgctggaagaagtgtaccggaagaatagctcaatccttcagaatatattaacctttacagatagtgctgacatgaaaaagtatacggatgaatccaattttatcgacgtttatccgttcgttccttaccaattcaccctgctacagaaggtgtttaccggtgtgcggattcacggtgcttccggaaagcatttagcggagggggaacgttccctgttaagtgcctttcaggaatcagcagt

SEQ ID NO: 2073 - DNA, 23234 bp, synthetic construct
  misc_feature 1..23234: note = Synthetic
  source 1..23234: mol_type = other DNA
ctgcttgctcgttttccgtcatttgaagtgtatgtttcatcaaacaaaatcttcattctcatcaccctccgttaaaataaaattacttcacataattatacaccaattagtggtccggggggacaggcttgatgtgacccaattagtttttaggatgactgtgggacaacctgtccctgtggacttccggggtttattcaatctgaatatctaaaatatcatgaaagtctatctttgtccgctcaaaatcattcatttttaaaaatttatcattgtaattgacgctataaattttatctttaatgatgaggtaatcgtgatcaccatagtacttaatttcaacctcaagatttttgctaatcacttcatgaagtttaataccaatttcctctagttgttgttcgtctaaaatcggctttatcttgttatccatgctatcccagtaatcatttatcatttgaatatgctccggcatcatcattgcagtccacttaatagttccacgatcattaactttgctcataattatgcagtcactctctttctaataggtccagctgaaagtatgttttcatggctaaacgttcgcactttcttacgcaaaaaacaaaaagcgataatcgattcatcgttaatatcaattaccttgataatcctttgagtaacattattattactgtcaatgtagaatatcattatcttttccttgttatccatcgaacgcataatcaatcctttcatactgatccctcccattttcagaacaaacgttccgaacgttagtttctattttaacacaaattaaatattttatacaaaggtattttttgttataagtaaaaatgattgatcaggaggtgagagtttcttgttggatattcatcattttttcttattacaatctaacatccaactaagccacatattgagaagaagcggtaactttaaactaaaggggtccattttgaggtcatattaattaaatgacagaccaactggcgtatgaattggcatacgttagttttgttgctatttcaacgattgatggttaaattaggttttttgggcattcgaatatctcatttattttttataggacaatagatattgtacatagaaaaactggtgtcaatttagagcaagtaacgttatatacttaacacaaaaaggacctctattaagagatcaaagtatcatgccccggtagctcaagaacttaaagtaataataacgtaattttctataagtgtagaaaaacaaaaagatcgtactggacgatcttcttgtttaactatcgtaccagtttgttgattaagatttttcaatcttttcacgcaacaaaaaatagtatgcatctttatcatatctttagtgagcaagtactgaaataaccattaccagtttaatcctttcttgactttgattttaacgaagcatttcgcataataggatatgataataataatgctccaacgctacataagcctaataacgtaatcaatgtcattcccaaagcatctaaatctaatcctaaaaaccattccatactatcgcttaaataaccaccataatataaaaccatgaaaatagctgacaacaacatgagaatcatgatactttttcgaaatcccaaacgaaagttaatactatatagtagaaatggcactccgaataaaaagagtccaaacataaggtcaatccataaataagcgaagaaatgataaccatctactaagaatactccaggatgaaaaatattggctttaatttcccattgtagatatacagtttttaaaatatattgcaatacatttagaattgtaatgcatataacaactgctgaaatacctacaccataatagactttgagcagttgtacccttgtacttcccatgccaatcgctactggatacagtgttttatatccatttattgcaaataatgcaataaagaaatacgtcggacctgatatcgaggcaaagacatcctctccaagtccaaatatatatccgataattacccataataacgtcactggaatagtaatgtagagcaacattaatttccctaaataaaataaggcatcctctgatactaaacgaaatgttccatataaagaattcatccttactctacctcctcggtcttatttaacaaataatcctgtagtttcactttttcaattgaaagtccatgagaagatgcagtttctttccatttttcattaaaaggtacgtcaaccattacttttaatctagatcctaatttacttacttctaaaacattttgaccatcagtcacttcttcaatcttatctttgcctcctgctaaccagattccatactctctcatttcatcaattgatccatgtatgaatgctcctttatcatgaataacaacaattgaatcacaaatcggttggatttcttcaatatgatgcgtagatattaaaaacaatcttggatgttcctcctgactttctcgcaaaatttgatacattttcttacgcatactagcgtctaatccattactaggttcatctaaaattgtgatttctgcattgctagaaattccaatgatgaactgtaaagcagatttcatcccctttgataactttgatattttcatcttgtcatggagcttaaagatctttaaaagtcgtttagccatatccatatcccaattggaataataatactgtccaaaccttaatgcatcctttacattccagatgttattaaatggatgctcctcttgcatataacatacatattgaacaacttctgcacgattatagggagccgttcccatgatctcgacaattcctctgtttggcttttcatgcccagcaagaagtttcattagtgtcgttttcccagccccatttcgtccccaaatagcagtaatcccatgttcctcttcattgaaagaaatatcctcaagtattggttcctctccatagctataggtaacattctcaactcgaatcatctcccttcctcctcttttattaatgtcatcacagtctcaacactcattcccaatcgctttgcttcttctagcagcggcaatatatattcatttcgatactgttttttcctttcgtctaacaattttgttttagctccttccataacaaacatcccaattccacgctttttataaatgatttcttcatcaaccaaagtctgcagtccttttctcacagttgccctattgatgttataaaaatttgatagttcattttcagatggaactttttcgccttctttaatctgtccttcaacaatgtcatttcttacgatttgtgcaatttgctgaaagatgggcagtgactcatctaatactggcttcaacaagaacactcctttcttttcctcagttttgctcatgttgattgtatggttgtatacttgtgtaaccaactatacaataactatataattttgtaaatgggtttttgttcaatacatggtggtttctttaagaatttctgctgaaaaattggatctgtcgattacacaaaaaaacactgatccatccaataacttgaacgaagtcagtgcttttcttattctggtgccttacttgaacagataaagagtattccatttatttgcaatggtttaataaagttaattggccttttgtttacccatgtcattataatattaaaagccgtctaaattaaaaaaattagacgacttttaattgccattttaacggtcaattttaatgtcattaggggtgtgctttttttgaaaatgcacctcaaagcggaaccctttaactttaaacaatacctgcttttattcgtttaattacactagattcgggaattaaatgaatagaaggagaggatatccattgagtcataaatttgatgaattaaaaaataagcttaagaatgtagacaaagagcaggcaggacatttggtggaagaagtaagagaagcacgcgaagatggtaaaatagatgaaaatgaaaagaataatttaataaattctaccagagatatggtaaaagacatggatttcaaagggatatttaacaaataagtaaaataaggtgtactaagtagaaagtaatataataataaagactgaacggtgcggttgcacagtctaaccagttgtaatagcccttcaataggcgactaacaaatattagagaataactaccctaaaatgctcgtcagggctcatagggtggttatttttttgtgaattttattcagattacatgtatccttagtaagtaattgcttacttattacaatcatatagcaataggtttaaaattttatgacaattagccgatataactaaaggaggaaattaatggataagggggcggactatgtttttgcagctatttaaaaagaaaaaatataataaacaagctaaagaactaagagatgaaacaattcctaaaactaaggtttcaaataaagatattaacgatcagattgcagttcgcaagggggaaattggtgaatacaaaattgatattcaattagatcaatttccaaaagaatataagcatctgtcggatatcatggtgagaaaccagaaatcaagttcaggattttcacaaattgaccatatccttatatctccgtttggaatatttgttattgagacaaagaactataaaggaactatttatggaggaaagaatcgtaaagaatggtcagtaaacggaaagtttaaaatgatgaatccttttactcaaaattatggtcatataaaagtgttgaagagtatgatagatagcaaatatcatgataatttcatttctattgtatcttttacgaaacgttgtacatttaaagttgatttagaaatgagaaaaatcacatccaatgaattaatcgtctacgatgttgaactatcagaatttattaataggaaaattaacgttcttaaattacaaaataagaattcagtaattagtgatgaagagattgaaagtatttataatatgttgtctgatgctaacattactgagaccgaacttatagagaagcacaaaagtatcattgtaaaaaagaaagaagaaaacgatgcaaagaagaacaatcagggaacacataaatgtgttatgtgtaataaaccggtatcggaaaaggttgctgctttttgtctctcaaacaaaaaatttgcaggaaatatttattgttatcagcaccagaaaaaaatataaagttaaaaaattttggggaaaagatggggaaattcgaaagcaataatgaatacataccctttggaagtaaacttaacaaattacataaagttttaagtcatataaagaagatagtcttaggacttttttcaaaaaaacagctagagtttaatgtcatgaaataagctgctggaattcatggagaacgttgcgacatgcattttaaagatgaaaatcaaatgacagagctacttcacatttcatttgtggacgatgagcgtgaggctgtccctgatatagacaaagcggaaatggatgaaataaatggagctactactggaactaagggtttgtcagaactccatttgctaaggagggatatttggacaaattttgttcagtagtgtcgtaaaaacggacgtggtgaagatattgctatccgaaagcgatcgtacgacgtttggtatgatgtaacagtaagtagtccaaactatcatttgttttttcaaagtttgaatcgaagaaaaactgagattgaaaaggcatgtgggttttcccttgagtggtataccagtcggaaaagcagtgcagcaaaaagaatcttatattcagttgaagcagatatatacaacccagaattgtatatttagcattttgaatggcttattgatcattttgatagacgtagaaggcacttgataacgaggaataattaggtatagggaatgtttatagtatgggacgatgaagcctgtccccgtggaccttttagtctagtctggataaaagttaagagtgaagcaacaataaagctcctagccagtgaaggctaggagctctattatttcattcttatttaaaagttacactaacttcagcatcttcttcgtaatccatattatcccagctaaacacatgaagtagcatttcaaaatcttcatcaagtgaagggagatcgccgccctcataatcttgaatggtcagaaccgcatctgccatctttccgcctgcaacttcagtgctcatactaagtaacgcttcatcaaccatttttccgttaatagatacttggcgagcctggaattccactgagtcatcacgtttattttctacctcaaatgttacttcgattttttcttcatcccaggcttcatcatagattctttcgatattgattaaagttgctttaaagttttcattatctgccatctcttggttgaattcataaagttcctcattagatgcttcctcattggcagcttcctctttttcttctcctgaagattgttcagtgctgttttcttcagcaggttgatcagatgacgtacctgaatcactagcaccacaagcagcaagtagtccaactaataatataataattcctaagaatgatacttttttcatgggtcttttctcctttttatgtattatcataaatatatcatagatatttgatgaaatgaagaagtttaaaaattgggatgattaaaataagaaaaggtcaaaaataggggactgacaccgaagttcataagcctgacataacagtttgaggagaaagcttctatgaaagtcccccccaaataatcccttcaaaacccgaaaaaaccaccctattaaaaaaactttcaccatttacaccccctattcccaacttctttcgattgtagaagtgaagggagggaaataggatggaaaaacgaacaatgtcagttgaagatgtagcaatctatttaggactacataaagacacgatttatgatctcgtaaaagaaaaaaagattccccatatcaaaattggcggaagaatctttttcttggaagaagtcctggaaaaatggatgctggaaaacatgaggtgaatagctggattcggaaggttaactttcgaattgcaatttgcctatttggatttgcttttaagactttggtaaggaaaaacgcgcgtgaaaaaaataaaaatcttaaggagatataaacatgacaacattcaattttcatagggacaaaaactttttaatggattggttgatgctaaatcatctgactacgggagaaattgtgctttggcacacgctgatgaacattggaaatagactcgggcaaaggagtgttttcaatgcgcctaactctacattgatgaaatttaccggtctatctaaacaggggatcatcaatgcgagaaagaagttgctcgaacgaggctttattcgttatgaaaaggggcaccaaaacaaggcacctgtttatgaaatgattccattacctcaagcaatcggaaattatttttctacgactaaaaaccaggagttgacccgggacttgacccaagatgttacccgagactttaccctgaaattgacctcggacttgggccaagagttgcctatacataaagataaaagtaaaaaagagagaagaggaagaggaggaggaagcgggcgtgacatgaatcaacttttcaaaatctatgaagaaaatataaacaagctaaccccattgattcgagaagcgttgatggaatggaccagcgcaacaggcatagaaatcgtcaaagaagcaattgccataactgcgaaaaaaggtggccgaacatatagttacaccgaaaaaatattgaaagaatggcagaatgctggattacagacaatcgaagccgttcattcctatgaacttgcaaaagaattagaaaaggataataaactcattccatttcgcaagccagacaataaaaaacaagaagaagatatatttgccgaacttttaaaggaggaattttaaatgttacaacaagaagcgattgaagtgttaaagacgattaatgaaatgtatccaaagtttaatctgacaaagcgcaaggctgcgatgttacttcctaacttgaaggaaatggattatccaggggtcatgagaaatctttctctatttattatgcaaagtccttatccgccgatgcttagtgaaattgcagcttaccctgaagtggcagattcgcatatagaagaaatgttgaaatggcatgaggaagcggaaaaagttcctccagaattgaagaagcaacttctagaagcgtttgagaaattagtagagaagaaggcagggaaatagggatggatacgtattatgcggaaacaagtatactaggatcgatcttaatcgagggcacgctttttaaagaattagagattaatgagatgtactttacccacaataaacatcggcaaattctcttagcgatgaagcagggatataaagaacgagaggttgttgatattgtcattgtaacaacggttttaggagataagattgaggaggttggtggggtcacgtatctcaccgaactcgctgaatccgtaccaagcaccacaacgtttaaacattatcaacagattcttattgacgcataccagctacgagaggcccaacatgccatccagcagttcttgagtaatccttccaacactggacttgaacgtttgctgcaggatttacaggcatgcagggattcaactctagcaaaagaagaaaaaagtacctatgacaacttggttgaaataggggaggaactgatgaagcctcgtcctgagaacctaggctatctcacgtcactcgcatcatttgaccaaataacaggaggactaaagggaggggatttgattatccttgctgcaaggccatccgttggcaagacagcattcgctcttaatctagcatcaggacattgtaagaatggaggttcatccctcatctatagcttagaaatggggacgaagcagctattgaaacgaatgatttctgcagaaggtatggtaaatgcgagtaaatggcatgatatcagcaaacgttttacaacaaatgattataaaaacgcgatgcgcgcaatcggagaaatgacaacttgggaattagaaatctttgccacaaagcacaccatctccgaaattcgtgcgggaattcgcaaacaagtacatgagaatcccaaacaaaatcatctggtgttcatcgattaccttcaattgataaaaccatccatttcccaccgtgatcgccgggatttagaaatcggtgagatgacacgggaacttaaattgctagcactggagttgaacatcccaattgtactgctttcccagctgtcacgcagtgtggattcaagacaggataaacgaccactcatgtctgacttgcgtgagtcgggaaatatcgaacaggatgcagatgtcatttctttcttgtatcgtgacgattattacgataaacgaagtaaacagaagaatgagatggaggtcattatagcgaaacagcggaatggacctacggggacggtgagggtggagtttttgagggagtttggggtggtgagggaggaagtgggggttttgtgttgataggatgaaagtagggaaagggctggttttctattattctaatgtattagcttaatagagactagaccaaggtttgggagtcagtctcccgctttacttaagcattaatgctttattagactagagatagccactaaaaaccttaaatttatttgttgatttatttattagaaaatattgacaaatacctagggatattgtactatatatttaacgatcttggggaaggtcgttaaatcatatcccatcaaggttcataggtaagttattatggtaaggcattaagccgtggcgttggggatcgcctaactctgcaagctttgcggagttccccacaacaaaaatgatgactaaatgcatttagtcattttttttatatctaaaacgggtttaaagaactaaaaatacataatttagggtgattctaatgaggtatagcattggacttgatattggaatttcatcagtaggctgggctgtgataaatctagataaaaatcgaatcgaggatttgaattctagaatgtttgatgcagcagagaatcctaaaaatggttcgtcattagctaccccaagaagagaagcaaggtcagctagacgaagattgagaagaaggcgttacagggttggacgtgtccgccaatttcttattcaacaaggtctattatctgaagtagaggctaatcagttatatgattggaaagacggagatttggatatttggctgattagagtaaatggtattgagagaaagcttacagatcgtgaatttgctcggattttaattcactatgcaaaaaatagaggatttaaatctaatcgcaaaagtgaaacgaaagaagacgagggcggcgttctattaaaagcagttaaagagaatgctagcttaatggaagaaaaaggatatcgtactgttgcagagatgttagttcttgatgataaatttagtggtaggaagcggaataagggtggcgattactcgcatgtcctagcgcgcagtgaaattgaaaaggaaattcgcgaagtatttagtaatcaacgtgaattaggacatagttttgctacaaaggaaaacgaagagacgtacataaatatttggggttggcaacgccctttttcaacacaagaggatattgtaaaacgaattggaaattgcacctttgagccgaatgaaaaacgtgcaccgaagttttcctatacgtttgaaaagttccgagcactggataaaattaaccgcttacggattatttcagacagtaaacctcagcgtcctttgacacgtgaagaaaggctactaacattagaaagtatattaaataaaaaagagatcaaatataaagatcttcgtaaaacattgcaattgcaggaagatgagcgatttaatgaattgttctacgatccaggtgaaacaaacgagaaaaatgaaagtaaaaaatttgtttcggttgatggatactatcaactgaagaagattattcatgatgtcgaaggaaaaacacttgctgaatcgtatcgtccaattgattatgatacgattgcctatgctgtcactgtatacaaagatgatcatgatgcccgtgattatttattaaacgattatgtgaatgaaaatggaaagcgaattaataaccttgcaaatagagtgtatagcgaagagttaattgaacaactattaaatctatctttctcgaaatttggtcatctatcgttaaaagctttaaataaacttataccttatttggaagaaggctttcaatatcatgaagcatgtgaagaggcaggctatcattttaatcaaaaaataggtacagaaaaagcgaaaatccttccagtcataccagctgataatatagctaacccagtggtcatacgctctttgtcacagacacgtaaagtgattaatgcgatcattaaaagatacggatcacctacagaaatttatattgaattggctcgagatatgggaagacattataccgaacggagagaaatagaaaagcaatataataaaaacagattggtaaatgaaaaagcgaaagatcgcattcaggagctacatcctgaatttagtgatccacgtggacatgatatattgaaatataagttatgggaagaacaagatggtcgatgtgcatactcgctaaaacctatcccgatggatgatttattcaatccaggctatgcggaagtagaccatatcattccgtatagtcgtagttttgatgatagtaatgcgaataaggtattagttttatcgaaagaaaatcaaaataagaaaaacagaacgccatatgaatggtttggtagagatgttgtcagatgggataaatatacatcgtatgtgaacacattaaaggttcggaaaaagaaaaaagacttgttactgaaacagaactttgatgaagaacaagcagaaacctttaaatcaaggcacttaaatgatacccgctatattacccgctttttgaaaggttttattgaagataatttacagtttagggaagaagatggtcgaaagcagtatgtatatacggttaacggtgcctatacttctttaatgagaaaaagatggggatttaataaaaacagggaagaaaatgatctgcatcatgcactagatgctgcaatcgtggctgttagtctaccattcagaaatcgcgttagtaattattttaaacatagtgaattacatgcttcccaattattaaaaagagaaggggaacgattcccagaaccatgggaaggatttacaagagaattaggagcaagaatgcttcaaaatcctgagaaattaatcctagcattagaaagtttatcactagctagttatgatgaagaatttattgagcaagttaaacccatttttgtttctagaatgccgaaacgatctgttaaggggcaaattcatgaggaaacaataagaaggcatcgagggtttacagaaaaagggttaaatttaatggtaaagaaatatgctcttgcagatattagatttgataaaaatggggattttccaatgtatggaagggaatctgatccaaaaacatatcaagcaatcaaaagtagatacctagaaagtggaaaagatcctgtgaaggcatttagtacaattttatataaaccgtctaaagatccagaaaatgccccaatcataagaagtgttaaaatagaaacgactgcaaatcaggtatttcatttagatgataagacagtagctgacaatgctagtatagctaggacagaagtattccggcataaggagagcgggaagttttatttggcccctgtttatgtgagtgatgttatggcgaagagagtgccggataggtttataacaccccacaagtcttacggaaattggataagaataacatcagattatgaatttcaatttaatttatttccaaatgatttgattaaggttagaacgccgcgacaaaaattatcgaaaactaatagtggtgaaattgttaaatggaatgaaggagttttttattttaaaggagttcactcgtcaacagctcaaattaatttaactgaccatatgaatagtttcaaagacactcttggttcgcagggattagaggtatttgaaaagtaccaaattgatccattgggaaatttaacaatggttcataaggaaaaacgttatggcttttagacatcttgttattcgtaatccagcaaaattgtcaactgcaaatgaacaactcgttattaaacaagtagaatctattaatataccattagaagatattgtaacgataacgttagaggatccggcaattacgattacaaatgcattattgagtaaatgtacagagtatcatgttgaacttattatatgtgataggaaaagaatgcccagtggaatagtgcaaccattccacaggcattctagacaaaagacagtattggaaatgcaattgtctttaagtaaaccgtacaagaagagagtttggcaaaaaatagttattcgaaagttagagaatcagtcaagatgtcttgaattgattcataaaggcgaagaagcgcaaaaattgtatgctattagtagaagtgtggaatctggtgatcgcacaaatcgtgaagcatatggtgctaaagtctattttgaatcgctctttggcaaaggatttcaacgacgagaagataacgtttataatatttccttgaattatggatatagtattattcgttcgcttgttgcaagagctttaattcgctatggatttacaccaagttttggtgtgtttcacgatagccagacaaatgcatttaacttggcggatgattttatggaagtattaagaccttttgtcgatgtattaattgcaactaatgtttcggatgaatcggaatggtcccccgaaatacggaaaatgttatttcaagttttagacattgaagcaatatggaaagaagagagattaagtgttacccatggagtcgataatatgataaaaagttttgtatctgcaagccggcagcaagatgcaaatatgataacacttcctgaacttacaaatttggctgtacatagatatgagtaggtatatgcgaataattgtattttttgatttgccggttttacttccaagagaaaggaaagcatactcaagattccgcaaatttcttttgcaagatggttacacaatgcttcagtattctgtttactcaagaatttgtaatggggaagatggtgtgagaaagcatatgaagcgattacgtgaaaaccttccaccagttaacggggcaatacgagcaatgaaaattaccgagaagcaatttgaaaatatggaaatcttattaggaactactactccagaagaggaattaggcgcaaataaaatagattttttttaaaaaaatacttgcaaaaatttttgcaggtattttattctgttttattttatgaaaaaagtaaaataaattattaatattagctggtttaacttatgctttataaaaataagaaacccttgaaatggggaagaatcaagggtttcaatgccatgtatcatatcacatcaaggttcacaggggaattatggctgttgcatttacgcctttacgtttagcctgatcatatcacatcaaggttcacaggggaattatggcctaagaaacagtgatgtggatgcaattaaatcatatcacatcaaggttcacaggggaattatggcttatcttcattgatagttgctggtttttctaatcatatcacatcaaggttcacaggggaattatggcttacccatttaagcagcactccgatgatggatcatatcacatcaaggttcacaggggaattatggcaaggcaaagtgaatagtaagagtgtttcaatcatatcacatcaaggttcacaggggaattatggcttacactatgatacactagattatctaaaaatcatatcacatcaaggttcacaggggaattatggccctttccgccattagttaaaattttcatgcatcatatcacatcaaggttcacaggggaattatggcgccatgaacaacttgaaacaagagaacgtaatcatatcacatcaaggttcacaggggaattatggcaggacattaaacattgatgaagcattggaatcatatcacatcaaggttcacaggggaattatggccatagataaacatttagcgttttggttgaaatcatatcacatcaaggttcacaggggaattatggctatggcattgtattgttcgctgaacggttaatcatatcacatcaaggttcacaggggaattatggcttctgtatgcaatctactttacttaaattgatcatatcacatcaaggttcacaggggaattatggcaggtcattaaacgttgatgaagcattagaaatcatatcacatcaaggttcacaggggaattatggccttcacgacaaccattaccagaaaaagataatcatatcacatcaaggttcacaggggaattatggcgaagcagacagcaacgatgagcagatagaaatcatatcacatcaaggttcacaggggaattatggcccgaatattagtgtctcctgcatttgggttatcatatcacatcaaggttcacaggggaattatggctcaagattggcacgtctcttcaatccttttatcatatcacatcaaggttcacaggggaattatggctgaatgcaaacaaaccaaagaaagttgttgatcatatcacatcaaggttcacaggggaattatggcataaaattgaattggaaaatttggatctttatcatatcacatcaaggttcacaggggaattatggctctaagttgtttggcattggttttgtagtgatcatatcacatcaaggttcacaggggaattatggcgtatatgtggaagggttatgtgtatcataatcatatcacatcaaggttcacaggggaattatggccaactacaatcccctcgctttcaaatcttcatcatatcacatcaaggttcacaggggaattatggctctatctttagtaataatagtcaatcaataatcatatcacatcaaggttcacaggggaattatggcatgaaataggtgataacgattatgaaaataatcatatcacatcaaggttcacaggggaattatggcaaacagtacgacgcatttcaatactatgttatcattttctgttcattttttgtcaaaatgaactaaaatatataatgattttcattttattttgtcgtgaacccttaatatggtgaaagtaaactatacacattttcattcccatctataacatgataaaatagtacaagtatcaatagaatttcggaacaaaggaatggttaatttggaaaaagaattacaataccgttcaacaataaaatctaagccttatttttatttagagacgaagcagctttcgggactgatcgtacaaggtctaaatgaattagagataaacgaacatgtaatcaatctaaatatatttcaggtcaaatctgaatcaagaaaaaaagaaattgcatcaacaatcctcaaacgattaacagcactcgatacatacctcatcgataaaataatcacaagtgacgttgaaacaagtaaattaatcgtcctttattccatattgaagacggacaggctgttttatgagtttatgcatgaaatatttcgtgaaaaaattgtttatcgggatttgcaactgacagatcgtgattttcatacttattttgaggcaaagcgccaacaaagtgaaactgttgcagaatggaaagagtataccttttataaattacagcaagtatacgtccgcattttatttgaagcaggcttattgaagaaccaaaaagggaatcgtgaaatagagattccaattataaatccagatgttctggaccatattagaaatagtgatgatgggcgatatattaatgtgatagcaggagaaaaatagaagggacaaggcaggaaccaaaacctttgtcctccttaaaagtaagaggagagagaaaaaatgaaaacaatccatgaacggttggatgagattctacccaaaattacaaatccatcgtttagagaaaataaaggactcggcaatgaggtaggataccatatttttgattatgagccggaacatgaaatgatcgttaggaatcatgtggaatttctgaaagatcgtgtgaataatgatgcttctgatcaaaggattaatgagtttgatctttatgagctgatgctagagattttagatggaaaaggatatttgcggaagaatttcgagatggagaagaaaaaagggagtcagtatgtcttaaatgcgacgcggaagtcattaaggctgacattgaataatgatttagtcattcaatatatagcggagcgtgtcgaaccaaatgatattgtctttattacaggaatcggcaaggtttttccgattatccgctcccatgttatcttaaataatttatataaagcagtcgatcagattccagttgtcatgtttttcccaggtcgctatgatggtcaggaacttaggctatttggggaaattaaggacgataattattatcgtgcctttcaattggtagattattagggggaaattagtatgcatataaaaaaaatgtttaatcgtcagatcgatcgagacattaaaggtgtcgttaaagttggacaagatgaagatgcaaatatttatcaagaattagaagagtatgttgttacaaatgaattacataagcatattggtgatttcttcgctgcctatagtaaagggattgaaggttcaacagataagattggcgtttggatctccggtttcttcgggtctggtaagtcacattttttgaaaatattatcctatttgattgagaacagactgattaatggtaaacatgcgattgatttttttgacgataaaattcatgatccagtgattttagctaatttgaaaaaagcaggagacctgacaacagatgttgtgttatttgatattgatgctaaaagtgaatctgattcaatggcagacaaagattcgattgtaaaagtattaaataaagtattcaatgaaatgcaaggcttttgcggtgcgattccttgggtagcggaaattgaacgtaacatgcaaaaagatggggtatacgatagatttaagtcaatgttccaagacatatctggtaacaaatgggaagatgcaagggaagacttttattatgaagaagatgcgattattgaagcgctttctaaatcaacacagatgagtgaagaagcagcaagaaactggttcgaccgagcagagcaggattattcaataagtattgaacgatttgtgaagcgtgtgaaggagtacatcgattcaaaaggggagaatcaccatgtcgcgtttctcgttgatgaagtcgggcaatatattggcgataactcaaatgcgatgctcaatttacaaacaatcgtccatgaactcggtcgccaatgtaaaggaaaagcatggattgctgtaaccagccaggaagatattgattcggtgttaagtgtaaaaggaaatgatttttcaaaaatccaaggtcggttcgacacgaaattaagcctgtctagtgcctatgttgacgaagtgattaaaaagcgtatcttaacgaaaaatgaagcaggtagacaaacattagaagaagtgtatcgcaaaaaaagctctatcttgcaaaatctattaacgtttaccaccgaagcagaaatgaaaaaatatacaagtgaagctgattttgttgatgtgtatccgtttgttccatatcaatttaatttactgcaaaaagtatttacaggcgttcgtattcacggggcatcgggtcgtcatttggcggaaggggaacgttctttgcttagtgcattccaagaatccgccattcgttttgctggtcaaacggaaggggcacttgtaccgttttctacattttatgaaacaattgaaacattcttggatcacagtatccgaagcgtaattattcatgcaagcaataatacgaaattagaatcttatgatatcgaagtactaaaagttctcttcttaataaaatatgtgaaagagttaccagccaatttagaaaatatcgcaacgttaatggttgatcatattgatgtggacaaaattgaattgaagaaaaaaattgaaaagtcattatcacatctcattggtcaaacgctgatccaaaaaaatggtgaggaatatattttcttgacgaatgatgaacaagatgtgaatcgtgaaattaagaatatgcatgttgaatcttccgaagtaattcagaaaattggcgaagaaattttcgatggcatttataaagatcgtaaatatcgctattcggcaaaataccattttgcttttaatgcatttattgatgatcgtcctgttcgtacccagtcaaatgatattggtattcgcgtcattactccatatgccgatgcagcgatggactataatgcttctgaactgaagatgatgtcgatgagggagaataatgtcatagtcaaacttccgccggatacaacttatctagatgagatggaagaaattttaaagatacaggcctatttaaaagtaaaaagtggaacatccgtgtcacaggctgtggaagatatcaaagtcagaaaaacacgagaagtgacagaacgcagggaaagaattacgacctacttaactgaggcattaagatctgcggagatttacgttaactcgcaagttctagagattcagaagaaaaatccagtcgaccgtatcaatgatgcatttcgcatgttgattaaaacgctattcaataaattagaccatataattgaatttgttgatacaacaaaggacttacaagacatcatcacagcgtccacacaattaaccatggataataaaaatgaaccgaatcatctcgccatcaatgaagtggataattatgtggcccggttaacgacccgaaatcatcaaatgacaatcaaacatttgtcgacctattttgccaaacagccgtatggttggctcgagttagatacgacggcattattattaaaactatttaaagctcaagaaattaagttgcagctaaatagtagccagattcagttaaacgatccgaacatcattcaatatgttacgaagcgcgattatgtggatcgagttgttgttaaaaagcgcgagcgaatttctgagttacttcttaaaaatgcaagggatctatcgaaggaaatattcggtatttctgccttaccaaaagatgaagatggtttgaaagataaatttaatgaattgctcggacgggaaaaagacaagctcaacgatttattagcgaactaccgaaacatgtactatcctggtgaagctgtattaaaggatggcttgcagttaattgaatcattactcggtataagtgatacggcgacatattaccagcaactccgaaaagttcgccaagaattaaaagcctatgccatgaatgcgaaagaagtaaagggattttttgaaaaccagcgggatattttcgatgaagccatgaagcgaatgaagatttttgaaaataaccgcacctatattacggataaaacgatggtcgaaacagtggaaaaaatacaagcaattgtgacccgttctgaaccatatgacaggatccaggaattaccaggactgtatcaattgtttgatgattattttgttgaaatattagagcgtgaatgtgagccagtgaaagaggctatcgaagaagacttacaggctgttatgactgaacttgagaaagaggatgcttggaaagaacaattcgcaggtacttttcgtgcaagattccagacgcttttggaccgacttgatcatgtgaataacttatatgaagccattgctatggaggtcgaaagcgatcggttgaaagtccgctgtatccaggaaatgatgcagtataggccagaaactgttacgccaccagttgatccgggaacaagtcctgctgtacaggtagacaagccggttattagggagcgaaagacgaaaacacttagtaaaaataggatcatcaaaggcacaaaaacatttcaaacgaaacaagatatcgataagtttgtggaagaattgagaagtgagttgttaagtgaattggaagaggatacgacgattaatttggtttaataaaagtcataggaataaattggaggtatacacatgaataaaggtgccatcaagaagtttgccgtcactgccagaaaaaaactcatggaagcagtggcgcaaaaagcgtttgaattaggcattacgaaagatgtgattaaggaagctgaaatctatcaagacggtttcttaatcaatcaaaagttttataaacgatatgaaatcaagcaacgtgaaaagctcattcgtgaaatcgagatcaaaggttatgaccaggtaattgaagaagtagcttatacatggtttaaccgttttattgcactaaggtttatggaagtgaatgactatttaccaactggggttcggattttctcctcgattgaagaagggaaaacagagccagatgcgttgacagaagtgatgatgctcgttgatgaattggatctcgatgagcaaaaagtgtatgaattacaagatgccaatgatgatgaggatttgtttaaatacatattgattaagcagtgtaataaacttggtgagattatgccgatgatgtttgaagaaatcgaggattacactgaattacttcttcctagcggtttattagcggaatcatctgttatcgatgatatggtgacgatgattgaagaagcggactggacagaagaggtcgaaattatcggttggctctatcaatattatatttctgagaagaaggatcaggtttttgctgatttgaagaaaaataaaaagattagtaaggaaaacattccagctgcaaccgagctatttacaccaaaatggattgtgcaatacatggttgataattctcttggtcgtttatggttagagtcccatcccaatcctacattacaggaaaagcttccctattatttggaagctgctgaacagcctgaaagcgttgttgaacagttgaatacacttaaggatgcaaatttgaaacccgaatcgatcacgtttttagatccgtgcatgggttctggtcatattcttgtctatgcatttgaagtattctatgacatgtataaatcacaggggtaccgggaacaagatattccaaagttaattattgaaaaaaatctgtacggattagatattgacccacgtgcagcgcaactcgcttatttttcggtgatgatgaaagcaagaagttatcattatggcctgtttgatacacaaatagctacaaacttatattggatagaagaaagtaaacaaattaccgaacaagatgtggatatatttgtcggagatacggagttaagaaatgatttaaccgtattgctagatacatttagagacggtaaattattaggttcaattattgaagtacctgagattgatttgcaggctttaaaagatcgagttttttcatttaatgaaaatgagatagatgacatgtttgccatcgattttaaggataataccttgccaattatcgaacagttgattgggcaagcgactgttcttgcgagaaaatatgatgttgttgtgacgaatcccccttatatgggtaatagagggatgaatgctgaactctcctcatacgtgaagaaaaactataaaaattctagtgcggatctttatgctgttttcatggaagttgctagtcaatctgtaaaaaaacatggattcattgggttagtaaatcaacattcatggatgttcatatcatcatatgaaaacttaagatattcaatgctagaaaaaaatcaaatattttcaatggcacacttaggtactagagcattttcagaaatcggtggcgaagttgtacagactacttcatttataatgagagagggtaatataccaaattttatagctacatttgtacgtttaactgaaattactgatgcagaggaaaaagcaaatagatttggggataaagagatatattatgaaaaatctcaagatgaattttctgatattccgggttcaccaatagcgtattgggcaagtaatcaggtgagaaagatatttaaatctagtaataaaataggggaggtag

SEQ ID NO: 2074 - DNA, 23234 bp, synthetic construct
  source 1..23234: mol_type = other DNA
  misc_feature 1..23234: note = Synthetic
gctccgtttacaaaacataactatgaattcattactgtctttaaggagggaaatatatgcgtaaaatcagtattttaaaaatactccttttacttgtattgattggtatatccatcatcgtaagtagtgaacaaacaaaaaatgtacaggccttttctaatcaagtcattcaaagaggcgcatctggggaagatgtcatcgaattgcaatcacgcctgaaatataacggatattatacaggaaaagtcgatggtgtatttgggtggggtacatattgggcactgcgaaactttcagcaaaaatttgggttaaaggttgatgggctagcggggccaaaaacaaaacaaatgcttataaaagcaaccaaatatgagaaatcgactggtggcggcggacaaagtagtaagccggcgcaaaacaaaggaaccaatgttccaaatggttattctcaaaatgatattcaattaatggccaatgcggtctatggtgaagcaagaggagagccgtatatcggacaagttgcagttgcagcggtaattttgaaccgtgtaacgagtccatcgtttcctaacacagtttcgggtgttatttttgaaccgcgtgcctttacagcagtcgcagacggacaaatttatttaacgccgaatgaaacggcgaaaaaagcagtattagatgcgataaatggctgggatccaactggaaatgctctttattatttcaatccagatactgcaacgagtaagtggatttggagtcgtccacaaatcaaaaaaattggtaaacatattttctgtaaatagagcggaggtggaaagatgttacgaggtattatcattgtactattaacaattggtgtcgtggggacaggatattgggggtataaagagcatcaagagaagaatgcggtattgattcgagcagagaacagttatcagcgagcattccatgatttagcatacgaggtcgatttattacacgataaaattggaacaactctagcgatgaattcacgctcttctttatcgccagcactggcggatgtatggcgtcttacatctgaagcacgatcagatgttggacagcttcctttaaccttattaccctttaataaaacagaagaatttctggcgaatattggtgactttagttatcgcacggctgttcgtgatttagaaaaagagccactcaatgaccaagaatataaaacgttacaaagtttatatgccaatgcaaagaatattcaagatgaacttcgcaaagtacagcatcttgtattgaaaaataatttacgctggatggatgtagagcttgcgcttgcatcaaataaagatccagccgataacacaattatcgatgggctgaagacagttgaaaagaatgtaacatcatatgcttcaacaaattttggacctacttttacgagtttgcagaaaaaagaaaaaggtgggtttcaagctgaaggaaaaccaatttcaaaagatgaagcagtaaaaatcgcaaaacgatttttaaacttaaaaggaaatgaaaaagtggaagttgagaaaagtggaaaaggcgcaaaagaatctttttatagcgtgaaaattaaagatccaaaaacaaataatgagttttatatggatattaccggaaaaggtggatatccaatttgggtcatgaataaccgtgagattaaagagcaaaagattagtttaaatgaagcaggaaataaagggttagcgtttttgaaaaatcataagtttgcaaatatagaactgtatgatagttcacaatatgataatgttggcgtatttacgtacgtagtaaatgaaaatggggtgcggatttatcctgaatctattcaaatgaaaattgcattagatgatggatcaattgttggtttttcagcaaaagaatatttagcatctcatcaaaaacgaaccattccaaccgcaacattatcagctactgaggcaagaaaaaaaatcaatccagatgtgaaggtcatggaagaacgtaaagcggttgttgtaaatgatttgcataaagaagtactttgttacgaatttgtagggacattagggaaagatacgtatcaaatctttattaatgcaaatgatggaacagaagaaagagtgaaaaagatgcaagctgtggaacacatgtatgattaaacatcaagaataaaaagtggtgaacagaatgaaaaagtgtatatatatgctgatgatttgtttcgctatcgctggctgtagcgtagggacaaaagataatgcaagagaaaagccagagaaaagaaatgtatctatgcgtaatgtgacctatactgataataataaaccaaatgaaaaagtggcggatcatcttgcttctttagcggcaagtataccaggcgtgcgagatgcaacggctgttgttatcggtaaatatgctgttgttggtattgatgttaaggcaaagttggatcgttctcgcgttgaatccattaaatattctgtcgcggaaagcttaaagcatgacccaaaaggtgcaaatgcggttgttgtcgcagatgttgatacgtatgaacgactgaaacaaatgggaaatcaaattagacatggtaaagcgggagaaggaattcttgatgaacttgccgccattgtcggccgtgtcatgccgcaagtgccaaatgatatgattgaaaataaagaaacagatccaataaaagataatgataagcagttgccgaaaaacgaagaaaatgagttaaaaaaggaacagaaagatcaatcgaatcatcacttgcaaagataagaaaaatcccgcgtgtggaaagcgcgggatttttcttatcaaataaatagtgaaaattcagtttgttactaaagggatatatggtttaataaaaataaggagagaaaaaggagagggttataaaatagaaagaatggggaaatgaaaatgagcatacatacagaaaacattaaacttgttccttacaaagaggaatataaagaaaaaatcgcaacattcactttacctagcgaacaagttcagtttacagcgaatccaagtgacttacttgaaaaagcaaaagaagacattacaaaacatgtcgttgtgattgtagatcaagatgttccagtcggtatttttgcacttcaaacgggagaaagagttacggaatatacaaataaccccaatgcgttattattagtttctttttcagttgattatgaaaagcaaggaaaaggctatgcgaaaagaggattgcgtttactacaagaatatgtcacagcgtactttccagaaataaatgaagttgttttagctgtaaacgaacgaaatattccagcacaaaaagtatatttaaaagttggttttgaagatagaggacaaagaaaaatgggaccgattggaaggcaacttattttatacttatcaataaaaaaacaggaatgaattgcgtaaaaaatgaactttttaggaagtccttttaaaactgttagttaagatatttcatgaaagggtgtgccaaatatgtctatgagtattattgccttagtatccatactattatggggggcagtgacacatgaactaagtaaaccttcaaaaaagcaaaataacagaaagattataaccttaacatctttagggtgtttatcaacactcgttatcactatttcactgattcaaaacatttcattttaaaaaagaaaaatatatcgaaggtttttatctcatatatttgttggtatgcaattaagcgcagtgttggaaaaatatgttgatttaggcgattttattgttatgtatttcggggaaaatgaaatcactatttaaaataccgttctaatgatttagcaaagcataaaccagatgattaccatcatcattttgcaagtgaagctatcatcttatttgaagtattatcaatttagtgctgccaggaatcattgccttccatttatttggcgatcaattaaaaaatgctgatatggcttatccgatgttagtaattaagattttgcctatcgcattatcaggcttttttgccgctgtattgttcggtgctattttaagttcatttaacggtgcattaaatagttcgatcactttattcacactggatttttataaacccattttcaagaaagaagcaagcgaaaaagagttggtgaaagtaggacgtatttttgcgattacactcggtctcattgcggttatcgtatcaccatttattttatatgcaccttctggattatataactacttacaagaaatgtttggtttttacaatgtaccaattatcgccgctgttgtcgtaggattttttagtaaaaaagtacctgcaagtgctccgaaaattgctttagtctttcatattattttgtatgcgctctcaaaagtgtttttaggatctattaatttcttatatattcttagtgtactattcccagcatgtgtaattgtgatgctagtgattggaaaattaaaaccaagagaaacagactttgaacttttcgatgctaataaagttgatttaaagccatggaaatatgcaaaggtattttcaatcttccttattatattcatgctaggtgcctatgtattattctcgcctgttgggttagccgcacagtaatgatgttttttatatcaatatactatataagtttggataattgacaattctctaaattatgttatgataactatcaaaactatatagttctcatctatccactaggggtgccgatattggctgagattaaagtttatctttgagacccttagtacctgatctggttcgtaccagcgtagggaagtggaaatgacaaaatatgatatttatatatctaggccactttctttacctactaaggaagtggcttttattttgtacatttctattttttcgttagatgttagctgagtgtagcatatatgaggagggatataaatgtcattttcacagttattacgtcaagaagttgctccgatttggcaagcgagttttgagcatccatttattaaagaactaggtgagggaacactagatttagctagctttcgttactacgttttacaagattcctactatttgagtcacttcgctagagtacaaacattaggggcagcgaaggcgatcgaattgaaaacgacagctcgcatggcacatcatgcacaaaatacatatgaagcagaattgtcattgcatgaaaattttgcggaaaaattaggaatcactgaagaagaaaaagcatcctttattccagcaccgacagcttatgcatatacatcccatatgtatcgcgctgcttatgaagggcatttaggtgatattattgcagccattttaccgtgttattggctatattatgaaattggcgagcgtcttaaagagtgtaagccagaagaaccgatttaccaagcatggatttcagcatatggttcggattggttccgcacattagtagaagaacaaattatgcgattagatcaaattgcggaaacagtaacagagtcggatcgtaaacgtatgaaacagcattttatcattagtagtcaatatgaatattcgttctgggagatggcttatacgttagagaaatggcctgttgaagaaaaaatagcaacccggtagatattcattttatttcgtcatttttcataatatattatgaaaaaattatataattaaaagagaaatagggaagataaagaggaggtagaaccctcctccctttttttactgttttttaacaaaaaatggattttaatgatggtataataaaagtaaaaaggggggtggaatctgtattttgtttcaaagtttaacagtctattgattttggattttatgtaaaataacgaaaaaagagaggaagtattcactttatggaaacgatacagttgttagcctttaaagatgtaatagatccactttttgagcaaacagtattttatgtgcagtggccaaaacattggtcaagtttgttattagagcacaatagaccatacgaattaataaaaaaatttaaacttttaaataaaagattgtatattatgttttcggatattttattcattgagcacgacccatataagttagcagaagatagcctatggattatatgtttaaaacctcttagctctgaacagttagaatatatttgtcgtcaatggtatgcgtatattcataactggaaaccgaccgaaatgcctggagaagttttattagaatggcaacctagtgcgatttcaaagttgtcgttactacatgataaaaaaacattttatatatgggtaccagcattaatttcacatttgttttgtgaacgcgcgctgcatctatctataggaaataagcaatatgaagaaattcctttttacccgcttcgagagcaacatagatgtgaagcgatgtctgagcctattcaggataaaaagacaaaagaatatttttcttatatatatcggtttgagcttatcactcgtggaattgaaaatatgtttctacttaaagtttctattggtaaaaggcgtttttatcaaacagcaaatcaatatgcaaattatatgattatgaaaaaaagaaaaggaactgtactagtctctaactgccataatgaaaaggataagtttgttacactcaaaatagaagacgcgcgatttggagtgaattggtccaaagcttatcgggaattacagaatgtttttatgcttaagaaacagttagatttagttaagattatgcaaagtccaaaaaaatatataaaagggaaaaggatacgagcacttgttatatatgatgaaaatatttttaaagttcccggtacgaaaataaaacgtgggatcagtagaagagagaaagaagtactcttacaagcatttcatcagcgatttcctcattgtacatatattccgctatgtaaaaatataactataaatcaaaatgatgagttatttccactttatataagagaagaaatgaaagagatcacactagaactatggtcttctcaaagacttacagaaatagaaaaaatattatttgaagaaggactaattttagagaagagggcaaatcattcctatatattaaattctaaaccgcaaattatactaaacatcgtaacgtataatcccaaaattattaaacagcacccatatcgaatggattattgtcataagtataaagaagatcgtatccaaagtgtgatccgagcaatatcttctataccaatccaatcatttcaaacatcgttgtctttaatagaaatcgaaaagtgtgatggtcgtgaaaaaatcgatccgaaacaagtgattcgagaagcatttgcaaggacaaatcgcatttcacaatttatcgaacgattagacggagaggagataaagaaggaacatatagtaagagccatttttagtttattagaaaagataggatttcgtaaacgaagctgggagagtatgcatccatcacatacatatgttagtttatcaatagaagaaatctataacaatcaatttgtacctattctatccaaaataaacgagggagaaattgtatataaattatatgggagtcatgagtggcgagactttacatctatcctcttaaacgtaagtgcacacgaaacgttcttaccgcaaccgtcaaagcgaaatgatataggaattcaatttaaaaaatatataacggaagaattaacagcaatcgcagaagaagctaaaaaggaaaataagcaagtgtattttcttatagacgcaagtatgagagagtactggattgaaagtttgcaaaatgaacacatggacttacatgatctaccttatatcagtgaggaattccaatcgctttctaatgtaacagccattcgtattaacaatcagtatgatgttccaaactatataatgccgttagaaaaggagtgcgatgaaacagagttatatgtggaccaaagcggactgtattatagtgtaaatatctatcctctaaacgatacgggatggaaggaacagcgcatattagaaattgtagtactcggagcgaagcaagaggaacgagatcagattgctaaaataatcacttatatgtgcaaaatgagcatcatacctggggagcgtccgtttataccattttcgatgcaaatggtaaaactaataaaaaagtatataacagatattgacttatggcaatcaagtgatgaattggatacagattggctgatagagaatgaataaggataggtggtgagaaattatgaagaaatgaaagacgattgtaatctgtacatggatcatagcgattcttttactgagttttacatggcttgaattggtgttattacaaatagtagggctacaatatgaatcgaatcaggctctcattctgttctttatcgtgtatatattcaccgatcttccactttcactcattgtggacaatataccaaaagctttgaaatctcttgatttgattcaaacaagcaaaggatggattccgtttctattcgatgcaggaaaaacatatattctcattatgacaattgattattttatggagtctattacgatttcgtggcaaggtgtttttctatttgctatcataaggggatctattggattaaaaataaagaaggatgatccagaacccccttcgtattcagaagtaacaaaatcattaaaaaatagcgaataatacttctaaacatatgacaaatcccatttgtctcaaaaacaaggatttgtcatttcttcataaaagtgtggggagcgattgtcaattctaattttgttttttgtatttacttttcatgcaagcaggattaagatgtcttttaggaataatagttatgaaaacatgaaacatgcttttatatggcatggtctgataaaataagaacatttcctttgcaaaatagaaaggaaagaagttttgaaaggggtggaacattgtgaagaagcttgatgtattgttaatgctgcttagcggtttgttcccggttgcggggattatgaaacaaatcccgctaccgttatcactcattctaggtggattattgttttttacgagttttggtagttattatacaaaacaaacgagttctcgtgtttgtagttggctagcttatactatatttatcacattcttaatgggaatttgggatcaatacgtaacaatgagctcgttactagcaaacgcgaaaattgctgcatgtatcgctttacttccagccattctttgcttccgtacatatggaattacgtttggattacttgcgctatggggagcattattatgggatgtaaaagaagtacaatcactagctgttttaggacgcatgatgaatttactcacaacagaaaaaatgtatttactattactcatagcgggctttttagtaggtggtttattcgcaaatggatttcgtcgtaaaaatgataagtttaaacaagaaacaccaaatgtattaaaacaaaaaaagaaacgaatgagacctacatttcacattcgcattccacgtttaccgaaactgagaatgaaaatgttaacattcggaagaacacctactcaatcaaaagacaagcgtccatatgaatcaatgcgtgaagaaaatatccacgcaatacaacaagaaccgcaacatgaacaacaagaaccgacaacactaggtcaaacaagaatggaacgaagacggaatcggtatcatgtttagataggggagttgaaaagaaacagtttttaagttggtgaacaactaaagagtaatattaaaataatttgatatttaatctattttcatgtttacttttccataaaaatgtaatataatgtatacagcggtttgaggaagccgctgtatcatatcataccaagatttatagagttattatggtaaggcaatatgccgtggcgttggggatcgcctaactccgattttatcggattcccctaaaaaatgactaacttcgtttagtcatttttttatatataaaacacagaattttctaaaagaggtgctagtaaatgaaatatagcattggactagatataggaattgcatcagttggttgggcagttattaatgaagatatagaaagaattgaggacttaggagtacgtatttttgatgttgctgagcaaccgaaaacaggcgcttctttgtcaactccaagaagactagctcgttctactagaaaacgcttaagaagaaggcgacaccgcgtggagagagttcgtaaatttatgattcaaaaaggtttactaacacaagttcaaatggaacaattatatgactggaaagatggtgacttagatatttggcttgtacgtgtaaatgctttagaaagaaaattgtcagatcgtgagtttgcacgtatattagttcactttgcaaaaaatcgtggatttcaatctaatcgtaaaagtgaattacaagaagaagataatggcgccgttctatcagcagttcaagaaaataagcgattgatggaagaaaaagggtatcaaacaattagtgaaatgcttctgtatgatgagaaatttgaaggtactaagcgtaacaaaggtggggaatatactcatgttgttgcacgaagtgatttaaaaagagagatacagcttatttttgaaaagcaaagagcatatggacatgctttcgcaactatggaaaatgaagataaatttcttcaaatatggtcatcacaaagaccttttgcaacaaaagatgatatagcgaaaaaaattgggaattgtacatttgaaccgaaagagaaacgagcaccaaagagcacatatacattcgaacgctttcgagctcttgataaattaaatcgtttaagaattctatcaggaacttctcctgcaagatcacttacgcaagaagagcgagatcttattttgaactctcttttttcaaagaaagaagtaaagtataaagagttgagaaagctattaaaattaaatgatgaacaacgatttaatgaaatcttttatgatccaaatgaaaaaatagagaaaaatgaaaatagaacattcctttctttagaaagtcaatataaaatcagaaaaatattacaaaaaatcgaagggaaaagcttgaatgatacataccgtccagttgatttagatacaatcgcttatgctttaactgtatttaaagacgatcaagatattcgtgactatttacaaaatcaatatgtggcgagtaatggaaaaaaggaattaaacctagcaaatcgtaagtacaatgacgaattgattgaagaactcttacacctttcctttacaaagtttgggcatctatcattaaaagcgcttagaaatattttgccgtttatggaacaagggattccttatcatcaagcttgtgaaaaagcaggttatcagtttaataaaaaagtaaaccgggaaaagcaaaagttattaccccctgtaccagcaaaagatattgtgaatccagttgttattcgttctctatcacaagtgcgtaaagtaattaatggaattattaaaagatatggttcgccctcatcaatatatattgaattagcacgtgaaatggggaggggatataaagaacggaaagaccttgagaaacaatacaataaaaaccgtcaaatgaatgaaggggccaaaaaacatattttagaacttcgtccagagtttggcgatccaagaggtcatgacattttaaaatataaactttggcaagaacaagattgtcgctgtgcatattcttttaaatcaattccgataaagcagttatttgagattggctatgccgaggtagatcatattattccatatagtcgtagttttgatgatagcaataacaataaagtacttgttctagcagcagaaaaccaaaataaacaaaatcgcacaccatatgaatggtttggtcacgatgaaacaaaatggcaagagttcacttcgttagtaacaacgatgaaagtttcaaaaaagaaaaaaagcttattgttaaaaaagaattttgatgaagaacaagccgaagaatttcgctctagacatttaaatgatacacgctacatcactcgttatatcaaaacatttattgaggataacttacaattccgcatggaagaaggaaaaaaacaatatgtgcatacagtgaatggagcttatacatctcttatgcgaaaacgatggggatttaacaaaaatcgccaagaaaacgatttacatcatgcattagatgcagtaattgtagcggttagcttaccttttaaacataaggtaagcgcgtattttaagcggcgcgaagaatatgctcataaccaattaaaacgagaaggggaatttttccctgaaccttggccagggttcattcatgaattagaaattagaatgatgcaagactctgaaaacataaaactagcaatggaaagcttaaacttaaaaacttatgatgaatcctttattaaggaactaaagccaatttttgtttccagaatgccaaaacgagcaatgaggggacaaatacatgaagaaacgttgaagcgagtaagagggcgcacagatgatggctacattcgtactgtaaaaaaagtaaagttagatcaaattccatttgataaaaatggagatttcccaatgtttggaaaagaaacagatatgaaaacatatgaagcaataaaatctagataccttgaatctggaaaagataagaaaaaagcctttaacacaccgctttataagccagcgaagaatccagaaaacgcaccgattattcgctctattaaaattgaagaaaaagcaaatcgtgttgtcatgctggatgagaaaacagctgctgataatgcgagtattgtaagaacagaggtgtttcgtcataaagaaacagggaattatttcttaacgcctgtttatgtagctgatgtgcttgctaaaaaagttccagatcgattaattacaacgaaaaagccttatagtgagtggagaaaaattactgatgagtatgaatttctcttttcgttatatcctaacgatttaattagagtgaagatgccgaaagaaaaaggaacaaaaacacacactggtgaaaaacatgtatggcaagaaaattttatgtatttcaaaggtgtccattcagggagtgctggtgtgagaatgatagatcatatgaacagttttgaagatgaaataggagtgcgaaaattagttgtatttgaaaaataccaagtggatcctttaggtagaatgaataaagtacacggagagaaacgacatggcatttagacatattgtaattcgaaatccaagtaaactttcaacatgtgatgaacaattgttaattaagcaagaagaaacggtgcgtattcctttagaagatatttgcacgattacaatagaagatccagcaattacaatcacagctgctttattaagtaaatgtgtcgaatatcatgtagagcttattgtatgtgatcggaaaagattaccagcgggaattttacaaccgtttcatagacattccagacaaaaagctgtgttagatgtccaattggggctaggcaaaccatttaagaaaagaatttggcaacagattgtaattcgtaaattagaaaatcaagcgagatgccttgaattagcaaacaaaggggaagatgcgcaaaaattatattctattagcaaaagtgtagaatcaggtgatcgtacaaatcgcgaagcctacggtgcaaaagtgtattttacggcgctatttggtccaaacttttaccggagagaagatgatgtgcgtaatatctctttaaactatggatatagtttagtgcgctctctaacagctcgcgcacttgttcgctacggctttaacccaagtctaggtatatttcatgatagtcaaacaaatgcgtttaaccttgctgatgactttatggaagtattaagaccatttgttgatattattgttgctttgaatgtgtcagatgaaacagagtgggattctaaaatgagagaaaagctgttttcggtattaaatattgaagcagtatggaaagaagaacgacaaagtataacaaatggtgtagaacaaatgataaaaagctatgtatcagcgtgccggcaaaatgatgcatcgctattactactgccagaactgattgcattacggcaacatacgtatgagtaaatttatgagaatacttgttttctttgatttgccggtgatgacaaaagctgaaagaaaagcctacacccgtttccgaaaatttttattaaaagatggttacacaatgctgcaattttctgtgtacacaagagtttgtaatggagaagaaggtgctcaaaaacatttgagaagacttaggcaaaacattccaaatgtaaatggagcaatccgttcattaaaagtaacagaaaagcaatttgaaagtatggatattttacttggtgttcaaaccattgatgaaaaattaggaacaaataaaacggactttttctaacaaaaaacacttgcaattttagcaagtgttttttgttttgacgtaatatgaaaaaaatttagcacgaaaataaccaaaagagcatttttaaactcgtttttttaaaaaagaaaccccttgaaactgaggaatatcaagaggtttcggtgcatgtatcatatcataccaagatttaaagaggaattatggctatgcggggcaacttatcaacatcattaaaatcatatcataccaagatttaaagaggaattatggcccaccgaaaccaaaagtagaggaagacgaatcatatcataccaagatttaaagaggaattatggctatactacatgatagctttagattgctaccatcatatcataccaagatttaaagaggaattatggcagcttcctcacaccatacatcgattggaatatcatatcataccaagatttaaagaggaattatggccccgtttgtcctgtaataaagacgtgctgaatcatatcataccaagatttaaagaggaattatggcctaaacacctttacattaccgaaattttcaatcatatcataccaagatttaaagaggaattatggctcaattgcaccttttttgattgcttgcactatcatatcataccaagatttaaagaggaattatggcgttataagccccctcagtcactttttgtaatcatatcataccaagatttaaagaggaattatggctttttacttctacatcggcaacccaaaacaatcatatcataccaagatttaaagaggaattatggcttgtcgaagagtggatggataaacatcgaaatcatatcataccaagatttaaagaggaattatggcttaaaaatgcatataataaatatttgttcagtactgtcatatttttaatattaacggaaatagctacagaatgaaagtacgattagtcacgaaggaagagtaggtgggtcagttttcagtgacaaaggtggggcaaatttggttgaccatctacaaatatctaattggatggtgtggatataatgcattaagcgacacgccgtctatatgtaaagaacgagacaagtggattcgaagaaggctccgaatggttatatggaaacaataaaaattatcaagggtaaggagaaagaaactccaatttttgagtatcgccaaacagacagcatacgaaaagaagcctagacaattcctactggggatatctaggtcttaaaagtttgagtaatagatattcaatgattcgtcagacttaattgaaccgccgtatacggaaccgtacgtacggtggtgtgagaggtcgagggggaatctcctctctcctccacgattaccggactttaagttagaatattatgataattatttctcaatcaacagaaaaagatagttcttttaatgtctgaaaattgtgttaatatttaactaaaaagaggggatgtacttatggatgccaatgttataacgaatacacaaattactaaacaattaaatgaatggtatcaagtaatgcgtgcacagcatgttttaaaagcaagacaactaaaaaaagaaattgatacaaatctatatcaaattgaagagaatccagatagtttcatttattactcattgcttgattttcgctacaacatgttgattggaaactttgattgtaatctagcaactacacctgtgaaaaaagatgtgtttctgcaatattattatcatttctttaaatttatctatgcaatggaaactgggaactataatgatgcgaaagaacaccatgattatgcagacgagttattgaaagatatttctgatgtatatgaaaaggcggagtttcactatcgtactgctttgtattattactatattgatcaaccaatcctatccattcgttatgctacaaaggcaaaagatttcttttctaaaaatgtaggttatgaggttaaaacagcagcatgtgaaaatgtacttggtatatcatgtattgcattaaaacaatttgaggcggcagaggaatatttacttgcggctattaatacatttaagaaacaaagtgaagaagattctgttttgaaagtgaaatataatttaggattattatatgctgatcaaaatctttctgaattagcgatacgttatcttctcgatgcttttgaagatgaagaacatgattataaaacaatgtttttactagcacgtgaacatttaaaattagggaaatcagaaattgcaaaaacatacatcgaaaaaggtttgaaggcttctacaaaagaatattattatcatttttcaattctgcaaaatatgtatagtgagcattcgttagaaaaagtagaaagcgttgtaaatgaaggggtttcatattttaaacagcaaagtttatggggatatgtacaagaatatgctgaggcgttggctgtgaaactttataacgaaaaggaagaaatgaaatcaaatcaatatttctatatgagttacgaagcgaagaaaatcttagaagaaaaaggggcgttaaaataatgaggaaattaatggggattgtatttgctagtatctttatttttggggtatatacatcaatagatatatctgaaatttataatgatattccgattcaatatggacatggtaaagggatttaatcaaatcatttcatattttgtttttgtatacagtcctgtaagggaaagatatgatgtttttaatatttcaaggataaagtaagttaaaccagtgatattttcaaaatattgctggtttttttcattgtagagaaattgcttttatttataaccttaaaaggttacaataagagtatcaaaaagtggcccaaaggaatgtgtaaaaatggtaaaaaaacaagaatataagtcaaccattaagtctagaccatttctttttttggaaacaaaaaaggcttcgtcccttttattacaaggattaaaagagtttgaggtaaaagaaaaagcggttgtcgaaaatatctttcaagtaaatacagaatccagaaaaaaagaacttgcatcaattattttagctcggttaaaagtattatgatgagtttttaattcagaaaattttgtattgaagaaattcttgtttttttgaaatccaagctgaggcattaaacagattggatacttttttacgaacagtagattttaatgtaggataccgcctaaaaagtgaacaatccttattattaaaatggaatatttatacagcgactcgtggcaagacgggaatgattggtacttataaattagaaacagaagttgtaagtggaactggtaagtttgaaaaaacgggattaaattcagatcgtgatgcaaaggaaagtattgatacagcttttcgattttttaaagcaaatcataaaaatatgagtggaactattagtacgacgacaaaagattatttaatgcatattcaagatattcatggcgtcggtttaacaggtgaactatcacttgcagcatttattgcgttatgttctggtgcgttaagtaaaccggtgcaaaatcaaatggttgtattaggatctattagtatcagtggtacgattaataaagtagaagaattagcgaatgtactgcaagtttgttttgattcaggagcgaagaaaatacttttaccaatggcatcagctgttgatattccaagcgtgccacctgagttgtttgctaagtttcagattgcattttatcagagtgcggaggattctgtgtttaaggctttaggatttgaataaagacataaaatagcagtcacaatatgtagaatgtgactgctattttattaaatgtttaggagaatgactgtatatgaagaagtcaaaagcagaacgaaaaagggatttagaaattgtaaatttatatcataaaaaattaacagaagaagagcttgaaaaactttcagtgaaatttatagaatggaaagaagggaagttaccgtattgtgagttaactgaacatattcatgagtgtcataaaaagaatcaaatcatttggacaagatttcataatatgaacgatgaatttctcatctttcaagctaaaaaagagttaaacttatttagtgagcgagacatggaaaaagaacaatataaaagatggaatactttttgaaaggaataactccgtgaaaaataaaaggaatttttgctagacataatgagggacaatgaaaggactaaaataaacatgcaattaatccaatgtacaaaaaaactagcagatatgatggaattaaaaacagagaaagtagatcaaagggaaagtaacaacttacatagttggcacgcgaatttatttacaatcaatcgtaagaaatgtgtaatcgtgatgaataatgtgacgcggtaccatttcatcatttatggagtaacgaaaaaggatttacgaaattttgaggcgttatttcaaaagaacttagtaacaaacttgttatcagatggagtcgaaccagaagtaattgaacattatgtaaagagtagctcaccgatgcaatatgcagcaacaaataatcgcagtattctttcgcaaatgaatgatgcggtctttatggtggaccattacttctacgctgaattagtagagaaacagaagccttttattaatattgaaaagctcaatcaaaatttaaataaaactgtaatgttgaaaataccgaagtatcctgctgatatgatgagagatgctcttaatcaacatttgattatgtcaaagaacgaatagaggagaaaaggcatgagagatcagttacggaaaattattgataacatgtcagaagaagaagtgaaatcactgttacgccttgttttactgcaacttgagcttgtagcggaacatcgggatgaagaaatgattcatatggtagcagaaatatcaaaacaattaatagaatcacaaaagcctacattacacataaaagacagcgaacatgtacatattgcatttggtgattcgtcggcaggttgcttaaagcacacgttaaaaaaggaagggtttcatcaagattatgtcatttcattatcggatattttttcagtcgggccaatttttcacttagatgatcgaaaaggacaagttgctaggcaagaatggttatctagcaatttaagcacaggtgatttctattttgaggaagagtatttaccgcgctttctttcttcattagaagagatgcgctctatttcgcaagatacatcagttacaatttggaaagccgataatgctcatgaacatgtagggctttgctttgcacttgctatgttaaaagataagaaaaatattagaataattgacgcttcagaagcgcagaaagagttattgaataaagagtatgatatatgtggaactggtgaactagccccagaagatatagcggtcattcttgaacaatataaagaaaaggaatgtttaaaagaagaagctcgagcagatttaacaaaggaatggaacgctttatctactaatacagcactcttacgcatttggaaagatggtacagttcattctgtagtagaagattattttgatgaatatatagttcgatgtgcaaaagaaataggagcagacaaaggtttttctaaagccgctcacgtaattggagaagtgcttggccgtgtagaacagttagtcggggatgtttttcttgaatatcgcttacaaacattaataaaacaaaatatttttcaagccaaaggttccttaaaagcaatgcgctattatagtgtgaaattaaatagataaaaggatgagagctttatttttgaaggatatgttttcaaaagtaaggctttttttagttttaaaaaatgaatttgggcggtatataagctacctttaggtaacctatggcatatgaatgttgaaagaaacatagataaaggaggtaacatttcatatgtataactacccgaattatccaggtataggttatgatcaaactatgtattcgcagtaccaaggctatggtgaagaggctatggaaccgagagagagtgattatgaagagtaccgacctgatgatgcggaagatgcgccgacgtcaccacctccgtcacaagcaccttccgtaccttcgacattcgcatcacctgtacaaagcagtaatattagatcatgggtgtgtaattgtttaggaaggtggggatacttacgattgcatcgtcctggcccttttggaagagatttatggtttttcccaactgaagtaagaagaggtggggtatccggttatacgtggcaagctggacgtcgccggaaagtaagctatcgataccaacaaattagtaattttatgtgttttgcttagaaaaaatcaaagaggagaatattcttctctttgatttttatttttcaagtttcaaagtaatatattgacaaaaaacataattttcattcttttgatgggttataattcatatgttggagtgatttttataaaacatgagagtgagggaatgcgatgtctgtaaaaaacaaagttggccgaaatattaaggatggaattaagttagcttctcctgaatttaaagaatatgcgtatgaaatctataaggaatcacgtaaattacaaccgattttgttcgtatataaaggggagttaggtacagagtggcttattacaagatatgaagatgcattgtctttattaaaagattcgcggttaaagaaaaatccagaaaatattttttctcaagaaaaattaaaatcattattttcgattgaaaatagtgattatttaacaaaacatatgttaaatgcagatccgcctgatcataaccgtttgcgagcacttgttcaaaaaacgtttactcctaaaatgatttcgcaattacataatcgcattcaacatattgcggacactttattagatcatgttgaacagaagcgttcctttcattttattcgtgatttttcattcccattaccaatcatagtcattagtgaaatgctcggcattccaaaagaagatcaagcaaaattccgcatatggtctcatgcggttatcgattcacctgaaataccagaagaaaaaatagagaatgaagaaaaactttctgagtttattacgtatttacaatacttagttgatttaaaacgaaaagagccaaaagaagacttaattagcagattaatacaagctgaaagtgaaggcggtcaattgagtgcggcagagctttattccatgattatgctgcttattgtagctgggcatgaaacaacggtaaatttaatgacgaatacagtgttagcattattagagaatccagatcaactgcagttattaaaggaaagaccagaacttattgattcagcaattgaagaaggcttacgttactattctccagttgaggttacaacagcacgctgggcagctgaaccttttcacatacatgacaaagtgattcaaaagggggatatggtgacgatttctttagcctctgcaaatcgggatgaaaccgtttttgtaaatccagatgtatttaatattacaagggaaaataatcgccatattgcttttgggcatggagggcatttttgtttaggagcaccattggctagattagaagcaaaaatcgcaattgctacattgttaaaacggatgcctcgattacgaataaaaggaaagagagaagacataaaatgggaaggtaattatttaatgcgttctttaaaggaattaccattaactttctagaatataggtatgtgagacacgcatacatcatatttcacttacatagagtatgtatgtgtaaatcaaaattaaaacggaagggtgaagacatcccaatgatcaactaattctatttgttaggaaatcttcgttaaaaaacgaaatcttcttctgaataggattagtatgtacatttttgtataagagggatgtgattcgcactgcgaatgtacggtctttttcatatgatttgtactgcctcttattcagaacgaaaatagggggcttttttatgtcagtaagtgcagaaacaaatccaaaagttggcatgtcgcaagtattaaaaaatcgatttgtgcaaggaattcttatctcggcactatgtttacaaatcgggatatgggttcggaattttgcggtattactatatgtcatggaaatgacaaaaggaaatgcgtttgcaatttctatgatttcagttgcggagtttgcacctatttttattttttcatttattggaggaacatttgcagatcggtggaaaccacgaaaaacgatgatttggtgcgaagctttaagctctttatctgtatttgcagtccttctcacactcatgtttggcacatggaaagtcgttttcttcgttactttaatctcagcgattctttcgcaattttctcagccttctggtatgaaattattcaagcaacatttatcagcagaagagatacaattagccatgtcgttatatcaaacgacttttgcgatatttatgatactcggacctatacttggcacttttgtttttcaaagctttggtatttatatttcaattgtcgtaacaggagttgcttttttacttgcggctattgttttattgtttttgccaaaagatgtggagatgcatgcggaaaagaagcaagtgagtttactgcaagaaatggcagatggcattaagtatgtgttaggtaagaaagcattaacgttactgggtatttgttttatggctgcaggattagggattggtcttattcaaccattaggaatctttatcgtgacagagcaacttggtttatctaaggaaagtttacaatggttattgacggtaaa

SEQ ID NO: 2075 - DNA, 23231 bp, synthetic construct
  misc_feature 1..23231: note = Synthetic
  source 1..23231: mol_type = other DNA
aggagttgatgtctgtatgaacagaattaatctcattactttaggtgtaagagatattgggaaatcgcttaaattttaccgcaaaatcggttttgaagcatcggtcacaggagacgaagaaaaacctgtcattgttttttttaagaatgaaggatcaaagcttgagttatttccacttgaagaattggcaaaggatatcaacgaagaaaatcctcctgaattgtcaaaaggggggttctcgggtgtcactctcgcttataatgcaaaatctgaaactgaagttgatgatattcttcaatcagtcaaaaaagttggtgcccaagttgttaaagagccgcaaacattatcatggggtggatacggaggttatttcattgaccctgatggttattactgggaagtcgcgtacggctcaaactgggaatttgatgactcaaacatgttgatcattaaaggttaaatttaaaaattacacatttattcaacagctaatggatggcacctatttaacaactagaataccgatcttcaattatccagctaatatcagaaaagactattcaagaattgggcgagcgcgacaagttccgctataaacactctgaggcgtgaagtgcgggtattttttaagaatgaaattccaactttacaacggaggaaggtttttcaagcgctcatcgcaccgatagggtaggaacgtgggatttttcaaagtgcgagcttttaggcaagaggctttccggtgtcaaccttctcgcttgaaggtaacgaggaacttatcatcacagtacatctcggtaaatggaacacagggtgctgggaaactagcacgcactgtgcggagcaagtgaaagctggagataacctcaaaggcttacctattgctaactttaaccgaataacatattcatttatttggccagttagtggaataaagggtgatccgtatttaatggaatttaatccgaggttctttgttaaagatcatacatcagattgtctgaatgtgatggttatactggaaacagggagcctttgtacagtaacacaaaatagaaaagatgtcctaattagtatcaaataacccgggcttcatggctttccgggttatttgtcttttatagctccatttaattatgaaatcctttgctaattggttccatttttaaaatgtttctcagatctgctcccaaggtatccataataaccaaaagtcttatccttttttgaaggtaataatatttacgttttaatgtaatgaaatattgtattatggagtaatttatattactatatagagtaaggaggtggataatatggaaaaactacggttaaatgtgtctttattacgacgaaaggtacctaacctgacaagtgtagctcgttcggtcggattacgtccggctaccgtttccaatttatgtacaggaaaaatttctgtcggtcgttctgaggtcagaacattggttgcgcttgcagaacttgcggaatgtagtctggacgaattgattatcagaggggagagtgtcgaaatgattgaaaccggggtgaaaacgttggatttgtttgctcctttggccaaaggaggaacagttggattggttgcccgtcctggaatggggcagttggttattctatccgagttatttgatcgcctgaagaaagaaggttatatcacggtattgctcaagccagaagatgaacacccggaattcaaggacatcgttgattatgcagacattgttactgatacgattgataagacttatgaggaaatagcgaaattaagcaagaccaaggaaatcttgtttgctgccgaccgttctcatgtagtgagcggtgaaatttatcacctgcaagaacgccttcaaaatattggggttgattcggtaaccacgttccttgtcgatcttaaaggagaagtcgttgatgaagatttgccgtacggtcctcttgaaacgttatggcaatttgatgcagaccttgccgctcgacggaaatttcctgcggtcaatccgatctattcaacctcttctgtgctggaaggatcacatcttgatcaaacgcatcttaggacacaacaacaggcccaaaaactgttgcgccgttatcgagaactgcgctccttggtcaatgtgcgtggaacaaacggcttacctgcttccgagactgaaacctataaccgtggagaacggttggaagcctatttgacccagccattttacgtagcggaggcgtttacaggcatcactggaaaatccgtcaatcttcaagacactttacatgatgtaagaaaaatcctggacggcgcagtcgattctactgatattaaaaaattggattacatcggtaaattacagtaatcggataaatccgtattaaattagggtaaagtgatcactttcaattctaaagccgccaaggatagggggcgaggaaaacccacacaccccgttaaagcaaccgggcgcgtttatttaggaacgcgtcttttgttttaggatcagtttgtagagcgatgctgaaaagattgaaaaaaagatacttaaggatagtttaaacatgaaaccattcaactggaatatcgtataattattaacggaatttcgataagtaagagattaaaaaataatgaggtgttatcatttcatgaaaccgtttgatcgttaaaaacgtataattatttaaactaaaggaggcggtaccatggataaagaaaagtacgaaaggtttgctgaatcactcataaacgcccatcaaaccccaggagcaatggtcgcattgaataatcaacgttacgaaaaaggattcggctaccgagatcgggaaaatgaattacccgttacggctgacaccatttttggcattggcagtattacaaagtcaatgacttgtattgcgatacttcagctgcaagaagacggcctattatccgtccatgactccattaaaacatatctacccgaaattacattcaaagggagcgatgatataacacttcatcacctgatgactcatacatccggcattcccccattaaatacgctcttttacgcgaataagcaatcaatggaaagggagggttcattcgatctgcaaattaagctgggcattccccttgatcgagatcaaggtagcattgatacatacgatgatctcataaactatttaaatacaattcaattcgttccccttgatagacctggaaaatcattcagttattcaaacgacggctacgcacttttaggcatcattatcgaacgtgttagtgggcagcagtatgaacgttatatagagaaaaacatttttcaaccccttgggatgaaaaatagtttctttaaccccaatcaattggataagcgagcggctcgcctgtacagtgttgatccaactgcggaaacgccaacgattgtacactcacctgaatggtgggatgcgccagctatgtgggccgccggttatgtaaaatcgactgcaaatgatatgcttcgcttcggtaatgtctttttgaaagacggcaatggtattttaacatcggaaagccttactgctctaacttcccaacatattgaagttgagcctggtcggcattatggttatggcgtaatggtcatacctaacttttttggtacaacgcttattgaacatggtgggggaattaaaggggtgacggcgcaattcgcagtattgcctgagagaagcattgcagccatttgcctaacgaacattgccggtgcacctgcggaagctcttttaaaaggggcagtgcagagcgaaatggatattgatcctgacaaggcggccatcaaatatgacaattacacacttactgaagcagaccgccaagcaatcaccggcacctatcaatctaatgaaggacaaacgattaaagtctatgaaaaagatgcagccatatttgtggagatccagggaactgaaatgccaacccgtgccgtcggtcgccatgctgtcacaattacaatgcatggtaccgagtacttgctgcagtttacagacggtcgtcttcattttgcgcttagacaacttgtgaaaagtggagattaatagtttttacaaaagttgtccagtcttacaagcctcatagccaagattccttaatcgggcgcaaatctggaacaaaggtgcgcccgctagtgccttaaagggctattttgtagaataacttattgtgaaatttgggggagctgtggtgattagtatgaattttattgattcaatagacccgtttgtaatgcaattggtattaatccccattattgtaattggcttaggagttatattagctactattactaagaaaatttttattggacctttggtaacattgattcttaatttgttgtatgaaatatggtattcaaagtattattatcctgatttagaacttatcatcacatcttggaatatcattttcccacttatatctttagtcatctctgcaatctttgtatcagtaaggaaagcaaaatcaaaggggaatcgtgaagaaaagaacaataataagtttagattacattagagtatcttccggaatcaggcactttagccgaataacatattcatttataagctaaaagggcagggttgttgggtgagaaaattttatttgagagagagaggtaggggatattgtatgatatcagaattggataaggttgaatttagtaagtgtagagaattgttaaatgaacaagggcaattagaagcaatagctgttgttgaaaatataaatcctggtcgtatctttgtagatgatattaataatcctaaatctgggcttatttggttaggaaataatgatggatttatcttttttggaagtgagcaaaatgaggggtttaataaagaattgaaccattttattaacagtgtaatcctaccagaagcaaaaaaagtccaattagaatggtttgaaggaattggcaatcatgaaaaatggaataaaattattgaaagagtttttgaacgtcgtaaattagggagttggaatcagagggtttataccttacaaaaggatgattataaaggtaattatgaacctgtagttaaacaaggatataaggttataaaaatctgcaatactctctttgaaaataataataactcaataaaaaacattgaatttttacaatcaaaaatattagagttttggtcctcacctgagattttctttaattatggcatgggttattgtattgtttacaaaaatgaaattgttagtgtttgtttttcaggttttgtcgttggaaatgtacactgcatagatattgaaacattagaggcttatcagggaaaaaaattagctcaaaaggtagctcatagttttgttaaagattgtttggtgaataatatggttccgtattgggattgtatggaaatgaacaagccctctattgcagttgcagagaatataggattcagaaatgtatttaactacgttggatatgatttttcactcaaataattattcaattacaggttgaagaaccttgaattgactattgcaatcggccgctaacccggaataagaattagcgccaacgctaaacaaaagagcgccatttgttgaatgaattgtgctaaaattgaatcaggatatattatttcttaagggaggttaatttgatgggattgaaagagagagaggattattataaagcaaataacgctgaagaattgcttcacgccttaaaaaataaagaatcttacattatcattcaggatgactttaaaaaggaatttgaggaaaatacacagctgccgcttacggaaacagaagaaatgggatttcaactgggattcggtggtacggcaggtatttggagcgaaatattttttcaaattatcaatgcatctagtaaaggaagtaaacagcaaaagaaaattgacagcaagatccgtaaatacaacgtaaaaaagttgaatgaaaacgagattctcttgtacctgcgtcaattggattattagattattggacgcttttcctaataagggttaccgccagtaatgcgtataagggccatttagttgaatcaggatattaaaatttactacagaattattcaacgtgaagaaaaggagtgatgtaattggcgaaaccctatttagggattctatggttgattatgactctaataccggcaccgttcttgtttcacttttatgaatacggtcaatacgttaagcgtgaagatgctccatttctgactttgacttccgtattatttgttttgatcgttggttttttgtccggtctaataagaattcgttacgttgtcttggttaatattttagtagcaatattatcggtagtattagcctcgaatttcatccctgacgatgtatggtttgcaccggtaggccgaaatgttgctgtcatacttaccgctattgtgtttttaattggacaattactagtaagagcgttttccaagcattattttgcaaagaaatactaaaaatgtttttcttccgtaatcaggcggttttgtggaaaggttttaagaaccttgtaacaacaataattgtatgaacgtgaaaagtaaaaactactgtttttgacgtattgtattactgacttggagagatgaaaacggacaaatcccaataaatacttggaatataaatgaaaagaaaaaacgttaaaaaacaaggaggaacattaatgaaacccattacaaaaaaacgtatgaaggcgttcctgattgacttgacaatttcaagcgccttgactgctggggttgagtatttattgcgtaaaaaagtgaaaagtgaagtggttcatgcgttaataacacccactgtagtaatgtggacacttgagtacgcacagttgcggcaaagcaggcaaacaattggctataaaaaaatggggttggtacttgagaataaggagggttccaggctaacatccggccaaatcattaagcgtatggggtatcgggatacagtgagcacttttgattatgtaaaaagccctaaaacgttcgaagaccaagccggagcaatacttccccacgatcgcttttcaggtactgtagtcaaagaactgtaaatgttgaaagtgcaacgctctaaggctaagaacaataaaaagctagatctcctgaccaagtatttatcattaattattttggaagaaacttaagcaaacagttaaatcttaaaagcaattgccttccatttttgatggaataagtgaaaaataggggggataaattgatattttcaatttttgcagttgattctttttcagttggttttgccagcactgtttattgtgtctcttttcgtgagcaagttcaaagggagactcgattgggtgttgcaagccttgtttttcacagtttatatttcctgggtgtttttttcggggcggtgggattggaccggttattatatccggtttctttggccgctattgctcattttcgcactgtatatgagttggcagagagtccgttcgctgccgtccggacaaacatacaccggtaaagaaaagggtgcatttgttttttatagcttgctcatacttgtttttggtttgtatcacgtgcaaatctttacagggtacaccacagatgaagaggcggtagaactcgaatttcctttaaaggatggcacgttttatgtagggcatggcggtgcttcaacaagcgtaaatgctcattatgctcatccggaacagcgttttgcgctggatatcgttcagctgaataatctcggtgtgagaactgcggggatatatcctgaagaactggatcgttatgttatttatggagccgaggtctcaagtccatgtacgggggaaatcgtgaaggcgcgaaacaacatgcctgatttgactccacctgaatcgaatcctgataaaccagaaggtaactacgttcaggtcagttgtgaaaaaacagaagcaaacgtgattattgctcatctgcaggaaggcagtgtaaccgttcaagctggggatcagatagaaacgggccagtttgtcggtcttgtcggaaattcgggcaatacgtcagaaccacacctgcacatccatgcagaaagagacggccagggcgtgccgattgaatttgacggtcgatttttgttgcggaacagcttggtgtgggagtgagtgactttattaaaattgatattttataaaaagtatgatggaatcgattatggtaaggatagcatcaatatatagtgattttgaggaggatatgatgagcgaaaataaaaactggttgggatgcaattgatcaagttatggagggcttgtatggagaacaggagcctaaacattttggtacactgatttcttatatgctcggggaaatgatcctttggatggaactagtgtgtatactgcaaaagaaccgattgaacatggcattttgttacatatggatttttagagctatacgaaaaagagacggaggataccgaaactagtggttttggatttgaattaacatttagacttgcaaaggtggaccatgaaacggaaccgcctgcctgggcactaaaccttttacagaacctggcaagatacatatttgggagtggaaatatatttaaaaatggtgattatatggatgccaatggtcccatttgccttgaatcgaatacagaattaacagtacttgtatttacgtgtgatcctgaactgcctagtatagatacaccgaatgggaaagtcgagtttattcaaattgtgggaataacagcggatgaattggaagcgatgcaaatatggaatacacttggtattttacatgtttgtaaaaattatatgccatattatattaccgatctatcgcgaaaatcttttctataacaaaggtgaatgacgcgattcaaaaaggaagtgaaacagaggggccaaataccggatttctttttaatgaccaagtaacatggaagccttcccaaaagaaattattcaagcaattgcctgctaccgtgacatttggggcgaagcaagtgaatacgatcagcaaggtccttcaggggcgtgcggtgaaaaaagaacagctgcggctagtaagtaatgaagcaaaagttgtttttttattcggggatcaaccacaggtaatggaaaaagatgatgtgatagagattattttaaatgaataagcagttgaagaattggcagagcaacttcaacctattgtaaaacagttttccgttcctactttagaatcgattatcttggaaattgtgaaaacggatgtaacaaattcagagggaaatgtcgttgaagatagggtagatgtgggtttgaaatattactattttgagttttttaggttaaaatatatacgatggaatttccttttcttcacgtactctcatttcattatctgacacttcatctgcgtaaaaaggattgacagaattgtttagcatccagtaactctgctgccgcagcacttttgagtaagacgagttaagctgatgtggaaagagtacaagtcaaaggaattccttagaatgctggttggaatggaagtggatcccgcaaaacaaagactggtttacggattttttgaaagttatttgaagctcaatgaacaggtcaattgacggatgaaataaaacatatgaatggagcgaataaaatcatggagataccgatttcttatgaagataaggggaaagcagaaggaaaaaaagtagctttgagaatgcctgaggaggatgagatttgggtaataaaataattttcttagaatatattgacaaaaatcatgaaagcggttatattagatatatcgacctaggggaaggtcggtgaaatcatatcacatcaaggtttacaggtaagttattatggtaaggcattaagccgtggcgttggggatcgcctagctccgcatttttatgcggagttccccgcaacaacaatgactaagtgcttttagtcattttttttatacttaaaacaggcatatagtaccaaaaatacataaatagggtgattctaatgaaatacagtattggactagatattggaatttcctcagtaggctgggctgttatcaatcaggacaaacagagaattgaagacttaggttcccggatgtttgatgtggctgagaatccaaaaaacggatcatcgctggcgtcaccaaggcgtgaagctagatcgcaaagaagaaggctaagaagacgccgttaccgtgtaggccgcgttcgtcattatatcattgacaaaggtcttttatccgaaatggagtctgaccgattattcgagtggcaagatggtgatttagatatttggcttattagggtaaatggcctggaaagaatgctcacagagcgtgaatttgctcgtattttaatccactatgcaaaaaatagaggatttaaatcaaatcgtaaaagtgaaacgaacgatggagaaggtggagtgctcttaaaggctgttagagaaaacgcctcattgatggaagaaaaagggtaccgttcagttgctgaaatgcttgtattagatgataagtttaatggcagaaagcgcaataaaggcggcgactatacacacgttttagcaagaaatgaaattgaaaaagaaatacgggatgttttcgaaaaacaacgtgattttggtaatctctttgcgacgaaggaaaatgaagaagcatacataaacatttggaactcccaacgtcctttttcgacgcaagaggatattgcaaaacgaattggaaattgtacctttgaagaaaatgaaaaacgagcacctaagttttcctatacatttgagaagtttcgggccttggataaagtcaatcgtttgcggattatttctacaaattcaccgcagcgtcctttaacaaatgaagaacggcaagcagtcatgaacagtgttatggataaaaaagaggtgaaatataaagatgttcggaaaacgttaggattaaacgatgacgaacgatttaacgaactgttttacgaccctggtgaaacaaatgaaaagaatgaaaataaaacgtttttatcgctaaaagggtactatgaattaaaaaagatcgtgagggatgttgaaggaaaaacgttagcggaatcctatcgaccgatcgactatgatacatttgcatatgctgttaccgtatataaagatgataatgatgtccgtgattatttatcaaatgactatgtaaataaaaatgggaagcggattcataatctggcaaacagggcttacagtcaaaagttaatcgacgaacttttaaatctatcatacgccaagtttggacatttatcattgaaagctttaaataatattattccttatttagagcaagggtatctttatcataaagcatgtgaagaggcagggtacagttttaatcagaaggtgggaaagaaaaaggaaaagttgcttccggttattccagcagatgacattgccaatccagttgtgattcgttccctatcgcagacaaggaaggtaatcaatgccatcatcaaaaggtacggatcaccttcagccatttatattgaattggcaagggaaatggggcggcactataaggaaaggaaggatattgagaaacagtataataacaaccgtaaaattaatgataaggcaaagagtcgtattcaagagcttcatccagaaatcagtgatccacgtggacatgatatattaaaatataaattatgggatgaacaaaatgggaagtgtgcttattcgttaaagcctattccaatggaacatttatttgattatggatttgccgaggtagatcatattattccatatagtcgtagttttgatgacagtaatgccaataaggtccttgttttgtcaaaagagaatcaaaacaaaaaaaaccgaacaccattcgagtggtttggcagtgatgaggtaagatgggagcagtatatttcatatgtaaattctttgaaggtccggaaaaagaaaaaggatttattattgaagcaaaatttcgatgaggaccaggccgaacaattcaaatcccgtcatttgaatgatacgcgttatataactagattcttaaaagggtttatagaagataatttgcggttcagagaagatgaagataagaagcaatatgtctatacagtaaatggtgcttatacgtcgctgatgagaaaaaggtggggtttcaataagaaccgcgcagaaaatgatttgcatcatgccctggatgcggtacttgttgcggtaagtcttcctttccaacatagggttagcaattattttaaacacagtgaattgcacgcctcacaattgctgaaacgcgaaggagagcgttttcccgaaccgtgggagggatttacgaaggaacttgaagctagaatgttacaggatccgggaaaattaaaactggcgttggaaagtctatcattagctggttatgatgaggaattcatggagcgcgtcaaaccgatctttgtttcccgaatgccgaagcgatcggtgaaaggacaaattcacgaagagactatcaggaggcaccgcgggtttaccgaaaaaggattaaatcttatggtgaaaaaatatgcattacaagatatcaagtttgataaaaatggagactttccgatgtatggaaaagagtctgatcccaaaacgtataacgccataaaggaaaggtatttggagtatggtgatgcagcaaaggcttttagcactgttctgtataagccgtcaaagaatccggaaaatgcgccaattattcggagtgttaagattgagtcaactgcaaatcaggtttttcatttggatgataaaacagttgctgaaaatgctagtattgcgaggacagaggtgtttcggcataaggaaagcgggaagtattatttggctccggtttatgtgagtgatgtgttggcgagaagaagtcctgatagatttatcactgcagctaaatcctatggtgaatggacaaaaataactgatgagtatgagtttttgtttaatttattccctaacgatgtaataaaagtaaaaatgccaagggaaaagatatcgaaaacttttaccggcgatataaaaagatgggttgaaggtactttttattttaaaaaagttcattctggtactgcagcaattactattatagaccatatgaatagttttggagacgatattggttccaaaaatttgaagttactagaaaagtgccaaaccgacccattaggtaatctaacgaaagtacaaagggaaaagcgttatggcgtttagacacttaattattcgtaatccagcaaaactttctacatcaaacgaacagctgctgattaaacaagaggattctattaaaattccgttagaagacattgtcacaataactttggaagatcccgctattactattaccaatgggttattaaccaaatgtactgagtatcacgtcgaacttattatctgtgatcggaagcggatgccaagtggaattgtccagccgtttcaccgtcattctagacaacgtactgttttggaaatgcaattgggtcttggaaaaccttttaagaaacgggtctggcaaaagattgttattaagaaactagagaaccaggcgcgatgtttggagctggttcataagggcgaagaagcacaaaaaatatatgccattagccggagtgtagaatctggtgatcgtacaaatcgtgaagcatatggtgcaaaactgtactttgaatcactttttggggtagggtttcaacgaagggaagataatgtatataatatctccttgaattatggttacagtattatccgttcattggtagccagggcgcttatcagatacggatttaccccaacttttgggatattccacgacagtcaaacaaatgcatttaatttagctgatgattttatggaagtgttacgtccgtttgttgatgtgataattgttacaaatgtaacggatgaattggaatggtcgcctaagatacgtaaaagcttatttcaggtacttgatatcgaagcaaactggaatcacgaaaaattgagtgtaactaatggagctgatcaaatgataaaaagttttgtaactgcgtgccggcagcaagacccaaatttattagtactccctgaacttacgaatatcacagttcacacgtatgagtagatatatgagaattatagtttttttgatctgccggtggttataccaagggaaaggaaagcatattccagattccgcaaatttttattgcgtgatgggtatacaatgctgcagtattcggtatacacaagaatttgtaatggagaagacggggtacggaaacacatgcgaagattgaaagaaaatatacctcctgttaacggagcaattcgggctatgaaaattacagaaaaacaatttgaaaatatggacattcttttggggacaactactcccgaggaagacttaggggcaaataagatagatttcttttaaaaaagtacttgcaattttgtttgcaagtatttttttttataatttcataaaaaaaagaaaatgaaaaggagaaattcatacgagaattatggctttttttaaaaaagaaaaacccttgaaatggggaagtatcaagggtttttaagccatgtatcataccacatcaaggtttacaggggaattatggccaacaacagacaataaagaaaataatttagatcataccacatcaaggtttacaggggaattatggcggaaaacttatcgtttgcatagtataaaccatcataccacatcaaggtttacaggggaattatggctttcctctttttgaacgatctcttttctggatcataccacatcaaggtttacaggggaattatggcgccctgccattggacagcttcaaaagaatcatcataccacatcaaggtttacaggggaattatggctttacatatccagctttgtataaaagtgtaatcataccacatcaaggtttacaggggaattatggctcccgcaacgatccgataaattcacctgtaatcataccacatcaaggtttacaggggaattatggcttcccaagccatttcctcagcttcttctttatcataccacatcaaggtttacaggggaattatggcttaatccctttaatcttacagctagtatttatcataccacatcaaggtttacaggggaattatggcaaacagcgtgagagttcttcttttgccttcatcataccacatcaaggtttacaggggaattatggcccagatcggcatacataaaccaacctagatatcataccacatcaaggtttacaggggaattatggcgcaagcttaatcatagattcatagacttttatcataccacatcaaggtttacaggggaattatggcaaatagataactgataaataaaaaagccttatcataccacatcaaggtttacaggggaattatggcacaacagagcgcattaaacaacattgtgggatcataccacatcaaggtttacaggggaattatggcagtcaacggggcaattcgtgctataaaaatattataccaccaaattgaaattataataaaacactacctgctgatgatgagatcctctattattccccaccaatccatgataaaaatagcactagcaaccataaaaggaatggagtcaattgaaccaacaaccataccgttcaaccataaaatccaaaccatttttatacagcgagactcgcaagctcacagaactactcacgcaaggtttcagcgaggccgatatcagagatcaagtcatcaaccagaacatcttccaggtgaaaacagaaacacgcaaaaaagaaatcgcctcaaccatactgaaacggcttaaaacaatagatgcgtttctattaaagaaaacagtcacggctgacataaacaccagcaaattaatcgtcttatatgccattctaaaaacggatcgcctttttcgcgattttatgaatgaagtgttccaagaaaagttggctattcaacagccaacacttgaagaccgggattttaatgccttttttgaagcgaaacgacaacaaagcgaaaccgttgcaaaatggaaagactatactttttataaattacaacaggtatatgtacggattctatttgaagcgggcttgctatcaaaacataacagagaaatacaaattccattgatgaatccggacgttttggatcatattcgaaatgcagatgaccagcgcttcattaacgctattgtcggggaaggcggtgtataacttgaaaacaatcaacgaacgacttgacgaaatattaccaaggatcacgaacccttctttccgccaaaataaagggcttggtaatgaaattggctaccacatttttgattaccagccggaaaatgagatgcttgtccgtaatcatgttgcctttctaaaggaaaggcttaataatgacagttcagatcagcgcattattgagtttgatttatatgaagtcgtgctagaaatactggatggcaaaggataccttcaaaagaattttcagatggaacaaaaaaaaggcagtcagcaggtgctaaatgccaccagaaaagcactacgactgactttgaataatgacctggtaatcaaatatattgccgagcgcgtcgagcaaaatgacattatttttataacgggtattggtaaggtgtttccaattattcgttctcatgtcattttaaacaatttatataaagcagttgggcaaattccggtcgtactattttttcctggacgttacgatggtcaggaattgcaattatttggtgaaataaaagacgataattactatcgtgcatttcagctagtgaatgattagggggtattgacgtgcagattagaaatatgttcgaacgaaaaattgatcgtgacattaaaggtgttgtcaaagttggacaggacgataacagaagtattcaacaggaactggaagaatatgtggttaccgatgagctacataaacatattggtgattttttcgcttcctatcgaaaagggatcgaggaaccgacggataggattggtgtttggatttcgggtttctttggatctggtaaatcgcactttcttaaaatactatcctacttaatcgaaaaccgggaaattaatggcaagcgtgcgatcaattactttgatgataaaattcaggatccgcagatacggaaaaatatgcaaaaagcaggcgagattactaccgatgtcgttctctttgacattgatgccaaaagtgaatcggattcgatggctgataaagattcgatcgttaaagtgttgaataaagtgtttaatgaaatgcaaggattttgtggagcgattccttggattgccgagatcgaacggaacatgcataacgatggaacgtacgaaacgtttaaagcaaatttccgggagatttccggcaacgaatgggaggaatcccgggaagatttttactatgaagaagatgccatcattgcggcgcttaccaaatcaacgcaaatgagcgaggaggcagcacgcaattggtttgagcgtgcggagcaggaatattcgatcagtattgagcgctttgctaaacgcgtgaaagaatatattgagcaaaaaggcaataatcatcatgtagcgtttttaatcgatgaagttgggcagtatattggcgataattccaatgcgatgctcaacttgcaaacgattgttcacgagtttggacggcaatgtaaagggaaagcctggattgctgtaacgagtcaggaagatattgattctgtcctgactgtaaaaggaaacgacttttccaaaatccagggacgctttgacacaaagctgagtctatcaagtgcgttcgttgatgaagtgatcaagaagcgtatcctgataaaaaacgacgcaggggcagaaacactacgggaagtttaccgaaaaaaccaatttatattgcaaaatctattaacctttacggaaaacagtgcggaaatgaagaagtttcagaatcaggcagattttatcgatgtatacccgtttgttccatttcagtttaacctgttgcaaaaagtatttaccggtgtcaggattcatggtgcttccggtaaacacttagcggaaggggaacgttcactgctaagcgcctttcaggaatcggctattcgttttgccgatcaagcggaagggatattggtaccattttcggcattctatgaaaccattgaaacgtttttggactctagtattcgaaccgttattattcaagcgggtaacaacgaaaaactggaaccctacgatattgatgtactaaagctattattcctgattaaatatgtaaaagaaatgccagctagcctggaaaacatcgcaacgctgatggtcgatcatatcgatacagataagcttgcgctgaagaagaaaatggagaagtcactcacacgtttgatcgggcaaacgttgattcaaaaaaatggcgaggagtatatcttcttaaccaatgatgagcaggatgtgaaccgggaaattaaaaatatgcatgtagaaacttccgaagtcattttaaaaatcggggaagagatattcgacggcatctttaaagatagaaagtatcgttattctaccaagcatcattttccatttaacgcgtttattgatgatcgccccatccgtgcacattccaatgacattgggatcagagtattgacaccatacgcggatgcatcgatggattatagccattcggaattgaaaatgatgtcgttacgcgaaaacaatgtgattttcaaacttccagccgatacatcctatttagaggaaatggaagagattctcaaaatacaagcctatttaaaaatcaagagcggaacagctgtatcacaggcgattgaagatattaagacacgtaaatcgcgggaggtcaccgaacgccgcgagcggattacgacgtatgtaaccgaagctttgaaacaggcggatatattcgtgaattcggagcaattgaacattaacaagaaagtcccggctgaacggttcaatgaggcattccgtacattaattaaaacactttataacaagttggactatgtcaccgaatttgttgacaaacctaaagaactgcaatcgattattatcgaatcaacgcagctttcaatggatgatagtgacgagcccaatcacttggctatcaaggaattagacaattatgtagaccgattaactgcccgcaaccagccgatgacagttaaaagtataacgacttattttgagcaacagccatatggttggttggaactcgatacaacttcttttttattgcaactatttaaagcacaggaagttaaattacaattgaatagcagtgagctgcaactggaagacaaccggttgatcgattatgttacgaaacgggattacgtagatcgagttgttgtaaaaaaacgggagcggatttctcctgttttattgaaaaatgtccgcgatttaagtaaagaactatttggtatttcagcggttccaaccgatgaggacgggatgaagcataaggttaatgagttactaaacttggaaaaagaaaagctcaccgatttactggcaaactaccggaatacgttttatcctggggagtcggtacttgctgaagggaaaaaagtgatcgaatcgatcgtgcatattcaggacacggcaacctggtttaaaaaacttcacgaactgcgtcacgatttacaggcatatgcaaatgatgtgaaggaagtaaaggatttctttgaaaaccagcaggataaatacgatcaagcgaagaagcgattaaccatttttgaagataaccggacatatgtaacggacaatcacgtaaatgacctcgtgaaaaaaatggatgggattgtgcatcatgcggagccttacgatcggatccaggaattgccgggattatatcatgcgtttgatgaagcatttgtcgaattgctggaagaagaatgcaaggaattagatcgcctcattgacaacccgggtttctttaaacaggaaagaaaacgtacgaaacaaacggtaaaaataccggacttcctaggtgttgaacatgaaacaaaaacgtttattaagaatgcttgggcacagaattattttgcacctaatcgtatcgtatcaaaaaaagaacgctctaactggcgattcacagccaaacgattggtagaacaaataatgatccttgcaaaccaacccgaacacggaatggcatgcatccatcttctggaggatttgtaccgattattttgctatgcctcgggacattatgtgtttgccagccaagaacccttcgacacaataaaaattccacaagaaacatttctcaagcgcctgatcctgctaaaaaaagtagaacaggtgccggaaaagtggatttctgatacgctgacactcattgtgaaaaatgatgtgggctataatacattaaaaagcacattacttgatacaatggttagtacgctaagcaatgcaccgctaaaagagaaagcagtacagcttgctgtggaactcctttatgatcaaaaagtgaaaatacgtaatacaaaaaaacgatcgatacaagcagaatatgcggctgaaaataatgttgaaacgctggttgaaatggtgtttatgctacaaagcgacctaggagaatacgatgaagcgatcgctttctacaaaaagcactatatccaattgacggatgaggttaaagtttacatattacttgagtggatactggaatatcagcggcgtaccaaggaatggatgcaagagtatgagcttgctgttaagcggggtatcgaacttcggggcgctttgaagaaaacatacgcgtatgtgaagcgagaaggtgaattaccggaacgtatgattaccttttaaattcgatcgatagtcgtacagggattaatacctccaaatgctactacattaagcgtgggatagctagtctttttatagcgccagctggcttttcatgtaaaggtatcatggtactattttcaacactttacttatcgatattttctgatacaatggtgatagacaagacactacgatttacaccccacaaaaaactgcaaaggatgtgcgcctatgccacaagcacagctggttatggaagaatcaacagtctacccccaccatgaccaattattcaaggaactgatccgaaccttttttgaggagtttctggaagcattttttccggaaatctacccggagattgattttcaggatatatccttcctgtccgaagaggtgttcaccgacctgctggaaggcgaaaaccgccggctggatgttgttgtggagaccaaattgaaaagcacggatgctgttgtgattgtgcatgtggaaccacaaagcacaaagcaatcgcatttccatgaacggatgtatcaatatttcagcatgctctaccataagtaccggaaaccgattattccgattgctgtttttagctacaaggaaaattgggaaaaaaatcagtatgtgatggcattttcgtttttccacgttttgacattcaactatctgacactgcatttgtacaagaaaaactggcgggattacatccattccgacaaccctgctgccgcggcgctgttaagcaaaatgaattacaaggaagaggaacgggtgcaagtgaaaaaagaattcttgcggatgatggtaaacatgcagctcgatcccgcgagagaacgtcttatatacggatttttcgaaagctatttgtatttaaacagtgaagaggaggaacaactgatggaagaaatcaagcatatggatgatgctgacaggatcatggagattccaatttcatatgaagagagagggaaagaaaaaggcaaggaaataggaagagaagaaggcatcaggcaggttgctatggagatgctgcgaaagggtgcggcagtcaattttattagtgaagtaaccaagctgagcaagaaagagatagaagctttgaagcgggagttgtagtgtgtaagagcttgtcgcagagcagtcgtcaagcctggaaaaataacggatcgaagagttttgtatgtgctgaaaattgtgctacttaattatactaatagttaagaagatgttacaaaatgcctctttattttctgcttttattttaccttacaaaccagtaaattaggtcaaaccacaactggaattaaactgaattcttgaaatccatcttctattgatgtggttacaaaaaaaaaagagccattgtaatagggtgaaaatacacactatcctaaaaaatgactcttcaaaattataaccttcaactatctggcggtattgttgaagattataagcctaaattctcgctaaaaataaggagggaatagcttttttatctttcaaaatccttaacgtcgtgaatctgcaccttcatgacgttattcaactgtaagtctatctaatcaagagttactcataataaatgattctgcaggatagtaatttaatattttgcaaagctgttctgccatataatcaggtgattgaacaaagtcatttttaatccaatctagaataattcctaaaattccataagcataaaatgaggcatacatattgttatctaacccatcttgatatggagtgataagggaaatttctagcttgataaaccgcgtgatcgaattcaaataggtatcatagaaccaaggtatggtctcaaattccctccatagctcataaaagtacttgttttcaagaatataattaaaaataataatctctgaaggggctaatgcctttaaatgaatatagttattctttttataaggaattttaaatgctttaataagtccattcgtttggtcagcgataatttccttcactatatcttccttctgattgtaatgccgataaaaagttgcgcgattataatcagcaagatccacgatatctgtaaccgttatttgctcatagctcttttcatacatcaattcaataaatgcttgcttcaataactttttcgttctacgcacccgtctgtccgttatcaaatccttgttaaccatttaaaatcacccaaatctcttttttattttatacgcattgcagtaatctgttgtttatgtgtacagatcttaagatattacagattgaaagcccttccatttcaatttatactaaggttaattcacactattagtctaacatatttcgaaaaaaaggaggggtcaaacattggataaacagtggaatgaactatatgatgtagtcgtggttggttcaggtgctgg

SEQ ID NO: 2076 - DNA, 23192 bp, synthetic construct
  misc_feature 1..23192: note = Synthetic
  source 1..23192: mol_type = other DNA
attgacggttttctgcagtccattttcgctgtattagcaggggggggcatcatgctggttctctatatttttaaggcgatcggtgccggagacgttaagctttttgctgctattggagcgataactggggtattattcacgctttatgcgatcatgtactccattatttttgctggtatcataggactttttatattgctatttactaaaacaatatttatcaatttactattagctttcttacatattaaggagagtattcaaaagagatcactaaccccgttggatgaatttaaacaaaatgtgtcgaatcgatttccgtttatatatgccgtcattcccggtgtaattactgctttttattatatgtttgttgcttaaaaatagaaggctattaataggtgaagggaagggtattgtttatggactaaattagcgactgacagacaacagcacccttgagatgtataggtaagtgatttttctaaggaaataattcattaaaaatgtctttgatagaatcagagaatccattgttaaaaagtatatgagaaagacaatagtcacacttattttattactagtaacaggactgtatttagtagcttgttcaagtgatgattctgagaaacaaacgaattcaccaggggctatgactcagcaagaagaggaaacacatacagttgatacgaatgagggagaaacagatactgtggaaacaaatgaagaggataaagcttttgaagaggtagaagacagcattgatgaatatgtagagcaccagaccggtattcaaatcagagagacgggtatagaggaagtagatgggctttccttagaagatattaattttcctgctgaggatggaggacgattcttagtagctaatgtaacgattaaaaatacggggagatagccccattacaccgaaagagcagttatcggcacaattatatgatgaagatacctccttgttaatgtcggaagatcaaacatttcccgaacgggaggaagaattagcgcctggagatgaaataactggaaatttagtatacaccgacagtatttttcaagattacgatttactttacttaacgtttgaagcagaagcaatcgacgatgaaacaagatttgaaataccgataccaagtgaagagctaattcgtactgccaaacagcaaataaaaaggaggaacaccacgtgtcaaacccattggatacataccatatagatcatttggaagcaaatggcggctatatgaagctgcagccatcaggagacaaagggtttacgacaaatgattttcaagatttgcaattgaaaatgattcagtcgaataacattcccagattgctcccgattagtttagaagaagtaaacggggaaacatccatcttttataaaacagaaggtttacgcaagctgcgtccttttgcgaaagaacgtcccttatcgatgcaaaattattattcgctatttattaatattattcaggcgctccaagattccaataatcatatgttgagtgacgatcattttattctggatgaggattatatttttattggcaatggctatcatcaagtctacttaacctatgtcccattgaaagaagtgccgaataaccaaaccgttcatgaagggttgaaaaaactattactcaacttagctagtgaagtgcaggggttgaatggggcacaatttaagatgttattaagctacattaaagacccaggctttagtcttcatggcattaaacaattactcagccagttgcagcggcaaactcagtatggggaagaagaagaacaagaggaacaggaagaaacccaacagccaaaagaaatcaccaaaatcaagaaagtacgtaagctgccaccattaacaagtaaaaataagacgtactccattttaatgggtgtcattatactagccatgatttggaagttgtatagtgatggacctacttccttttggttaatcgtgtcgtcgatcctatcgctgatcgttatcgcaggtgtcttggtttattggtttgtctggagaccaggtgtcgaaccaaccattaccgaaaaagaggtcaaggtgaagaataagcaggcgaaacaattaacaacaccgaagagtaaaccagcaagtgaaaccaaacaacaggaagcagccgattcattccaagcggctcagaccatgcccgcgatggaaggacaacagccagcaccagaaatgccagccagtccatcctttacaccggaaccagcatttccattcgagacacccgatgaagaggagataccatcgaacgaccaaacgatgttattagatgaagagaaagtcgccccgaaaccgaataagaaagcagtggttaattatctaacggtggatcgcgatggcattgaggaagaaatccaattagataaagacagctttaccatcggccgagcggagaaaggtaccgattttgttgaaaaaggagtcggcatttctcgtttgcacgttgagttcgtcaaattgtcggacacgtatggcatcaaggacctcggtgcaaaaaatggtacctatgtgaatgcagagaagatcattccttataaaatccatgaactgtccgatcaagatacgattcaaattggcaaaacggtctacacgtacagggtgacagaatgacgaatacagagatgaaagcgcacgttcagcagggtaaatttagtttcaggccaagcacagaccgaccgaatcaagattcgatcggcgtctcgagcgaaaacttatcaactggccaagcggtccatctttttgtgatagcagatgggatgggcggtcatgagcttggtgatgcagccagctatttcgccgttgattacgtattaaaatggtggcgcagtatggtatggatgaatgagaaaccggctgactttttgccgacatgtaaagcacaaatcattgacctgtttgctgaaattaatacacaactgatggagatcggccgacgggaacagaaagatattggcactaccttaagcgtattgatggttgtcgatgatcagtattttatttgtcatatcggtgatacacgtatttatcgttatcgcgcgcaaattaccgatttggaagaaccaaatggagatacgattgacttgaataaggaaaaaaggttcgtgcagttgtcggtcgaccattccttcgcttcgatgcaggtggagaaagggctgatgacaaccgaggaggctaagtctcacgataaggcccattatttaacacagtgtatggggattaaaggggatgtaaagccttatacggcatcaggtaccttcacgaatgtggattactttttgttatgtacagatgggttccatggcttgtttaccgaagaagagctgagtcagcaatggacggcccagctggaaaagaagcaaacactagaagccatcaccgatcatttctatcacgtggcgaaggacgacaaacatccgacagatgatgtatctattctaaccgtccatatggagactagaacggaggggtagcaatgtggaaaaagcaggagcttatccaagacaaatatgagatccttgagtacctaacatcaggtggtacctcccttctctaccatgtgaagacaccaggtggaaagcaggcattattaaaggttgtcaaaagtccagataccctatttaatcaacagattgataatgaagctgccacgctggcggccatcgatcaccccagcattcctaagctatttgataaattcaccgtgcataaccattacaaggcgatagtgatcgagaagtttgcagcaaaaagcctgtccgacttgatggaggaggaaggaagaacctttacctggcaggaaattagtgagattgcgcgacaactcgcggggattattcacgtttttcatgatcatgatccagctctggtgatccgtgacatgaaaccatctaatattttgcttggcgaggataataccgtttatgtggttgatttcggtattaccgctcccgttgatgctgttggacaggtgagggcattaggcacgattggttatgccgcaccggagcaattcgaggatggtgtcgtcgatttacgctcagacttattttcacttggtgccgtccttttttacctgacaagcaatggagagaatatttatacaagtgatcatgaaacgattttgagggaaagactgcccaaacattttgcccagatgattatgaaattaactaataccaatcccgataagcgctatccgaatatagcgaaggtaatgcaggccacagcaaaggtcaaccgttcctataccgagcgaatgaaggcatttatccatgcttatcaaggataattaatttacggaggtgaatagattgcaaggtattaacggctatataaaagaagaagcagaccaggttatctatgaaatacctaagtcacaaaccaatgtgatggaagcagaacagctggatgaattaaataaaaaagatgcccttttcttcgatgtccagcgctataccgtagaggatgacatcgtgcgtatttattataagaaaccacaagactatgccgctttgtcaagcctttcttccaccgacagctcattaagacgcaaggtcgccataaatatacttgaggtggcaaggctggttggcacccaatatacaacgatgattcacccagataatatatacgtcaatcagcaaggggatgtgaaatttgctcagcgagggatccgttttgtactatctactgatgagctaaccaaccaacaggtgatacgggatttgaggtcgcttacagcttccattttgactggcgtccgttatgccgatattaagcaaagcaacataaacgagctggccgttcgttatccctatgtgcgagatattcagcaagcaaagaccgtcgatcaactacgtcatgcgattgatcaatctgcctcagtagctgtaacggcaaagccagatgtgtcagaagcagttgaaaccaaaccaaaagtggagaaaccaaaagcagagaagcaagaaaaatcttggcgagaaaaaatgcaaaagtatgccaccttgaaagtgacggtacccgcaggcattgtccttggtatggtggcgggcatgttactgctgtatatgattaaggtagttccaatggcagaagcaactacatcagaaaatgatcaacagcagcaacaacaggaagaactcgagcaagaaaaggtagcactcgaagcagaacttgcaaaggatgacaagctattggaaggataccgcatggcagtgaccggaaagaccgaagaagcgatcactagctttgaaagtgtggagcaattagatgaagaagcgcagcgtaccttggtggaacaatatattgacttaggcaccgtcgagagcttaactcaggccagtcaactagattcttcttataatgtacaaatcgttgacaagttgaaatcgattgaaggtcaagagtctaaggaagccatcctggcactggaatctgacgccccagaagtaaccattgaacaagcatgggtgaacaaagactttgacagtgtggtcgccatttatcaggatatcagtgataatgaccgcgccaaatacctagctggaagaagctatgtggaactgaaaaaggataaagaggcactggagattggcaaggaactaaataatgaaggcattcaagtcaatagcttaaatatccagaaagataaaatcaataacaacgatgacttggatgatgatgaaaaagaagaacgaatcgaaaagatagatgaacagattgatgatatacaaggatagactgcatgtggaagatgcagtctttttgtttgagaaaaaatcgatatttttactcaatagctgtccttttatagtacaatagaataaaagaattctcgctgaaagaaggagtacgaatgaatcgcaactttttgatgagtctgttaattattctattattagcgaatggttgggccatcttatattttcaatttccattttacttattagctgttggtttgttaatcgtttctgtattaaatatggcactcatgcatgaacgttttgtgttcttatataccattataatggttattggttatgcggcattgttaacggtagcggcctttattaataatcaaccagtagagacgcaattattatatatatatgatcacgtgttattcaccagctttattctgatgttttgggttttgaatcactacacgaaaaggcttggttatgaaaatgtggatttacgaaaacaagtaaaggaattacaaaaacgtcagccgaacacgagtatcttaacgatgaacgaattccaggaacaagcaaaatggacgttggcatcggtgcaaagaaataacaaacaggcatggctggtagaactgaccatcgatgagaaaagcaaatcgattcgtcgagtagtacaggaaaaaatagaagaggcaggtctccgatcgatacgcagtaactttgatttaattacctcttctggatcaacgatatacgtattactccgggataccgaacattacggagtagagattgtacttcatcgaatcgagcagaagttaaaagaaatcttgaactatatcgacccaccataccaagtacgggtggagcagatagatagaattgaaaaaatacaacaaataggggcgtaaataaaccatgattatcttattaatcattatgacgtttttttggttgatgctgatgtattattcagcaattaatatagcaggaatctggcatcgactgaagaaaaaagaggcgcctgaacttttgcattatcctagcgttgccatctttataccagctcataacgaggaagtagtaattgccgatacattgcgggcaatggcaagacttcaataccctggtaagctggatatttatttattgaatgacaattcatctgacagaacaggagctattgctgatgaatttgcccgagccttttcaagtattcatcatattcctgtgccaatgggcgaaccaaaaggaaagtctcgagtgcttaattatggtttgaagatttcccaatctgattatttcgccgtatacgatgctgacaatgaaccagaacctgatgccttaaagaaattggtggaagcagctgaaaacaatgaaaaagcagcaggggcagttggttatgtcaaaacaaaaaatatggccaaaaatgccttaacacgcatgattggcctagaatttcaagtgtttcaactgctaatgcaatgcggacgctgggcattatttcggttaggctcactagcaggtaccaatatgctggtaaaacgtcaagtggtgcaggaattgggagagtatgatgtacgggcattggcagaggatgcagaattaacggtaagaatcacggctatgggatatcatttacctgtcgtaccagcttctcgcacttgggagcaggagcctgagaaaataaagacttttgttcggcaaaggactcggtggctgactgggaacctatatttattggaaaagtcgattcatgatttgtctcattggaaaggtcgtacctttgctttatccttgcagcatgtattcacttatctattctttgctgtcttattgctggtgtcagacatcttcttcatcatgggcctattaggttttactttacctgatatgcgcgcgccgatcttgattttatggtttatgagctatattgtttatacctcacaactattaagtgcgttagtagtagatgacaatgtgtctgtaaagaatgtttgctttatcctgctgatgtattttacttatgcgcagctttttattatcttgttattccgcagctccttgagttatatatggaatcgtcttagaggacagaccattacatgggataagacggaacgattcaaaggaagggaagaaagcctttgattggtcgtaaatctttattgttttttattagtttattatttttattggcaggatgccgtgtgtcgatggatgaatcagtgcaacagcaggtggaagatgcgtacatgagtgagcaaggtttgattcatgcttatcccaatcaggaagattctcagtatctatcggagagcgtagggctctatttagagtttttattacaggtggaggataaggatcgtttcgctgaacaagtcgccttgctgcaagattattttgtgcaaaccagtgatggggcgagttttattgcttgggaactgacagataatacacaggtgaatgctttaattgatgatgtacgaatcattaaggtcttaaaagaagcaagtgatacattttctgagccagcatatgacgagcttgctgaggatttgttgatggtgatcaaacagacacaaatatggaaagatgtatttgtggattactatgattgggaataccaaacgaccgccaatcgaatcacattaagctacttaatcccggcattctttcaattcttcccggaggcagcagccaatcgtctgattttggaaaatgcttcaggagatcctgtattttatccggagtattttgagctatctacccagacctatcaatttgatggggaggcgcatatggtcgatcagttattaattgcactaaataaggagcaggtcaatatggcttttgaagactggatcatcaaagaatgggagcgggaagatcgtctttatggaagatatgataaggaaaccttagagtcaacggtagagtacgagtcattggctgtatatggttatttgcatcgctttttcatgaagataggcgatgaagatttagcagaagaagtctttcagcgggctgaagtattagctcaggagtcggctggccaacttcatttttttgattttattcattgggagttgatgaagaaaagaggttaagcgcctgatgtataaaatagtaagctggggaattcagtgtttatagtggaatatggctggactatcgcagcagtttagccatattccagattgctctttgttcaacaaaagcgcctgattgctaattataaacagactgtgattgtaacatcttcaatatggatatatgtattttatttcttatgattcatcttctttggtatagatctggattccaactactgttcatagattcaaccgttatagactgttcatcagaagaaagtgtaacgatcaagggttccgatttattagatacctgaccgtcaaaattaagatctatactattctcgttttccgtccattccccttcgtactcagtaccaccttcattgtaaatagcagccccatttttatcgatagtgatttctatcttgctcccactagtactagttcctccatatgttcctacccacttactagatccgccacaagcagatagatttattattgcaaaaataagtaaaacaccaacaagccactttgtcttcatattcatttgaaatctcctctaatatatatttttttatagatagtcgtaagcaatacggctcaattgttgaacaaagaataatctggaatagtggaacgagatttagaatatgctgtgaatttaatagatcatataacataggctcatattcctttattttatcataagatgagacttagaggtaaacataaaattagatgttacggaaaatgatgattataaaaaataggagctcttattggtgtgaataaacaaatcttgcgtgtttaattccttttattttgaggaggctagctatttgctgatttcaggatgaaaatatgattctatgtatctaagtttgttcacttttgattaggaaaatggttgcgaatggaaatagagtattgtataatataattgtgagttggggaactcacagcataacataccaaggtttatagtaagttactatggtaaggctttttaagccgcggcgtaggggatcgcctgccgagttactcggcttctccccgttaaaaatgactaaagcgatttagtcatttttttcatatatgtatgtaaaaattatccttagcaaggagtgataaaggtgaaatacgatattggcttggatattgggattacttcggttggttgggcagtgatcaatcgtgataaaaagaggttggaagactggggggttcgcttgtttgaagtggcagaaaatccgaaagatggatcagcactcgctgcgcctaggcgtgaagcacgatcaacaagaagacgcctgagacgcagaaagcaccgcgtggagcgaatcaaacactttatcactcaaaacgccctattaaccaaacaagagttggatgaattatatccgcttacaaaggaagatgaggatgtttgggtgttgcgtaagctagggactgagcggaagttaaccaatcgtgaatttgcccgtatcctgatccattgcgccaaacatcgtggttatcagtccaatcgcaaaagcgaagaacaggatgacgaatcgggtaaggtcctgtctgctattaaagaaaatcacaatttaatggtagaaaaaaggtaccggacgatttcacatatgttagtagaggaagataagccattgcgtaataaagatggtgattattctggtgtattattacgcgccgatataaaaaaagagattgtttctatttttgacaagcaacaggagttcggtcattcatttgcaacgacagcaaataaggaacgttacatagaattgtggggctcacagcgacccgttgcgtccaaggacgatattttagaaaagataggttcgtgttctctagaacaaaatgccaagcgtgtccctaaggcgacgtatacatttagcaagtttcgcgctctggataaactgaatcgactacatattatggatgtaaagggagagaagcgacaattaactgttgaagaacgagaactagtggttcataagttttttgataaaaaagatgccaaatattctgatatacgccaggccttaaaattgtcggaagatcaaaagtttagtgagctttattatgccgacgatgtcaagctaagcgaaagcgagaaacgaatctttatttcgatggaggaccagtataaaatccgcaaagccatcaagaaagaattaggtaagaagcggctagaagcattcactgcgattgactttgacacatttggctatgccttaacggtctttaagagcgatgaggatattcaagactatttgcgtaatcaatggataaacagcaagggaaagcctatgagaaatattgctaaccactgttatgaagatgatctgattgaagtattgctgaaattatctttctcaaaatttggccatttatccttaaaggcgttaaacaatcttctcccttttatggaacaaggtgactattatacggatgcagcaaagaaagctggttatatgttggatcaagaaaagaatctacctaaacaaaaattattgccggttataccagaacaagagattctcaatccaattgttctacgggcattaagccaagcgagaaaagtagtcaacagtattattaaaaagtatggttctcctcgccatatatatatcgaattggcacgcgagatggggcggaattatcaagaccggagagaaatagagaaacaatttgataagaaccgatcgattaatgagaatgccaaggaagagattcgtgatctttttcctgaaagatcagatatcaaggggcatgatatcttaaaaatgaagctttggaaagaacagcagcattgttgtatttattcaaaacagcatatcccgttagagaaactttttgaacccggctatgcacaggtggatcatattatcccatatagtcgcagttttaatgatagcaatcataataaggtattagtactagctggtcaaaatcaagataaaaaggataggacaccatttgagtggtttggttctgatcatgccagatgggaacagttttctacctacgtcgatggtttgcacatgtcacgcaagaaaaaacaaaatttgaagaataaatcatttcaacgcagtgaacaagaatttcgtgacaggcatttgaatgatactcgttatattactcgcttttttaaaacctttattgcggatcatttacactttgacagtaattcgaaacaaaatgtgtatccagtaaacggtgcttatactgctttattgcgtaagcgctgggggtttaataaagttcgtgaagaaaatagcctgcatcatgctcttgatgccgcgattgtaggaacgagtggtccttttcgtgacgaggtaagtaattattttaaaaaagcggaggaacatcctaaacaattgttaaggaaaaacgatattaaattcccgcaaccatggaaaaagtttgcgaaagaattaagaacgcggctcatccaagatccagatgcaatgatgacggcgatcatgaacaacaacttttatgaagacgatgctgcatttcgcgatcaggtgcgacctatttttccatcctggatgccaaaacgttctgttaagggacaattacatcaggagaagtttagacgtaatcgtggtgaaacggatgatggttatcaattgattgtaacgaagacgaagctggcagatattccatttgataaagacggacactttccgatgtttggaaaagaaaacgaccgaaaaacatatgatgcgatcagagacaggtatttgtcctttaatggaaataaacaaaaggcatttgctgaaccattatacaaaccatccaaaaatatgaaaaatgctccactgatccgatcggtgaagatagaggataagaaaaacaggctggtatcggttaagggagaagatacggttgcttataacgccagtattgcaagaacagatgtgtaccaggatgtgaatacgaagaaatattatttgttgccggtgtatgtggcggatattaagcaagggaataggccagatcgatttgtaacagcacacaaaccatataataaatgggtgaagaaagtagataatcacgagtataagtttagtctgtttccgaatgatttaatgtatattcaattagctaaaatcaaaacagttaaaggaaccaacattgattggcaacaaggttatttttattataaaggtcttgatactgctacaggggctatttctattgttaagtccgatagtagcttcgatgaaagaacgggtataaaatctttgaaacagtttgaaaaatataacgttactccaattggggatctgcaaaaggtccagaaagagcttgcttatggcttataggcatattatcgttcgtaatccagcaaagttgtcggtgaaaaataatcagctaatgattaaacaagaaacaagcgtacaaattcctttagaggatatttgtacgcttacgatagaggatccggctattactttaacgggtgttctattaagtcaatgtgctgcttacaatgtagaattgattgtatgcgaccaaaaacgcgttccaagtgccactttgcaatcattccatcaacattctagacaaaaagcagtactggatatgcaaattggcttatcaaaaccctttaaaaagagaatttggcaaaaagtagtacaagcaaaaattgagaatcaagcaaattgtttagatttatcctatcaatcggaagaagcagatgtcctgcatgcaatggccaaacaagtggaatcaggcgatcgaaccaacaaagaagcatatgcagcaaaattctattttaataagttatttggcgatcaatttactagacgacgagaagatccacaaaatattgctttaaattatggttatagcttgattcgttcattagtggcaagggctctagttcgttatggttttacgccagctcttggaatattccacgatagtcagaccaatgcctttaatttagcagatgattttatggaaccacttcggccttttgtagactatacagttgccgcttatgtcaaagaggattcagtctggaataacgaaatcaaggagaaattatttcaaattttaagttattccgcttattggaaaggtgagaaacaaagtattacaaatggagtggattggatggttaaaagttatgtcgctgcatgccgaaatggcgatccgaaatttattgttttgcctgaattaaaatctatggaaatgcatgtgtatgagtagatttatgaggatattagtattctttgatctcccagtagtcgcaaaacgtgatcgcaaggcatatgcgagattccgtaaatttttattaaatgacggctatgtgatgttgcaatactctgtatattatcggatttgcaatggtgaagaggcggtacagaaacatatgaaacgattaagacagaacatcccaccagtaaatggagctattcgaacattaaaggtaaccgaaaagcagtttgaaaagatggagatattgctaggtgatactagtgccaatgaagaaattgattcgaacataacagattttttctgaaaaaagcttgccaactggcggctttttttaatttcagtaagtttttgatttaaaaattgatcatttgctttttaatttgatagttttttaggttttttaaaagaaataatatggcacaaccccttggggaataaggggttgtgagggaaatagcataacataacaagatttataggggaactatggcgctcctttgtcaacgtagctaacaaaatcaagcataacataacaagatttataggggaactatggcgtgaattcaaagctaactttgaatttcataagcataacataacaagatttataggggaactatggcataaagtcacttcccttacaatttaatatgagcataacataacaagatttataggggaactatggcgtggtattatatttactactctggtttttcagcataacataacaagatttataggggaactatggctaactgggtgatgggatatactccatattcagcataacataacaagatttataggggaactatggctaacctgggtggtttggaaactaatcaccaagcataacataacaagatttataggggaactatggctggttcaggtgttcaacctagcgattttttagcataacataacaagatttataggggaactatggctaaagttgtgttttagcataagtgccaacaagcataacataacaagatttataggggaactatggcaaccacattgatccatgcaatagcaagggagcataacataacaagatttataggggaactatggcctttcagcataagagtcctaagagagaggcagcataacataacaagatttataggggaactatggcggtagaggtcgaggagataggcgaaagaaaagcataacataacaagatttataggggaactatggccgaatcgcacgaacattcagcatatctcgaagcataacataacaagatttataggggaactatggcaataaagtagttctccttatattaaaggtaagcataacataacaagatttataggggaactatggcgatggcgttaaccatcccaccgataaattagcataacataacaagatttataggggaactatggcgcctcagatattattacttctaaaaaaccagcataacataacaagatttataggggaactatggcaaaacgccatttatgcaagtggtcaatataagcataacataacaagatttataggggaactatggcgaacgcccataaacattcaccttctatcctagcataacataacaagatttataggggaactatggcgaacgcccataaacattcaccttctatcctagcataacataacaagatttataggggaactatggcttaagattgttaaccataccatcaacttgcagcataacataacaagatttataggggaactatggctacagatgataacaagacaagtctaccaaagcataacataacaagatttataggggaactatggcttcagatacttctgatccttcttcaacaggagcataacataacaagatttataggggaactatggcactttacgacatacaccaagcctgaatattgtaaagcatcactttatttcctctcaaatagggttatcttgttcaaactcctccaggataattactgtactttcctgaagtaatatgctaaattttttgcatattataagggggagttttttaatgatttttttacacgactttggaattgggatagaagaatatgagaagaaaggaaaaaagaataactttccgttatttaaatggtgcccaaattgccaagcaattgcttatggaaacttgcacagacatggttattattggagatacggaataaaccaggaagaggaactacacattcctatatgtcgtttcaggtgtttggtttgtcaagtaacgatctctattttaccgagtttcttaattccctattttcaacatacattggataccatgatggaaagattaagcagtgtgcttaagggagagaaagtaaaaggaagtcgccagcaattagaacaacatctgaaacgtttttatgaaagcatccattggacccatagcttttttacagacgcaggatatcaattgggtttcacgaaggatataaaaaaagaagcccaaaaatacgtgacaatgatccaagattttggcgaatcaacctccttcttccgaaggagctggggtcatttatcatcctattttatgggcaaattaattctaccatatttaccaccaaaaaagaatactattcatcccacatagacttttcctagcactgatgggaaggacaaagtagaataaaagcaatggataaccggttatccttctataaaaaggaggaaaagttcatgaatgaaaaaacacgggaagaaattgctttatttcgttatggattgattgccccacttttgaatggacaagtaaagccaaaggattatttgaaagaaatggaagggaaaatgcatacgattccttattatggggaacgaaaggttgcagccaagacaatgcaagaatggcatctgcattaccgaaggaatggatttgatgcattaaagcctaaaaggcgttctgatcgagggggcgccagaagattatctccggatgacaaagatcatatactagaaacacgaaaaaaatttctccatatgcctgttagtgttttctacgaacaactaataggaaatggagaaatcaacaaaaatcaaatctcttactctactataaaccgattactaaaaaaacacaagatggcaggaaggaattatattcattatcatccagagaaagaacgaaaacgctttgcgcatgataaagtcaatgtactatggcaggcagatttatcacacggcccttatgtcccggttaatggaaaaatgaagaaaacgtttcttattgcttatattgatgattgttcgagattggtaccgtatggacaatttttctcttctgagaaatttgatggtttaagagaagtgaccaaagaggcattcatacgcagaggaaagccaaacatcatttatgcagataatggaaagatctatcggtcagaaacgctacagtatgcatgtgcccaattaggaattaccttagctcatacgcaaccctacgatcctaaaagcaaagggaaaatagaaaggttatttaagacgatacaaacgcgtttttatccactacttcaaaccaatccagctacctctttggaggaattaaatgagagattctggtgttggctcgaagaggattatcatcggagagtacacgcttccttagaaggaaaaacgccacatgaagtattccaatcgcagctagatcgaatcagctttttagaggacctctctattttagaaaccatctttttaagacgggtagagagaaaagtaaagcaagatggaacgattacattggacaagcagttatatgaagttccttcggaatatattggtcagcgaattgaagttcgtatggatgaacaacatgtttatgtatttgaggacggaaaaaaggcagctgaagccagagcggtcaccatccacgataacgcccatatcaaacgtggaccatcgccgttttctctctctgaagcaaggcaggaggagggaaaggatcatgtataaaacatactattccttagcaaaggaagcctttaccaaggaagcaacagcaacaaatgccttccaatcgacgagttatcaagaggcaatgaatggtcttgggtatttacaaaagtctaaaggaattgggttgttgataggtgaccctggtgctgggaagacgtacaccttacgagcctttaagaattcacttaacccagccttataccatgtcgtctattttccgttgtccaccggaggggtgatggatttctaccgggggctagcatacggactaggagaagaacctaagtttcgtaaagtagatttatttcgtcagattcaacaaggaattgaacggatggagcaggagcgtaaaataacgcccatatttattttagatgaaatgcatatggcaaaagatgcttttttacaggacttagctattcttttcaatttccaaatggattcgtcgaatccatttattctgatactagctggtctgccgcatttgaaaacgcggctccatttgaatcaccatcgcccgttggctcaacgaattattatgagataccaattccagccattgaataaagaagacgttactgcttatatggagcatcagttaaaactggcaggggcaaagatgccgatttttacagagacaggtttagaagctatcgctttacgttcgcaaggatggccacgcatcattaacacattagcttcaaattgtcttctgtatggagcgcagttaaaaaaacaacaaattgatgaagagattgttcgtatggcaacagaggaaagtggcctatgatgcggcaaggaatcatgatatttgatttacagggatggaagatctggattggccagcaagactatgaaacatttgaaggaatggcttttgaattacgtattcaaaagcattatttcaaagcatatttaggaaaagaagatcaagagtggtatgtgatattagatgaagatgtagcatttaatttacgtgtattcgaggtttacaaagttcgtatagaatacatagatatcacatcaggaaatgcctcttaaaaggggcattttttctggaatagtatctgaaataattttacaaagttttttcaaatcggaaattaaatgaataaacgagcacattactccagatttctccctgatataaaatggaaaaggatgtctgaattaatgtggtagtttacatgaatatgagcataacataacaagatttataggggaactatggcaggagaacagattgatgttaacaacagtgaagcataacataacaagatttataggggaactatggctgatgggctgtacttaacaatctattatcaagcataacataacaagatttataggggaactatggcacggatgacatggattcgaatggtttgcatagcataacataacaagatttataggggaactatggctgctgccgtttctaaaattccagaagaccaagcataacataacaagatttataggggaactatggcctctttttttaaatgaattgaacgaacttaagcataacataacaagatttataggggaactatggctccagtaacggtatcactatttaaagccatagcataacataacaagatttataggggaactatggcctgtacgtttctattccattcatctcagccagcataacataacaagatttataggggaactatggctaaaatattagctttgctagtggaaattggagcataacataacaagatttataggggaactatggctagtgaatacgataggtttatcagttacctagcataacataacaagatttataggggaactatggcccccactgctctgttatgtgattctgtgcgagcataacataacaagatttataggggaactatggctttatcctatcttcatgttcttgtcgcttcagcataacataacaagatttataggggaactatggcatcaagattaacctcttgaccctctttaaagcataacataacaagatttataggggaactatggcatccagatggcacgtttgttactggccgtaagcataacataacaagatttataggggaactatggctgaaatagacgcactaagcaaaacaatagaagcataacataacaagatttataggggaactatggcaggcaatgacttattaagaggcgagcaactagcataacataacaagatttataggggaactatggcccttcggcttgcaaaggttgaagcataagtagcataacataacaagatttataggggactacggtcttcacaccagagcagctcacacttgcgtgagcaaaacataccaagatctatagattatacgatatctttaatgtcatctagtttgattcccatgatttgcatattatcatgtcttttgatttcagtgaaattcattttcttgaaaaaatgtactgcattttccatagcttctaaaataacgaatgaaaaacctaagtaattagagatttgaatgcaagtatctaaagcaaataagagaagtagttcacctaatcctttttgacgaaatttcttatcaatgccaatataatgaatgcgaacggatgggaaatgttgtttattcatagttgatataatatcttcccaaccagcatgttttcttttagatttaactatatttatgtaatcagcgaataaagtataatatccaataaggtcattcgtaaaaaaataattgagttttacatgcgtgacaatcttgaagctgttgtgcctcttctttcaaaaactcctctacacaaatttcatcggaacaattaaaatggtcaacagcctcactatactttatggagagaggtgctgaccatattttatctatattgatttgtctcactgttgatcgatcctgcttttgatttttctagcttggcgaattttttctctcatttccaccattctctgttgatccgcagtcgagcgatcattagcccaatctataaacttttgctcttgttctttgttttgaaatttaatatccataggggtaacttccgctacttttgacatattgaatcagctccttttggaacataaactcacctccactatgagtttatgtaatattttcagatgttatactatcttattttttagtctacaataaatcaatcttaacgatatatgctaattatattatacattaaatatacaaatatttcaataactctcgctctgaatcagctctgaggagtaaatttatatcaaaaataagcgcaaactgtatttaaattcctctatcaagttatctttaatgtgaattttttccttgcaactttccaaccgatctagatcacatatattttgtgtgtaagaggaatgatgttgtaatgttatacgatcttgttatacatttaaagaatccagatatgaatatggctattatgggatggtaaataaagtgagttgttgaaaataaaatttatgtgcaacaaggggttactagataaatatgatttataggggaactatggccctccaatcttccttcaccacaaaaaaagcataacataccaagatttataggggaactatggctaaaaacctattttttattttacgatcgtgcaaatatataatagcatatcaagatttataagaaaaccatgaagtttagctagtaagttgtatattttaggattttaaactattaaacagaactatttgatattgaagataacttaaaagcatattaaaaatatgaagatattgctaggcgatactatcaccatgagaaattgactaaaacaaaacatattgtttctaaaaaagcttgtcaatcggcagctttttttaaattagaaagttttttgctgaaaaagcaatcattcatttttataaattagaatttttcaggtctttttacaacaaataatgcgccacaaccctttgaaattaagggttgtgaggggaatagcataacataccaagatttataggggaactatggcgcttgtcagattccctagtcaatgaacgaaagcataacataccaagatttataggggaactatggctagtatgatagaaggttttcagggggctggagcataacataccaagatttataggggaactatggctagtaaaacaaactacaaactatattgctgagcataacataccaagatttataggggaactatggcttgtttgttgggggtgtaccacatgatattagcataacataccaagatttataggggaactatggcagcacaagtatatgaaagcagtacaaaaccagcataacataccaagatttataggggaactatggcgcatgcaattacatgctgttccacggtgcaagcataacataccaagatttataggggaactatggccaaacgttatgcattattttatcggcattgagcataacataccaagatttataggggaactatggccacgactatcgcataacttatactctccggagcataacataccaagatttataggggaactatggccatcaagaatgccgtaataccaacgtttatagcataacataccaagatttataggggaactatggcttgagcatgtcacaaccagaggagctggaaagcataacataccaagatttataggggaactatggcatagggagataaaactagaattatatcacgagcataacataccaagatttataggggaactatggcccaaccaggcgaggttggatttttgtttgaagcataacataccaagatttataggggaactatggcctctactgtttatgtaagaaaattagaaaaagcataacataccaagatttataggggaactatggcgagaagcaatgccaagcacttttttaatagagcataacataccaagatttataggggaactatggcctgctaaactattaatccctagattattatagcataacataccaagatttataggggaactatggcgtttggaaaaatggatcgatcgtaatttaaagcataacataccaagatttataggggaactatggcagatatacaagccttatataatgatgatgtagcataacataccaagatttataggggaactatggccctataaaagcattatcc

SEQ ID NO: 2077 - DNA, 17956 bp, synthetic construct
  misc_feature 1..17956: note = Synthetic
  source 1..17956: mol_type = other DNA
ctatcggctgttaaccgatcggtcgtaggttcgaatcctacctgcggagccattggagagctgtccgagttggccgaaggagcacgattggaaatcgtgtaggcggctaccgccgtctcaagggttcaaatcccttgctctccgccatattaactgaaaaagtcatctatggccccttggtcaagcggttaagacaccgccctttcacggcggtaacacgggttcgaatcccgtaggggtcaccattttattatcgcggggtggagcagtctggcagctcgtcgggctcataacccgaaggtcgcaggttcaaatcctgcccccgcaatctttatataatatgaatttaaaaaggtcccgtagtgtagcggttaacatgcctgcctgtcacgcaggagatcgcgggttcgattcccgtcgggaccgccatttctattaagcctttccctttaaggcaaataaaaacggctcagtagctcagtcggtagagcaaaggactgaaaatccttgtgtcggcggttcgattccgtcctgagccaccatttaaaatattagctgtggtggggtagcgaagtggctaaacgcggcggactgtaaatccgctccctccgggttcggcggttcgaatccgtcccccaccaccattttacaggggcatagtttaacggtagaacagaggtctccaaaacctctagtgtgggttcgattcctactgcccctgccaatcacggcggctatggcgaaatggtcaacgcatcggattgtggctccgacatcgtgggttcgattcccactagtcgccccattgtatctgtagtataatgatattgtatcaatgggctatagccaagcggtaaggcaacggactttgactccgtcattcgttggttcgaatccagctagcccagtatgcggaagtagttcagtggtagaacaccaccttgccaaggtgggggtcgcgggttcgaaccccgtcttccgctccaacattttggcggcatagccaagtggtaaggcacgggtctgcaacacccttaccaccggttcgaatccggttgccgcctccatcttttataccatgcctgagtggtggaactggcatacacgttggactcaaaatccaatgccctcacgggcttgtgggttcgaatcccacctcaggtatcataagactttcaacaatcggttgagagtctttttctttgccacaaagagacatacaaatattcgggggaaaagcttactttttccgaaattgctgagggatataaagtaaaattgggggaaatatacatgaaaaagaatatcgcgttcagcattgccggactggcagcaattcctttaggtgtttattttgctttcacatccaatagcgaaagtcaaactgatgccattacgagtaaagaggatgcatccagcctggaaatgacagcgccggttaaatatatagctactaatgaggaaagaatggcagctcaaaaagatatcggggaaatatctgatgaattgaccctgatcatgagaatggtcgaaatgtcccttcaaaaggttaatatcgaaggggataagtttactcctgattcgactggccgaattcaaatgacgaaaggtaatatatattatattaaacaacaggctgattctatagatatttcaaggaatacaaagaatggggccttttcgtacgaaagtattataaacaggtggctcgaagggaattttgacaacattaccgatgaagtggaattccttttgagtcttacttcaaggccgtatggaaaatatgacggcggggaagtcactgaaaaaaccagggtgcaagaacagcaatatattcagcgtttttttgaaacaaaacaatcgaaatgatactaagaaagcgcaatacgaacagccttagacgacgagcgcaagacaaattttgatgagggagttcctcagtcaccacagcaaagcaactgactttcatcatgaagcatccccgattatgcttcatgcagctttgcgacgagctgaacagttgcatccccgaataagctttagtgcaggagcacattcttcctgaatcaacttccttgcaggtttgatcctttcgccgatggcgcctggagatgggagctggtttttcgaacttgacaatatacccattagggtatatgatatacatgtaacactcttactgccgggtaattacaagctctcgcctttagtcgtgagtaattgacgtgattccttccaacagattggaggggaatatgggtatccgctacttgcaaaagaaaggatatcatatccttggctaccaaatccccgatcatgagaagacttcttttaatagagccaaccataaaaggaggaatttaaatgaattatgatgatcgcatgaaaaatagaatcaaacgtattgaagggcagcttagaggaatattaagaatgatggaagaggataaagattgtaaagaagtgattacccagttgtctgccgcacggacggcaatcgacagaaccattggtgtagtagtgagtgcgaatctggtggaatgtgtacaaaaggctaatgagtcaggacaggaaagcacggagcaacttgtaaaagaggcagtgaatttattggtgaaaagtcgttaaataaaagagggttgacattctcttttatttttaataacgcaatacccataggggtaagggtaactatttttttaaatcaaataataccagcatgggtatagggagggaaaacaggatgacagagaggaaaaaaacaacaatcgttctgttcagcggggattacgacaaagcgatggcagcatatatcatcgccaacggagcagcggcctacgatcatgaagtgacgatctttcacacattttggggattgaacgcgttgcgcaaggaggaaagtattccagttaataaagggttcatggagaagatgtttggcaaaatgatgccgagaggtgcggaccggatgggattatccaaaatgaactttgccggtataggacccaggatgatcaaagacattattaaaaaacataataccgtcccacttccgcagttaatcgaaatggctcaagaacaggacatcaagctagtcgcctgtaccatgacaatggatcttcttggactgaagcaagaggagcttttggatggaattgagtacgcaggggttgccgcatatcttgccgatgctgaaataggccatgtcaacttgtttatttaacaaaaggtttgaagaatgatggaaaatatcaatattaacattttcgcattgctggtcttgatcatcattcggagaatgcttcctccaaaaggaataaggcacctgactgcgagtgaactagcagggatataaagcggtaaacatggccggcggaatgccggattgggaaggtaaagttgaaaaatcaaaaagggggaaaaatttgtgaggaacatcaaatcagatataatcctggatgcaaagggactatcatgtccaatgccgattgtaaaaacaaagaaggcaatgaaagaattggagcccggaaaagttcttgaagtccaggccactgataagggctcaaaagcagatatcaaagcttgggccgaaagctcaaggcatcactacttgggtacgttggaagaagggggcgtgttgaagcattttctcagagagtcttccaatgatgaagcaggcgggaaaaagtatcctcatgtagtcaataacgatgagctgaaagagaaaatcaaatcagacccaaatattgttattctagatgtaagagaggcagctgaatatatattcagccatataccaggcgctgtctgcatcccgatgggcgaattggatgaaagagctgatgaaatagggaaagatcagcaaattttcgttgtgtgccgtacaggaaaccgaagcgatatggctgcgcaaaagttgaagaaaaagggatttgaaaaagtcttcaacgtcattcccggaatgagtgaatggaccggggataccgaaggtattcatcaaaaaggaggccaacaataatggcagttacagtttatacaacaacaagatgtccatattgcgtcatgttgaagaattttttagaggaaaaggaaatagtgtttaatgaagtgaatgttgaaagagatcctgaaaaaatgaaaaaattgattcagacgactggacaaatgggcgttccgcaaactgaaatcaacggtcaatggatcatcggatttgatccgcaaagcattatggaggctttgcataaataatagagggtcaggcatcctttagtactttaccgtgtcgggggactgtcccctggcagctatgcaaaaaaaattttgatttcgataatacctaggggggtagaagaatggcgatatctgcaatgacatccaaggaagtaacgaacaaaatcatccacaatgaaaatctgttcatactcgatgtccggaacgaaagtgactttcaagactggaaaattgaaggtaaaaatgtggagtatttaaatatcccttacttcgagcttcttgatggagtggaagaaattttagataaaattcctaacgataaagaagtgctcgttgtctgtgcaaaagaaggctcatctgtgatggttgctgaaatgctctcagaacaggggttggatgtctcataccttgaaggcggtatgaaaacatggagtgaacatttggaaccggtgaaaataggagacttgaaagacgggggcgaaatttaccaatttgtccggattggaaaaggctgcttgtcatacatggtcatttccggcggggaagcagcggtgatcgatgcaacccgtatggcagatgtttttactgaatttgcgctaagtaaaaatgcaaacatcactcacgttcttgatactcatcttcatgctgaccatatttcaggcggaagaatgattgcggagcagacgaatgcattgtactggctgcctccgaaggatgcgggggaagtgacatatgcctatcaaccattgaaagacggcaacatcatcaccatcggcaatacggccattgatatctacgccctgtattcgcctggacatacgattggctccacgtcttttatcgtagatgagaaatatctgctatcaggagacatcctgtttgtggattcgattggaaggccggatcttgccgggttggcagaggattgggtgggcgaccttcgggagacattgtattcccgctataaaaaactgtcggaaggccttattgtcctaccagcccattttatgattatagatgaattgaacgaggacggcagcgtttctgaaaaattaggaaccctttttgctgaaaaccacggattaaacattgaaagtgaagaggagttcaggaagctggtaactgaaaacctgccgcctcagccaaatgcttatcaggaaatacgtgaaactaatatggggaaaatcaatcccgatctggaaaaacaacgagaaatggaaattggtccaaatcgctgtgcggtaagataaagtgaaacttcaatcagtgggggttttcttcatccccattgagagttagttgaacgaatcgggcttttacgggcagttgatctcccacctaaactactccgattcatctaaagttttgaggtgggagtcttactgcccgttaatgcgggataaatttaataggaggaataacaatggaagtaaccaaacttttagatgcaaaaggattggcatgccctatgcctatcgtaagggcaaaaaaggcgatcaatgagttggagtccggccaaattctggagatccatgcaactgacaaagggtcaaaaagtgacttgactgcatgggcaaaatccacagggaacgaaatgttgaaagatgaagaagaaaatggagtatttaaattttggattaaaaaagcctgataataaagggaaccggtttggttcccttttcaagataatagataccttttttgctgggatgacatttaagaggtcaggcatgtacatttccaaagggggttaagcgatggattttacgtttatcatagtcatctttttaattggctttatcggatcgtatgtttcaggcatgctcggaataggcgggtccatcattaaatatccaatgcttttatatatccctcctttatttggattagcggcattcagtgcccatgaagtttccgggatcagcgccgttcaggtcttttttgcgacaatcggcggcgtatgggcttatcggaaaggcggctatttaaataaaacattaattggatatatgggaatcagcattttaattggaagttttatcgggggttatggctctaggctaatgtcagagggcggaattaacttaatatataggattttggcattgatagctgcggttatgatgtttgttcctaaaaaaggaactgatgatatcccttttgaccaggtgggatttaataaatggcttgcagcccttcttgctttcattgtcggtttgggagccgggattgtaggggcagccggcgcatttttgttagtgcccatcatgcttgtcgtattaaaaattccaacacgcatgaccatcgcctcgtctttggccattacctttatatcctccattggaacaacggtagggaagctcaccacaggacaggtggactattacccggcattgatcatgattgtcgcaagcctgatcgcttcgccgctcggggcaatggcaggaaagaaaatgaacacaaaaatattgcaaatcattctagctatattgatatttgctacggctgttaaaatatggttcgatatcatttgactttttcatataaaaagcccgctgatttcgcgggcttttaaactattattgaattatcctattttcacactcaggttcgaccggctgcggagccactcttgattttttaagtgccggataccttttcacggcaagggttggaaataaaaataagccgaaataactagaaaacccagcaatttcagcttagtgctacttgaaaagcggagaagcttttttcgtcaatttctgtctcttctgccaagccgatgaaacaaataacgtcaaaatgagaacaattaaaccaagcaaaaacggataaatcatgtggatatcatacatcatgcctgcactaagcggtccaagaacattcccgatactcatataggaattgttcatgcccatggcgaatccctgttcatccccggccagtttggaaataagggtgttcaggactggtcttagaatagaagttgccatgaaaataatcaatgtaacgataaaaaagagtacatagcttgaagcgaatatagaaaataaaaatccggcagccgaaacccccaagaaaatattcatcactttaccttcgcctaaacgggaaacaaggcgatcgaccacaaaaagctgcacgatgacgctgataatgcctgaaacagttaccatgaccgctatttcctgcggtgtcgctttaaaagcattatcaagataaagaccgataatcgattcataagccatcagcccgaagctcatgacaagtacgatgatcagcggaataaaatagggtttgtggacagactgcaccagttttttaaccatgggatcgtccgcgaccccatcgattgtcgttccatcatctttactttcttttagtacaataatagaaaaaacaacagccgccacactcacaatcgcggatacaagaagcggcattttcagcccgtagtccgctaaaaaacccccgacaccgggaccgatcacaataccaagtgacatcgcagctgagatatagctgtttccttttgcacgctgctcgagggtggtgatatcagctacataagcgaatatggccggaatcaacagggcggccccaattcctccgataacgcgcgaaaaatataagataccaaccgaattggaaaaataaaagatgaacatggaaagtgccaatccgctcaatccataaatgatcatttttctccttccgtattggtcggtccatttacctgcaatcggggacatgatgaattgcgcgcctgcaaaaatggcaatcatcagcccggcagccgttccaccttggccgatggacactaaataggcaggcataatcggaatgatgatcccgaaactcccaatagcaataaacatgttgaccatcaaaacaaacaattttcttttttgatcaggctgcaccataatcccctcttttctttttctaataaaaacatagcttcttaatgtaacaatacacggaggaaaaagtcaataagcttttctaaattttttaaaataaaacagccgccggtttgcccggcggccagtaacttataatacgaaagctgcaatcattccgaatatgaaaagcggaatattataatgaaggaatgttggtacgcaagtgtcccaaatatgatggtggcgtccgtcggcattcaatcctgcagtcggaccgagcgtgctgtcggaggcaggggaccccgcatcaccgagcgccccggccgttccgatcaaggcagccgttgcaagcggggaaaggccggcagctgcacaaagcggtacataaagggctgccagaatcgggattgtaccgaaggacgatccgattcccattgtaatgatcaatccgacgagcagcatgaaaaaagcaagcagcattggagagttccctacaaggcctgtcgtattctccacaagctcagttacagaacccgtttccttcaagacagttgcataaccggaagctacgagcataacaaacgcaatcattcccatcatgccgataccttcttggacaactttatctccatcatgaaatttaacgactcttgtaatgaataaaaggatgatacccgtcaaagcgcccagaacgagagacttagacactaattgaacgactaaggctgcaatgatagcgattatcgtaaaggtatgctccattttccaagcagccggagcaggttcgtccgtaatgccttcagccatgtcgagttccgcaggaggcgtctgtatggccggtttcgagacacgatcttttctgtaggaaataaaaatggcaatcaataagcctacaatcatgcctgatccgggaatcagcatggacagatttacgtcactcaatgaaatattcataccgttggaaatcatttcatcgcggatgattccgtggaaaatcaatccgaaaccggcaggaatcatgatgtatggagccttcaagccaaatgttaatgcggaagcgacagccctcctgtccaatttaaggcggtcaaacaatcctagaagcggcgggattaaaatagggataaatgcgatgtgaacaggaacggcattttgtgataaacaggcaattcccgcaatcgccagtgcaagcatcgttttttttcctgtaaagattttcagcatttgattgaccaaaagtgtcgttatgcctgataggccgatcatgacagcaaaaatcccgagcaaaatatagctgagtgctgtgttggcttggccgcccattcccgaaaccatcagattcacagaatcagagaaattcattcctgatacgaggcccgcagtcagggaggagatgaggattgcaaataagacattcacgcgaagaaggcttaatgcaaccataacaattacactgatgataacagcattagtcagcatgagttaacctctttctattatttaattccatactctatcatccatttgactggtgaaaatgtcaacggtgaattgcagaaaggattagttttgcgggcggtctagtttgcagataaaatgaaactaaaaaattagattatattgacaaaaattataattatgttattatagttacatcgacctaggggaaggtcgatgtaatcatatcacatcaaggtttacaggtaagttattatggtaaggcattaagccgtggcgttggggatcgcctagccctgcaaattttgcagggttccccacaacatcaatgactaatgggatttagtcattttttttatacctaaaacaggtactttgtaccaaatatacataaataaggtgattctatgagatatagcatagggctggatattgggatatcttcggtaggatgggctgttattaatttggataagaatcggatcgaggaccttggaacaagaatgttcgatgctgcagaaaatcctaaaaacggatcatcacttgcagcaccgcggcgtgaggccaggtcaatgagaagaaggttaaggagacgtcgctaccgtgtcagccgtgttcgtaaattaattattcaatcgggtctgttatccgaagtggaagccgatcagctttttgactggcaagatggcgacttggacatttggctaataagagtaaatgcattggaaaggaagctgactgaccgggaatttgccagggttttaatccactatgcaaaaaataggggatttaagtccaatcgtaaaagcgagacaaacgaaggtgaaggcggggctttattaaaagctgtcagagcaaatgctttattaatggaaggaaaaggttatcgtactgttgctgaaatgcttattttggatgaaaagttcaatggcctgaaacgtaacaaaggtggagagtattcccacgttttggcgaggagtgaaattgaaaaagaaataagagaggtattcaagcagcagcgcgcatttggacatagctttgcaacaacggaaaatgaagaagcatacatcaatatttggagctcacaaaggcctttctctacacaagacgatatcgccaagcgaattggaaattgtacattcgaagaaaatgaaaaacgagctcctaagttttcctatacttttgagaaatttcgggcgttggataagattaaccgcctcaggattatttctgacagaaatcctcagcgggcactctccgatgaggaacgaaacaatgttttggaaagtataatgaacaaaaaagaaatgaagtataaggatcttcgaaaaatactgcaattagaagataacgagcgtttcaatgaactattttatgatccgggcgagacgaacgaaaagaacgaaaacaggaaatttatctcacttgacgggtattacgaaataaaaaagattattaaagaagtggaaggcaagacgttggcagagtcatatcggccaattgactatgatacaatcgcctatgctgtcacggtttataaagatgataacgatactcgtgattatctgctaaatgatttagtgaccaatgatgggaagcgaattaggaacatggcaaatagaacgtacagtaatccgcttattaatgagctattaaatctgtcattttccaaattcgggcatctatcattgaaagcgctgaataaaatcattccttatttggaagaagggcttctttatcatgaagcttgtgaaaaggcgggttataactttaaccagaaagtaggaaaagaaaaacagaaattgctgccggtcattcctgcaaatgatattgcaaatccggttgtcatccgctcactatcccagactcggaaggtattgagtgcgattattaaacgatatggttccccatcggctatctatatagagatggccagggaaatgggaaggcattataacgaaagacgggaaattgaaaagcaatacaataagaatcgaacaattaatgaaaaggccaaaagccgcattcaggagctccatccggaaatcagtgatccgagagggcacgatattttaaaatataagctctgggaagaacaggatggccgctgtgcctattcgctttatcccattccgatggagcatctttttgattatggatttgcagaagtcgatcacattatcccctacagccgcagctttgatgacagcaatgccaataaagtattggttttgacaaaagagaatcaaaacaagcaaaacaggacgccatatgaatggtttggaagtgatgcagtcagatgggatcagttcatctcatacgtcaattcattaaaggtccggaaaaagaaaaaggatttgttgttaaaacagaactttgacgacgaacaggcagaacagttcaagacaaggcatttgaatgatactcgatatattactagattcctgaaaggctttatcgaggataatttgaaattccgggaagaaaaaggaaggaaacaatatgtttttacggttaatggggcatatacatccttaatgaggaaaagatggggattcaacaaaaatcgtgaagaaaatgatttgcatcatgcattggatgcagtactggtagcagtaagtcttcctttcaggcatcgtgtgagcaattattttaaacatagtgaattgcatgcctcgcaacttctcaagcgcaaaggagagcgtttcccggagccttgggaaggttttacaaaagaagtggaagcgagaatgctgcaagaccctgaaactcttaagttggcattggagagcctgtccctggacagctatgacaacgattttatcaacagagtcaaacccatctttgtctccagaatgccgaagagatcggtcaagggacaaattcatgaggaatctatcaggagacatcggggctatacggaaaaagggttaaaccttttggtgaaaaaatatccgttgcaagacattaaatttgataaaaatggagactttccaatgtatggaaaagggtctgatcctaaaacatatcaggcaattaaagaaaggtttttggaatacggggatgctgccaaagcattcagcacacctttatataagccatcgaagaatccggagaaagcaccgattatccggagtgttaaattagaaaccacagctaaccaggtgttccatttggatgataaaacagttgcagaccacgcaagcattgcacggactgaagttttcaggcataaggagaacggcaaatattatttggctcctgtgtatgtaagtgatgtgatggcaaagagagtgcctgagaggtttattactgccaacaagccatataatgaatggacagtggtaaatgatgagtatgaatttttgtttaatctatttccaaatgatgttattagagtagtaatgccaagggaaaaagaatctaggacatggaataaaacaaacattagatggactgaaggtttattctattataagggagtagactcacgtactgctgcaatatcattgattgatcatatgaacagcttcctcgataggatcggttctaaaaatttattattgattgagaaataccagactgatcctctaggtaatttgacaaaagtacaaaaggaaaagcgttatggcgtataggcatattgtaatcaggaatccggcaaagatctcaacatcccatgaacaattagtaattaaacaggaagaatctatcaaaatccctttggaggatattgtgaccataacgcttgaagatcctgctatcacgattacgaatgggttattaagcaaatgtacggaatatcatgtcgaactcattgtctgtgacggaaaacggatgccgagtggaatagttcaaccgtttcatcggcattctaggcagaagcaagcattggatatgcaactatttttagggaagccttttaaaaagcggatatggcaaaaaattgttatcagaaagcttgaaaatcaggcacgttgccttgaattggttcataaaggtgaagagtctcaaaaattatattctatcagccggagtgttgaatccggcgaccgaacaaatagagaagcgtatggcgcaaaactttattttgaaacgctttttggtgcaggttttcaacgaagagagaacaatgtgtataacatctctttgaattacggttatagtattattcgttcactggttgccagagcgcttgtaaggtacggatttacccctagcatagggatttttcacgacagccagacgaatgccttcaatttggctgatgatttcatggaagtgttgcgcccatttgttgatgtgatcatagttaataatgtgaaggaagaatcagaatggtcttcagagataagaaagaaattatttgaagtgttggaaattgaagcgacatggaaaaacgaaaggctaaatgtaacccatggagtggacaatatgatcaaaagttttgtatctgcatgccggcagcaggatgcaaatctattagtacttccagaattaaccaatttaaacgtacatacatatgagtagatacatgaggattatcgttttctttgatttgccggtagtacttccgaaggaaagaaaagcctactctcgtttccgtaagtttttattgaatgacggatatacaatgcttcaatattcagtatacacaagaatttgcaatggggaggatgcggtccgtaaacatatgaagagattgcaggagaatctcccccctgttaatggggccatccgagcaatgaaaataacggagaaacaatttgccaatatggagattttattgggtacaacgacagcagaagaagaactcggtgttaaaaaagtagatttcttttaaagagtacttgcaatttattttgcaggtattttttttacagttatttctataaaaaataaaacaaagcggataaatcccagggataaatccttcttttttggaaatacaaaacccctgaaacggggaggaatcaagggttttgcggccatgtatcatatcacatcaagatttacaggggaattatggccctctttttgtttacatcgttgcaaccaaatcatatcacatcaagatttacaggggaattatggccagtttcctaataggaacttcggatcctctatcatatcacatcaagatttacaggggaattatggctgtccacgctgttttaataccactgctggaatcatatcacatcaagatttacaggggaattatggctttcaagatcatctccctggatgctctcaaatcatatcacatcaagatttacaggggaattatggccactgggtaggacaatctctttctcttcttatcatatcacatcaagatttacaggggaattatggcgtttcattgagatcattattgatatgaatgatcatatcacatcaagatttacaggggaattatggcgtaaaaagtttatacccatattctattttcatcatatcacatcaagatttacaggggaattatggcccgctggtttaccttcaatccgaaagttccatcatatcacatcaagatttacaggggaattatggcccagcttcacgtggatccactttctttttcatcatatcacatcaagatttacaggggaattatggcgcaaaaaattatgatatggattatcttgcaatcatatcacatcaagatttacaggggaattatggcaacgagggcaggcgcaccttgtgggattggatcatatcacatcaagatttacaggggaattatggccacctcataaaaccattccctgtcccttgtatcatatcacatcaagatttacaggggaattatggcgctgtcaatccagctttcccacctgcaattatcatatcacatcaagatttacaggggaattatggcactcgataataggaatattccaatccgcctatcatatcacatcaagatttacaggggaattatggcatccatgatagaccattcagccaatccgcaatcatatcacatcaagatttacaggggaattatggcccttgtactcatggatttcatcgaatatccatcatatcacatcaagatttacaggggaattatggcttatggttggacgacacgtgtcaaaagcggatcatatcacatcaagatttacaggggaattatggccccagtcgttaaatagatgccttttacattatcatatcacatcaagatttacaggggaattatggcgtttttcgtgatcacgaattcatccagcatatcatatcacatcaagatttacaggggaattatggccctaatcctttcgcttccaccttcgtattaatcatatcacatcaagatttacaggggaattatggccctaatcctttcgcttccaccttcgtattaatcatatcacatcaagatttacaggggaattatggcaggggtgaagggactatttcccgaaggaggatcatatcacatcaagatttacaggggaattatggcttagtcggggcggtattctttaaagcgcgcatcatatcacatcaagatttacaggggaattatggccctacctttatgctccaggaactaaaggagatcatatcacatcaagatttacaggggaattatggccatcttttacgatgtttgttccgactgattatcatatcacatcaagatttacaggggaattatggctattgcaacgaaagagttaacgagttatacatcatatcacatcaagatttacaggggaattatggcggtttcggatggagaacgatacaacatgatatcatatcacatcaagatttacaggggaattatggcttctatcgtgtgatatgtgacatcgtgccaatcatatcacatcaagatttacaggggaattatggcacatgagcgcacctaaccgtcttagcttcgatcatatcacatcaagatttacaggggaattatggctaattctgcgagattgtaaccccacgaaagatcatatcacatcaagatttacaggggaattatggcattacctgcgcgatttggtcgattaaagtaatcatatcacatcaagatttacaggggaattatggcgacagtttttgtccttctgatcctctttccatcatatcacatcaagatttacaggggaattatggcaaagctctagcatcttgcgaaggattttttatcatatcacatcaagatttacaggggaattatggcgcgcaatttaaccgtgttaagcataattgcatcatatcacatcaagatttacaggggaattatggcaggactggaccgatgaacattcgcaagaggatcatatcacatcaagatttacaggggaattatggcttggtacaccggtgtaccgtttgaaaaccgatcatatcacatcaagatttacaggggaattatggcattggcgagtatgtttcctcgaacctttaatcatatcacatcaagatttacaggggaattatggcaggaagtgatgcctgatcggcctcattacaatcatatcacatcaagatttacaggggaattatggcaaataaaaaagccttattcggctttcggctatcatatcacatcaagatttacaggggaattatggctcgaatgtaacagaagcgtgttttgttacgatcatatcacatcaagatttacaggggaattatggccagaaaaacacgaatatgagaaaggctatcatcatatcacatcaagatttacaggggaattatggcctctaatgacctcgctaacttcccgcctaaatcatatcacatcaagatttacaggggaattatggctaacaaacctgttgttacataactagcattatcatatcacatcaagatttacaggggaattatggcaaaacaccggaagaaaagcaaagattaatgatcatatcacatcaagatttacaggggaattatggctccgccgtgggaatccgataaagaaatcgtatcatatcacatcaagatttacaggggaattatggcagttccgcctcgtattgctcaagttccctaatcatatcacatcaagatttacaggggaattatggcagagtagttttttcattgtaaagggcctccatcatatcacatcaagatttacaggggaattatggctcctattacgagcaaacgggcatgaagccgatcatatcacatcaagatttacaggggaattatggctatcgcaggtatccgtagcattgtcggcagatcatatcacatcaagatttacaggggaattatggctaatcaccaagcgcaattgtggatgcattaatcatatcactgtaaactagcacattatttcagacacctaatttcaaattaactccggtgaaaaacctgaa

SEQ ID NO: 2078 - DNA, 17268 bp, synthetic construct
  misc_feature 1..17268: note = Synthetic
  source 1..17268: mol_type = other DNA
gcttcaggcaaaagtttatcagaaggagaacgttctcttttaagtgcatttcaggaatctgccatccgttttgctgagcgtgaggaaggaacattggtcccattttcggcattttatgaaacaattgaatctttcctagattcatccatccgtacagtcattatccatgctaagaaaaattcccgactaaaagacccagatgttgaaattctaaagctattatttctaatcaaatatgtgaaagaaatgccatctaatttagaaaacttatcaactttaatggtcgatcatattgatgtggataaattggatttaaaaaaggaaatggaagcatcccttattcgattggcaaaagaaaccttaattcagaaaaatggcgatgaatatatattcttaactaatgatgagcaggacgtaaaccgcgaaattaacaatatgcatgtcgatactgccgaagtgattcaaaaaattggtgaagaaatttttggtggaatttattctgataaaaaatatcgctattcaacaaggtatcattttagctttaacacaatcattgatgatcggccattaggaatacaaacacatgatatcggattaaaaattattactccattttatgaagcagcagctgacttaaaccaatctgagctcaagatgatgtcgatgcgtgaaaataatgtcattttaaggttatctgctgatacctcttatctggacgaaatggaaaatattttgaaaatccaggcgtatttaaaagtgaaaagtggttcatccgtttctcaagctattgaggatattaaaacccgaaaagcacgtgaagtgacagaaagaaaagagcgtgtgacaacacatttaacagaagcattaagaattgctgaagtatatgtaaattcgcaacaactagatgtaaaagaaaaaaatcctattgagagaattaatgatgcatttacggctttaattgaaaatctatttagcaaactaaattatgtaaaagaatatattgacacaacaaaacagttacatgatttacttcaagaaaatacaagccaattaaccttaacgaatgatgacgagcccaataaacttgcaaaccaagaggtaaatagctatatagatagacttacttctcgaaaacaacaaattacaatcaaaggaataacttcttacttttcaaaacagccgtatggatggaatgaattagatacgaccgccataattatcaaactttttaagggacaggaagtaaaattagaattaaaccaatcgactttaaatacatctgatcgtgatattctgaattatgtaaccaaacgtgattatgttgataaagtaattgttaaaaagagggaaaggatttctcagcaattaattaaacttacaaaggatatcatacaagacatgtttgggattacagctgtcccaagtgatgaagatggtttaatgaatcgttgtaaggaactattacaaaaagagcagaatgaaatcaatttactgctagcgaattacagaaataaatcatatcctggacagaacatcttaactgacggtaaaaagcccattgaaaaattactgtccatttcagatacaggaactttttatcaacaaataaaagaatttgaggatgatttattggattatgctgaagatgtaggcgatgtaaaaaagttctttgaaaaccaaagggacctttacgataatgctgtcaaacgcctagatatctttgagaataatcgttcatatgttacggataaaaaggttctagaaattattaattcaatagaaaaaatagtcaaacatagtgaaccatacgataatattcaaaaattgcctgggttatataaggactttgatgatcttttcgttgttttgctggagaaagagtgtgaaccaatcagtaaagcgattgaccaagaccttaaagttgtgattgaagagttatctgaagatgccagtataaaagaaaggttcagtggaacatttagaaatagttttgcagacttaaaaaatcgcctagaacgtgtaaataatttctatgaagctattgcgatgcaaacagaaagcgatcgactgaaagtacgttgtatagatgaaatcacgatcgaaatcgctagacgtaagcagccagttagcccatctctaataagttcaccggtagggacggaaggcacaataattgttgaaccgtcagcaggatataaagaaacaaaaacaattagtaaaacgactgttcttcgtggcacaaaaacaattgaaaatgaagatgacatagaaactttattaaacgaattacgtaccgagttaaaaaaggaactaaaagaaaatatgataataaggttagtatagctcatcctagattcactataattggttttaaatcctaaagggagaggataaaatgccacaaatatgtgagttttatggaatgaaaatatatctttattttgatgatcacgatcccccacatttccatgtaagaggaccagataaaacaagaattaatattataaatggggaatatttagatggtgatcagcctttgccacgtattaaagagaagaaggtattgaaatggctggagatgaataaaattgatatgattaaggcatggaatgcatgtaaagaaggggaagttcctagtaagattccaccattaccctaggaggtttttttgatgagagaaatttgtaaagtaaaacctttacctttatccggttggttattaatcgaatttgataatggcgaaaaaggacttgtggatattagaccttctatgaacggagtattaaacatactaaaagatgaaaaagtatttagtcaagtgtacgtagatgaagatgccggaacggtagcttggccaaatgagttgcacattgatcctgatactttgtatgaacgtagaatttccataaatgaaattaaatatttagcaaaattaatggatgatcaacttttcgataaattagaccttgcatgaatttgaatcagtatgagaagggaagaagatataaactttttccctatttgtacacaacgggaattggaggagcattacatgaataaatcagcaataaaaaactttgctgttactgctcgggtcaaattaatggatgccatccaacataaggcctatgagctcggaatcactaaaaatgaaataaaagaaccagatgtttaccaagatggttttcgtattaatgatatattttttagaaaatttcagaagaaacagcgggacatgctcttacaaaaaatcaaagacaagggatgtgatcaagtaattgaggaagttgcctatacatggtttaatcgattgatagctgtccggtttatggaagtaaatgaatacctcccaactggggtaagagttctttcatccatagttagtggaaaagtagaacctgatgcagtgtcggaagtattgaacatagctgacgatctagagcttgatttagacgttgtttaccgtttgcaagatgaaaataatacggaagaattattcaaatacatattagtaaaacaatgtaacaaactcggtgaaataatgccgatgatgtttgagcagattgaagattatacagagttactactgcccgataagttattgacagaaggttctgttgtccgtgatttaatatctatgattgatgaggaagattggaaagagcaagttgagattattggctggttataccagtattatatttctgaaaaaaaagatgaagtattcgctgatttgaaaaagaacaagaagattacaaaggaaaatattccggcagccacacaattatttacaccaaaatggattgttcagtatatggttgaaaactcattaggaaggttatggcttgaatcgcatcctgataaggaattacaaaaagagtggaagtattacttagaggatgctgaacaagagccagaagtaaaagaacaattagggaaaataataaataaggagctttctcccgaagaaataaaagtgttggatccttgtatgggttcagggcatattcttgtttatgcttttgatgtactatatcaaatttataaaaatgcaggttatgcagaaaaagatattccacagttaattttagagaaaaatttatatgggctagatatagatgaccgtgcagcgcaattagcctattttgcattaatgatgaaagcaagaagttataaccgtaggatatttagaaaaaagattgaattgaatgtttgttctatacaggagagcaatgggatttctgaagaaactttagattattttgttggaaattcattagaaaaagaggatgtccaatatttattgaatgtatttaaagatgcaaaagagtatggttcaattttggatgttaataatatcgattttgaatcaatagaacagaaactagataatatgcaaatacttgaagaaatcagtgatatgttttcgctggaatatcgggaccttattcttgaaaaattccctgctattgtcaaacaggcgagaatcatgagtcagaagtatgaagcggttattacaaatccaccgtatatggggcagaatagtatgtctcaagtactaaaaacatacctcggccgtcattatagggattgtaaaattgatttatttgcagtatttattgaaaaaataaacaaattaaccaaagaaggttattttaatgccacaatcaatcaacatacatggatgtttttaggtagctttgaaaaattgagagaaaaaatgttggaaaatcaaacaataataaatttattacatcttggtacaaaaacattcgaggaagttggcggggaagttgtacaaagtacttcttatgtattaaaaaaggtgaataatataaattataattgtgtttatgtccgactagtaggttattcaaattccgttttgaaagaaaaagaattctttagtgaagagaacagatattttgttaagcaaaatgaaattaaaatgttgccaaactactcaatatcatattggggaagtgaacaaacaagaaaaatattcagagatagtaaaaagctaaatgatatttctactccaaaaatggggatgcgtacaggcaataatgagcgctttctaagaaaatggtatgaggtgggctttaatgatattggacttagtttatccaaaaatgaagcatttgaacaaaaccacaaatggattccctataacaaaggtggggattttaggaaatggtatggtaatcatgattatgttgttaattgggagaatgatggatttgatataaaagaaaataccaaattaaactatcctcaactcggtgaaaatttagggtggaaaattactaatgaagaagactattttaaacctactatttcctggtcgaggataagtacatcaagattcggaattagatattatccaaaaggatttatatttgatactgcaggttgttgtataattgatgctccaatttcattattaggattactggcaagtaaagttacatcttattttttgaatatgattaatccttcattggcttttcaagttggagatttaaaaaaattacctatacttaaatatccagaacaagaaattcacaaaattactttacaaaatattgaattatccaatgtggattgggattcattcgaattgtcatgggatttcaaatattccccgcttttaattaataaaacacacactgaaagtatcagtatttcttatgaaaagtgggaattgtcggtaaatagtcggattgaaataatgaaacaaaatgaagaggaattaaaccgtatttttattgacatttatggtttacaaaatgaacttacgccagaagttgatgataaagatgttactgttcgcagagcggataaagaacgtgatattcagttttttctttcgtatgctgttggctgtatgttgggccgctactctctaaatcagggggggctggtctttgctggtggcgaatttgatgaatcgaagtatgagaagtttaaagtcgatttagataatatcatcccaattacagatgatgaatattttgaagatgacattgtcagtcgttttatagattttgtccgtgtgacatttggtcaggatactctagaagaaaatctcagttttatagccgatgctttgggaaaaaaagtaaacgaaacatcccgccagcgtatccgtcggtattttgtaaaagagttttataaagatcatcttcaaacataccaaaaacgtccaatctattggttgtttgacagcggtaagaatgatggttttaaagccttgatctacatgcatcgctatgatattgggacagtggcaacaatcagaacggattatttgcacagattacagcgtaaatatgaagcagaaatgtctcgtttagattttatccaagaatccgatgtttccacccaggaaaaaacaaaggctaaaaagcaaaaagaaaaattacaaaagcaattattagaatgtcaacaatatgatcaagtcattgcccatgttgctaatcaaaaaattgaaattgatttggatgatggtgttaaagtgaactatgaaaagtttcagaatatcgaagtaccacaaggtgaaggaaagaaatcgcttaaagcaaacttattagcaaaaatttaagttctaaatagtaatatagtagattcggcatggattcctgctggagctattataaatgttaggttggtgtattatgaatcttaaagaagtaaacagggttttacaagatacatttaataaggaattaaccgatggaaagaagcgccatgttgtattttggtatgatgaagagggggaatttattgaagatattgatagcctaaatcttgagaatataaaggtttgggaattaacgcaaaataatttatttgccacgaaatatgaacttgagaaaaaagatcctaattccaatttcttaatctatgcaaatatggctaagcctaatccaaaagaggattggctactagacgtttacaagtatagtatcgaatttgcgacggacagaatcactgtcattatgcgggacttaggtgtaacaaatgattcacttcgtcctgtatttaagaaatacgcgaaatttttcaataataaagatagatattctacatttcaatcttataatatccaagaatatacggatgaagtggtagatattgcggttctttcagctctatgtaggatttccctaaataatctcgatgaagtggttaagcttttgtttaaagaactgaatcaagaaagtaaaaaggcttgggaacatattcaaaagtttggcgatgaggaaagtttttggaatctgatggagaaacattactattattctctgggagagcgttccattcaggatttgtttattttcttcattctcactaacatatcggcttctttgaattcttcaatcccaaaaacatggatcaagtatatttccagtcgacctacaaattgcattgtcttgatgaatcaatttatgaataacaagaccgatcggtttgattacaacaaactagcaattgagattgaaaaaaaggttaaggttaatgattatattgcagaatgggaaataaaagattacttaaaaacggatgtattccgaatctttgatgagaaaatcatcaattatatctctaaccagctgaataatgatatccatcagtatgatacattcattgatatgattgctgtacgacgtaccttacactggtacccagaatttaaatatgaatatgaatcattaattcaggccattcattttctcaaaaaggcatattatgatctagacttttttattccacaacaaagtccatatgaaatggttaaagcatataccgaggattattttaaaattgatactgcataccgtaaattttatgtcgcatttgataagcttgaaaataaagaacgattattatcaataaaagagaaaatagagaatctttatacgaattggtatacagatgaactttcgattaaatggtgtaattccattgaaggtgagttaaaagatcattgggcaattactggcatggatcaacaatatgatttttataaatcaacgatccaaccgtatataaataaaggtgaacgagtgtttgtcattatttctgatgcattacgatatgaagccgctaaggaattaagtgagcttttaaataatgaaaaaaaaggttcaacagaaatcacttctgtacagggtgtgttgccatcctatactgaccttggaatggctgttcttttgccacataaatatatttcatatcaggatggacaagtcatagttgatggtataagggcatctggtatagaaaatagaaattctatcttacaaaaatatgtaaacgagtcactagcccttcaatatagaaacacaatcgaaatgaaccggcaggaacttcgtgagaatcttactggtaaaaagcttgtttatatttatcataattcaattgatgctagaggtgaccatgcggcaactgaatgggaggtttttgatgctgttgaggatgtttttgttgaaattcgctcattaattaatcatctagtcaatagtgttagtgcatccaatatcattattactgctgatcatggttttatctataatcgtgatccgttgcaagctagtgataaaattataaaaaatattgataatgcaataattgagaaaagaagatttgtattatcgaattccgggatacctttagaaaatgaaggaacaatgaagttttcaatgaattaccttttagatgatgaaaaatttgtaatcgttccaaggggatccaatcgctttgcggtccagggatcaggtgccaattacgttcatggtggtgctatgctgcaagaaatcgttattccggtcattaaatttaaaaatgaccgcggaaaatcaggaaaaaatgatattagcaaagttgaagtaaaactaacaagcatctttagaaaaatcaccagcatgattacatatttagacttcttccaaacagtaaaagtcgaggacaagaaaaaaccaattcgtcttaagatatatttcattgatgaagaaggtaatcgcttatcaaatgaaaatattatcattgcagattgtaagtcttccaagccagaagagagaacttttaaagaaaaatttgtgtttaaaaacatgacatataataagtcgaaaaaatattatcttattctagaggatgaagaagagtcagtagaaaatgtttatgacaaaataccatttactattgatatcgctatatctaatgatttcggtttttaagagcgtccggcgaggtggaaaaaaggaggatttaaaccaaaggttaaatgcataccttgctgcattccgttactttaaggcaaacagtaaaaatataagtggttcgattagtacaactttgaaggattatttgatgcatatacaagatatacacgggattggactaaccagtgagctgtcacttgcagcctttattgcactataggggcgacacaaaagcctgtacaaagtcaatttgtcgtgcttggtgcgataagtattagtggtactataaacaaggtagaagagttagctaactaacgtcctgcaagtttgttttgatccgggtgctaagaaggtattgcagcctatggcttccgctgttgatatcgggaccgttccaccagaattatttgcgaaatttcaaattagcttctatcaaagtccagaggatgcggttttcaaggttttaggtgtagagtagttgttaaataatctatttgtgataaatatgaaagagtacaaaattcgcaaaattgacacaaaatttgagaaatagaattgacaaatcatgacaatatgccctaaaatatagatagtgacctaggggaatggtcactacatcatatcagatcaagaaatatagggtttttatggtaaggctttatgccgtggcgttggggatcgccttgctctgcaaattgcagagtcttccccaaaaaatgactaaagcgatttagtcatttttttataccaaaatttaaaagaaaagggtggtacgtatgaagtatagcatagggcttgatattggcatttcatcagttggctgggctgtagtcaatatggatatggagcgaattgaaaaaatgggtgtacgtgtgtttgatgcagccgaaaatccaaagaacggatcatccctagccgctccaagacgtgaagcccgttcttctagacgaaggcttcgaagacgacgttatcgtgttgcgcgtattcggaatttgatattaaaaaagggtctattaacccaagtagaaatgaaccagttatatgaatggaggccagaagatcttgatatttggttaattcgagtaaatggaattgaacggaagttaacagaaagagagtttgcaagagtattaattcattttgccaagaatcgtggatttaagtctaaccgtaaaagtgaagaagcagaaacggaaactggtgttgttctaagtgcagtaaaagaaaatgcgattttaatgcaagaaaaaggatatagaactgtcgctgaaatgttattgttagaggaagaaaaatttaatggacgtaaacgaaataagggtggagaatatacccatgtcatttctcgaactgaacttgagaaagaaattagattaatttttgcttgtcaacggaaatgggggcagacatttgcaacccatgaaaatgaggaagagtatgttcaaatatggagttcacaacgcccctttgcaacaaaagatgatattttaagtaaaattggtaattgtacattcgaaaaagctgaaaatcgagcacccaaattttcttatacctttgaacgatttcgtgcactagataaattgaatcgattaagaatcctctcagcctctgaccctcaacgagctcttacggatgcagaacgtcaattggctattgcttcactgttacataaaaaagaagttaaatataaagatttacgcaagcttctcaatttaaaagaaacagagaaatttaatgaactattttatgacccttctttaccgcctgaaaaaaatgaaaatgtaacttttctatcccttgaaggacaatggaaaattcgaaaagcgattgaagcagcagaaggaaaagagcttgcaaatgcgtatcgaccaattgatatggatacatttgcctatgcgttgacagtatttaaggatgatcaagatattcgtgattatttaaccaattcatatgtgaatgagcgaggtaaacaagtaagtaatctggcaaaccaaaaatacgatgatgtattaattgattcattattggcattatcattttcgaaatttggacatttatcgctaaaagcgttaaataatattctcccgtatttagaggatggatatttatattatgaagcctgcgaaaaagctggatatgagtttagtaaaaaaacgtgtctaaagaaacatcatcttcttccagttattcctgctaatgaaattgcaaatccagttgtcattcgttctttatcacaaacaagaaaaatcattaatagtatcattaaaagatatggttctccttctgcaatttatgttgagttagcgagagagatggggcgtccttacaatgaacgtcgggatttagagaaattatacaataaaaatcgtcttatcaacgaagatgccaaaaaccgtattcttgaattgcatcccgaattcagtgatccacgagggcatgatatattaaaatacaaattatggcaggaacaaaacggacgttgtgcctattctttcgagccaatttcaattgatcgactatttgaatctggttatggtgaagtagatcatattatcccatatagtcgtagttttgatgacagcaattcaaataaagtccttgtgttagctaaagagaatcaaaataaacaaaacagaaccccatttgagtggttcggtcatgatgaatcaaaatggcaagcatttacatcatttgtcacaactttaaaagtgagtaaaaagaaaaaggatctaatgttgaaaaagaatttcgatgatgagcaggcagaatcattcaagtcaagacatttaaatgatactcgctatattacgagattcttaaaaaactttatcgaggataatttggaattccgtgtagaagaaggcaagaaacagtacgtttatactgttaatggcgcctatacctctcttatgagaaaacgctggggctttaataaaaatcgtgaagaaaatgatcttcaccatgctttagatgctgtaatcgtagccgtgagccatccgtttcgtcatcgtgttagtacctactttaaacggagggaaacaacagttgcgaaccttttaagtcgaatcggtgaacgtttcccggaaccttgggaaggttttgtaagagaagttcaagcgaggctggttcaagatccttgtttatttaaaagggcgttggagagtttagaattgcctagttatgatgaagattttatggaagaggtagccccgatttttgtatcacggatgccaaaacggtcagttaaagggcaaattcatgaagaaacattacgccgccagcgtgggcttaatgaaaaagggtatattatcgtagttacgaaaacaaagttggaaaatattacatttgataagaatggcgattttaacatgttcaataaggaatccgatccaaaaacttataatactattaaacaaaggtatcttgagaacggtaaggataagaaaaaggcatttagtacgcctttatacaagcccgcaaaagatccaaataaagcatcaataattcgctctgtcaagactgaggagacaacaaatcgagtggttgaattagatgataaaactgttgcagcaaacgcaagcatcgttcgaactgaggcttttcgacataaggagacagggcgattttatttagcaccagtatatgtttccgatgtgatggcagggagagtgccagagaagtttattactcctcataaatcttatgaaaactggcttgatataaatgacgaatatgagtttttatttaatttatatcaaaatgatttaataaaaatcaagatgcctgtagaaaaagatacaaaaaattatcttggggaaactgcctcctggcaagaaggagtattttattttaaaggagtgcattctcgtactgcacaaataaatattattgaccatatgaatagttttgaagatgcggtaggttcacaaagattacttttatttgaaaagtatcaagttgatcctcttggtaatattataaaagtgcatggagaaaaacgttatggcgtaccggcatatagtaattcgtaggccgtccaaactgtcaacacgagatgaacagcttgtgatatcgcaggaggaaacgttccggattccacttgaggatatagtaactattacgttagaagaaccagcaatcacaataagtagtgcgttgttaagtaaatgtattgaataccatgtagaggtcattatttgtgacaaaaagcgaatgccaagcgggatattacagccgtttcatcaacactctcgtcaaaaagtagtactggagacacaactgggattaggtaaaccatttaaaaaaagaatttggcaacaaatagtgattcgaaagcttgaaaaccaagcaagatgtttagaattagttaacaaagctgaagatgcaagaaaaatatatgcaataagtcgaagtgtcgaatctggagatcgaacaaatcgtgaaggatatggtgcgaaagtttattttatttcactttttggaccaaattttcaaagaagagcagaaaatgtgataaacattgctttaaattacgggtatagtatcatgcgttcgctagtggctcgatcacttgtaagatatggtttttctcctagcctaggaatttttcacgatagtcaaacaaatggatttaatttggcagatgatttcatggaggtattgcgaccatttattgatgtaactgtggccacttatatagatgaagaatcagaatggtcttcagaaatccgtgagaaactatttgctgtattaaacttagaagctgtttggaagtctgaaagattaagtgtgacaaatggggtggatcaaatggtaaaaagttttgtttcagcttgtagacagcaagattcaactttacttatcttgccagaactaataaatcttcataatcatacttatgagtaaatttatgagactaattgtattctttgatttacctgttacctcccgaagagaaaggaaggcctattcgcaatttcgaaaatttctattgaaagatggatatacgatgttacagtattctgtctatacaagaatttgtaatggtgaagatgctgttcaaaagcatatgaaaaggctgaatgaaaatttaccgaaagtaaatggggcaattcgttcacttaaaataacagagaaacaattcgaaaacatgggaattttactgggaactgctactgtagaagaaaatctaggaacaaataaaacagattttttctaaaaagtgcttgcaaatatgcaggcacttttaaaaattgtcgcaaaactaataaaaagggaagtaaaggttcaaaaatcataaaggttttatgcgtttttttgaaaaaagaaacccttgaaattggggaataccaagggtttcagagccacgtatcataccacatcaagaaatataggggaattatggcttagcggttctggtaacggttttccctcaaatcataccacatcaagaaatataggggaattatggcgtaccaagtgcaatctgcatcaaaaacacaatcataccacatcaagaaatataggggaattatggcgggtgcgaggatacatgtataaggtcgatgatcataccacatcaagaaatataggggaattatggcagttgtatctcagtaccaaaacaacccatcaatcataccacatcaagaaatataggggaattatggctagacggttctaaatacaaagatatgattgatcataccacatcaagaaatataggggaattatggcgcttgtattaaggtaactactccaatcataatcataccacatcaagaaatataggggaattatggcagaaaaacaattgaagtcggggacgttttaatcataccacatcaagaaatataggggaattatggcagaatgaccactattggcttcttctcctagatcataccacatcaagaaatataggggaattatggccgttgctgcacaatttgaatctgctttacaatcataccacatcaagaaatataggggaattatggctaaaaaaacgtatgatacagaaatggagcaatcataccacatcaagaaatataggggaattatggctggcgagactaagtattttagagatcgtaaatcataccacatcaagaaatataggggaattatggccagcgttggaactgttaaatccaaatcttaatcataccacatcaagaaatataggggaattatggcgaagatgtaacgatctcgccaactttttcaatcataccacatcaagaaatataggggaattatggccagttcgaccatattgtcttttattagtgatcataccacatcaagaaatataggggaattatggccctccatattgggggcttagggattatggtatcataccacatcaagaaatataggggaattatggctcatcttcgattatcttgccttctctacctatcataccacatcaagaaatataggggaattatggcttagcattgtaaacaccctgcgaacttctaatcataccacatcaagaaatataggggaattatggcgatagtatagccgagtaccttacatatggtatcataccacatcaagaaatataggggaattatggctgggatgatgaagcagttgtatacggtctgatcataccacatcaagaaatataggggaattatggcctcataacgttctaccatataaccaatcgtatcataccacatcaagaaatataggggaattatggcccaaagacaatatggaatgccgtatatcgcatcataccacatcaagaaatataggggaattatggcaataaagcaacaggtgcataactggagtgaatcataccacatcaagaaatataggggaattatggctaattatcttgctgttcataatctgtaataatcataccacatcaagaaatataggggaattatggcttattattatatggacttgtacaaatataatcataccacatcaagaaatataggggaattatggcaaaaaaggagagttttggagtgatttttcaatcataccacatcaagaaatataggggaattatggctcaattacttctaattcgttctcgttttgaatcataccacatcaagaaatataggggaattatggcttagaattcggtaattactagttgcggttgatcataccacatcaagaaatataggggaattatggcatgcgagcagttctccaattccaatcacctatcataccacatcaagaaatataggggaattatggctaaatattacattcggtatgtggacgatctatcataccacatcaagaaatataggggaattatggcccgcaactagtaattaccgaattctaagagatcataccacatcaagaaatataggggaattatggcgaacaggggacgggacaaaacgtacactaatcataccacatcaagaaatataggggaattatggcgcagcggcaaaagatgtcccactccattgtatcataccacatcaagaaatataggggaattatggcatacagggcaaaggcttgcccttgttggtgatcataccacatcaagaaatataggggaattatggcgaggagattgtaggatatataacttttggatcataccacatcaagaaatataggggaattatggccattaataaatactctaaacagaaaggaagaatcataccacatcaagaaatataggggaattatggcggaaatggcaaagctaaaaaagtaatcactatcataccacatcaagaaatataggggaattatggcgattctttaaaaaacaaaatgataaaccgaatcataccacatcaagaaatataggggaattatggcatgttaggtacagcagcgttcgctactccgatcataccacatcaagaaatataggggaattatggctgcttcaagtaaatactgacgatctaatacatcataccacatcaagaaatataggggaattatggccttacgacagcagaaccaaaaacgaaggtgaatcataccacatcaagaaatataggggaattatggc

SEQ ID NO: 2079 - DNA, 15975 bp, synthetic construct
  misc_feature 1..15975: note = Synthetic
  source 1..15975: mol_type = other DNA
tctatgttatgggttattgtaataaagtaaagatgatgaatgaccggagaaacccaacatattattaaaggcattgccagcaattaacggcggctttttcactcctcaaagttcctagaggataatcagttgatttaattgaagggaagttggatatcctctccaacaaaatgggggatcgtccatctaaattagtatccaagtgtgtaagaacactgtattatagtggttaacaatagttttttctcatttcttcactattctcccgtttttacccttcaaggtctgccctatggtcttctttcatgtgccttatcatcgtatcttaataaacttgtacctgttttgcgtcatgtctatagatacatagtaaaagacaaagaaagactgccatttcattatagaaagccctttaaaagaattgtccactattgcttatacaataacaaaaactcacattttattccatcagtttataaaataaagactttgactcaaaatagggagcagtttgaaaagcccatttttctggttgtattcatcaaatttgtatgaaagaaaaacttcaacctttctaaacatggaaggactactcatcgcatacaaaattattttaatattatgttttctgcaaatatagccatataaatttcatttaaattaggatcctaggaaaagccgttggtaagactagttgaaaagtataaatctcttttcaactataaaggaggtgatgaaaattatttcgagggtgttcgtatatattattttgtgtgaaaattgtaaataaaagaccattcgcataaaacgataacttgatatcaataaattacggaacctaagttcaaagattctaagacttacaatctataagttgtctttataagatgaaagaatagctgatcgataattttatcatctgcgatagattgttttctctaaaaaatgaaacttggaggtaagtatgttagaagcagaacagacaaagaatttaaagattgagagtaagctaccgtcaaatgttaatggtcgtttaacttggattgagcgattcggatttggatctggggatatgtcctataatattgtttttcaatttgttaatgcctatcttcttttcttttatacagatgtggacggaatcaagccagaagttattgcaacattatttttagtcgtacgtgtatttgatgctatttgtgatccattaatggggacgcttttagataagacgaacacgagatggggtaaagcaagaccttttcttctatgggtcgcggtcccattagcagcaagtacttttttatgttttacgactcctaactttggatcaattggcaatattatttacgtttatgtgacttatattttacttggtatgttctttagtgttcaaacgatttcagtgaatagtttaactgggcgaattactgataatgtacatgaacgtactgtattaacaaccgtacgtatgattctcgtttatataggaatccttctagctatatcatgtgcaactcctttggtaaaactatttggaggcgataatgcttcctttgggtttcagatgacttcgctagtctatgcggttgctggtttattgttaaatgtattcagctttatgaccgtccgagaacgtgtcattattaaaaagcctaagaaacaaggattgaaaaaaacaatacagtcattgctgaaaaacaagccactgatcatccttatttcaacctttttgatgttctctattggctttaatattcgattgagtaccatggtatattattttacttataatatccatcgcgaggatctcgtatttataggaactgttttgttttttggcgctgcctttctaagtaacttatttataccgacattaacaaaaagatggggaagaaagagtgttgtgattatatcagcaacgatatcccttatctcatttgctggacttcaatttacgtcatattcctcaattatgataatattggtttggttatttatttgtggctttttttcaacgccactgaatacgctcgcatggggcatgcttgcagattgtgtggattacgctgaatggaaaacaaacgttcgcgcagacggagttgtcatatctagtatgagttttgttaacaaattgggtgtggccgtagctggaacattttctgcttattatttaggctactcaggttatgtagctaatagcgaccagacattatcatcccttaatgccattaaaaatatgaatgcatcaatacctggcatcctcacattactatccattatcatcttttgtttctatcctttatctgaaaagaaatataaaaagatgatgtcagatttaaaaaagaaaagaaaaccacttaaatgatcattttaataatcatgatcttgaaaaaaagggtgtccaaaatttttggacacctttaaaatctgataaggatgactctaatactaattcgtttcataaaactaactctgtttcactccaacctgatccaaaacagcctcaactgcctcgtcgacattcttcacttttaatgtaactttaaggtcctctggatattgattggctgaacgttcatataatggatcgtaataaaactcgagtaacaatccgacagctgcacgaaagttttctgcttctagatcttcttcaatttgtttggcaatcggtgtatgaatacgtcttttgattcgatcgaaggcttctatgcattcttccctatgattccatggctggtagtcctctaagatgtgagtgattcgttcttcaattggcatatctatgaataattggatgccttgctcttttttttctactagaaagtcagggaggaggacttttccaatgcgtttactttcgccttcaattaaaatataaggcgatgattgaaacctttcgagatcttggaagaggagggcatcaaaggttttttgattatgaggtttgagtcccatttgcccgaaaatagatcctctatggttggccattccttcaagatcaatggcagggtatccttttttcctcaaacggtgcagaatcgttgtttttcctgatcccgtgtttccatttaatacatagactttcggtttcaaatcaaatgaattcagcttttctacgacccagttacgataggttcgatagccgccctctagtcggtaggctttgatgcccattaaatcgagaaccgtagcagaagtacggcttcgcatgcctccacgccagcaaaatacggcttttttgccttctatttgagcaaaatctttaataaaagcagggagttttgcggaaaagatctcaagcccacgttctttggccgcttggggactggtttgcttgtaaatcgttccaacttcggctcgttcttcgtcattaaataatgggatattcaaactaccaggtatggtagcatctttatattctgatggtgatcttacgtcaataagagtaatttcacctttactttttagatcaagtaattcatcaatcgaaatatcttgaaacacaaagtttccacctttctcttttaggaccatacttgatagcttgaaagaaatgtttatactaggaaaacataccactagccatatgatgactgtcgtcgtttttcctattactatgatcaatccaattgaaaaaaccggcataagccgattttttgctatctattaccgagtgaatatttatccttataagactgtgatatgtccaggattttcctcagtgacttcaccaattaatttggctggtacacctgctctttgtaaatcagatagtaagtcattcgcttctttttcgctaacggaaattaagagaccgccagatgtcacagcatcacacaatatccattgatcgatttgatccatggtgtttgggaaagtgacatctccttgaaggtgtttaaagttattctttgttccacctgggacggcaccagcttcagcaagctctctaagtctaggcaaggaaggtacttgatctttataaatggtaagaccagattgactgcctttcgccatttcggaggcatgtccaagtaatccgaaaccggtgacatctgtacaagcatgaacgtcataaggcgccatcgtttcggaagccgttttatttaaagtggacatgacctttgtcacacgagcaatttcttcctcggttaagagatcttttttaatagaagtcgagtagatgccaacaccaatcggttttgtaaagatcagtttatctccgggtttggcgccggtattggcacgaattttatctggatggattgttcctgtcacagctagtccaaattttggttctttgtcatcgatagagtggccgccgacaagggtgacgccggcttctttcaatttatcggctgaacctcgaagaatttcctttaaaatatccttgtccaatgttgagatagggaaggcaacaatatttaatgcggttagaggtgttccacccatcgcatagatatcacttatggcattcgctgccgcaatttgtccaaaagaatagggatcatcaacaatcggtgtaaagaagtctacagtctgaacaatcgcaagttcatcatttaatcggtaaaccccagcatcatcacttgtatcaaggccgacgagtaaatttggatttggagccgcttttggcaagtctcttaaaacttgtgataagtccgcaggtccaattttacaaccgcagcctcctttagatgatagggaagttagctttatagaatgtgtctctgtcatatgaaaacaacctttcaaaacgagttagatatagttttattataaaacacactgtcaataaagggaaatttccaaattgaagcgaataaaattcaacttttatatcatatatattgagaaaaattggatgaatttatgatataatatgttgtctttaaaattaacatacaggaggggtaacatgtcgcaactagacacaacacctcagcaacgaccatccgaaaatcgaaaattgatttggtttgtcgttacttttatacttattgcggctgctggattactttatgtaaaatggctgccttattatagcaaatcattcttagcggcccatactcattcaataggttcttccatattggggaatctttccgatgagacgttatcatggcattcggcttgggattatgcggttgtttattttgagtccgtatggaaagcagccgcccttggtattctactcggatctttaattcaagtattattgccaacccaatggctgataaaagtccttggaaaaacatcattcggtagcacggcgattgctggactcgcttctgttcctggcatgatgtgcacctgctgtgccgctccgatggcggttggtcttcgtaaaaagaatgtctcagtcggtgccgcattggccttttggattggaaaccctatgattaatccggctacactcatttttatgacgtttgttttatcgtggaagtttactctaatgcgtcttatatttggatttattctaacttttggagtaagctatttggctaatcgctttgtgaaagatgctgagcctattgaccttgataaaatcatgactgatgaaaaaccagaaggtagctttttagtcaaatggttaaaaagtttaggaagtatgcttctttacattgttccagcatatgttttatcagtatttctattaggcgcagcaagggtctggttattcccgcaattaagtgatgcatcagctaatagcctacttgcaatccttatttttgcaattgccggcatgatttttgtcattccaacagctgccgaaattccaatcatccaaacgtttatgtctataggacttggtggtggaccggcggcagcactcctaatcacattacctgccattagtctaccatcgttattaatcgttgctaagtcacttcctaagaaagtgttaggttttgtggtgatttcggtggttgttcttggagtggttagtggattgataggaaagctagtcttataagatttagatatattagtagaaagcctagagattcgacatggtaaaagtgtcttgtctctaggttttttattaagtcgtttaatgggaaaaacatggtaaaaagagattgttttaaaagtcaaaaaagtaagttgcattttcagacttcaactatgtctttttagtgacagcgtggtaaactgttgccataaaaaggtgattttcctcacagactttttttagtcaattacttactataaaactaatttgttagatataagcagcaacttaatttaaaaagaaaatagattcctgcttaaacaaaaatagaggtgtgaggagagtaccacaatgaaaaaaacagatttacctcttgtctattcatgttctggatgttcttcagctgcacaaacggctaatacaattgcgataaaaatggatcgtgaaggaattgctgaaatgtcatgtattgccggagtaggcggagatgttaaaccgcttgttagaacagcaaaatctggacgtgatatcattgccattgatggttgtccattagcctgttgcaagcattcattagctagacatgacgttgaaccaaagcatcattatatactatctaattttaatgtaccgaagaaaaaaggcgaagatcctgatcctgagcttacgatgcaagcttacgaccaaataatggaacttataaaataatcatttaatagccattgaaaaacttttggacgctttccaatcaaaggaaggggtctttttttcactttaagtgcgtgttcaaaaaggtaacaaattagaagcaagaaggctaagagcggcgctgttttgaggaccggcattccttgcgttgtggtagattaaggcgccagccacaggacgtgagcggttttagccagcgatcttctcgtatccactacatgaggaccggaaaaacaagcgggcgccgaggattcgtagcttatcatttggtgactttttaaacaacctctaatagcatatgttttttcaataaatctatcaatatctactacttttatacgcaaatctctaaaagagttgattacaagagtttttttcgttatgatataatctgcaccttttctactagtaatcattttactaaataggaaggtgctttttatttaaatgattagaaaggggtgacatgaaaaaagactgaaaaggggggaggacatattcagtaaactaattgtaaacttaacttgtaataaatattgaaaattaaaataaaaggagagatattatgagtgcaaagccatcgatgttcagttggaaggttcatctgtttgttttgattttggtttgtgtttcagaacttatcggtgttcatgaactcggcttaggtattggtacgattactttatttcctatgctatatgcattaattattggatcaatcatgagcattcctaaacttaaaattttaaaaaagaaagaaatgcaaatttcagctaatatattaggtatttcgtttatgctttttattgctaagttagggacaatgatgggaccacaattgatggaactatttaaatctggtatccccctactcttgcaagaggctggacatatcttaggaaccattattttaggtcttccaattgccttgttgataggaatgaaaagagaaacgatcggagccactttttcaattgatagagaacccaatctcgctattatttctgaaaaatatcgttcagattcacctgaaggtagaggagctttaggagtttatgtgtgtggaaccctttttggcgcactttatttgtcactcctcacaagtgtcatcgctaaacttgatatttttcatccactttctttggcgatgggagcgggtgttggatcagggagtatgatggcggcagtcacaggaacgcttgttaccatttatcccgagcaggcagatactatagcagtattctcaggtggcgctaaccttattacgacattattaggaacgtatatttgtgtattcatatctttaccacttacagaatttttatataataagttaaacccaatccttggtagaaaacacagaaacgagattaaaaacattaaaacatagaggggtgacggcattggaaaataacttaaagatgaaagatatgatcttaacatatatcattattggaattattgcattattaggtaattgggcaggatatcatgtctcacccattaaagctctacctggtatgttaatcattgttcttataaccattgtaggttggggaataaagaagatattgcccattaacttacctgcagttatctatatttctttaatcgctttattggtcacaacaaaaatctttcctggaagtgaatggataactaaagaaacaggaaacgtcaactttttagctttggccacacctatactagcctatgcaggtttatcatttggcaaagacttaaatcaatttaaaaagttaggatggagaatcgtcgttatctcgttcgtagtttatacaggaaccttcgttatttctacgatcatggcagaattgagttttagatttataggtaagttttgatagtgaacgacttccatctaaagtaatcatgacaaatccaccttattctaagaaatgaacaaggtggatttgttttatgaatcagctgtaactcgcgacttcagttgtgagaggttcaatcttcttcatcctcaaaccataaaggatctttgttatcgacatcaccgttatagttgatgaaaatctcttcgcccgcttttatgtctcgataggcatagaagtcaaatgtgtgatggtcaaaattaatcttatagtgggcattcggttcataagaatggttgaacagcatgccatagcctagaagaatcgccgaatgatgaatgccatactgaaaagcataatcccctagtaatgttttttcgatatgttcatgttgctcatttggatacgcaataacgggtgcttcatggatcagcgttcctttttttatatcgcaagtcgcaaaaacgcctctattgaattctccattactaatgggagaacttttcacttcgatcataaactttacctactctttcattaatttctaactaactgtaacatgtcttgtatgatgaaggcaaaaaaattcttttcctttagattccctatgtgctcgagcacaaaaattcttaagctatagtctcattgtaataaaattctaaaaatatataatgatttgtatagtaaaaatttaatagttacaagccttaattgttatttaactcagcgttttttagataaaggtaagctaccgttatcagtcaattaatataacctgccggtgggttatgtgctataattaaaataactgaaacgtgaacctcttgtgcctttgatgcatctaacaacattatgtcaaccatcatgacgaaagaatagttattagaaactctgccaatctagatgaggtatggttgatcaaacctacttgctttaatagaatcgatcgagtttatttgcggcgagtaggtgacagggaattgttgggtattatgaaaaagatttctgatttgttcttattagcgttataagtgcgtgttcaaaaaggagacaaattagaagcaataagatcaaggcggcgctgttttgaggaccggaatgtaggtttttgctacacgaggaccggaaaaacaagccaacgccgagattcgtagcttatcatttggtgactttttgaacaacctctataagagtataaatattaattttagatatttaggattaggtttattggtccgtaaattggaaaaatatttataatatatattgacaaagttaaacaattattttatattattggtaatagctttggggaaagctatcgtatcagatcagagattataggtaagttactatggtaaagcaataagctgtggcgttggggatcgcctaaccctacatatacatagggtcttccctaaaaaatgactaagtttcttagtcatttttttattaaaataaaacggaaatttctgaaaatggtctaatgattctattaggggtgaagactttgaaatatagtataggttttgatattggtatatcctctgttggctgggctgttattaatcatgataaaaatagaatagaagatatgaatgttcgcatgtttgatgctgctgagaatccgaagaatggatcatcacttgcggagcctagacgcaatgctagatcaagtcgtagaaggcttagacgacgtaggcatcgagtgttaagaacacgacagtttattattaataaaggtttattaacaaacggtcaaatgttaaaactttatgactggcaagatgaggatctagacatttggcttattcgagttaatgcgttagaacgaaaacttacagatcgtgagtttgctcgtattcttattcatttcgccaagaatagaggctttaaatctaatcgaaaaagtgaagcatcagataaagaaaatggtgtggttttggctgctgtgaaggaaaacgctcaactcatggaggagaaaggctatacaaccgttgcacaactactaacctatgaatctgaaatatttaaaggcagaaaaagaaacaggaacggggagtatacgcatatcactacacgccatgatcttgaacatgaaatacatataatatttgcaaaacaacgtgagtttggtcatatatttgctaacaaagaaaatgaagaaacattcgtaaatatttggtcttcccaaaggccttttgctacaaaagatgatatttccaagaaaattggaaaatgtacattagaaccaaatgaaaaaagagcgcctaaagctgcatatacatttcaacgttttcgggcaattgacaaattaaatcgtttgcgtattctttctgaatcacatccttcacgaaaggtatccgaacaagaacgggaattagcaatccaaggacttttttctaggaaagatgtgaaatatacagatttgagaaaactgtttaacttgtcaaacaatgaaagattcagtgaattgttttacgaaacagatgaaaatatacatgatgttgagaaaaaagtatttttatcatttgttgaacatgataaagtaagaaaaattattataaaagtattaggtaaagaagcattaacaacatttcgaccagttgattttgattgtattgcccaagcattaactgtttttaaagatgataatgatattcgggattatttattgaatcgatatgtcaatcaaaatggaaaaaaagagcggaatttagcgaatcgggcatttgataaggaactaattgaggagttactaacactttctttttctaaatttggtcacttatctttaagagcattgcacagaattcttccacatttggaaaagggattgtcttatgataaagcgtgtacagaggcagggtattcattcaataataagttggagaaggaaaaaagtagactacttcctgctgtgaatacgaatgaaataaggaatcctgtggttataagatcgctatctcaaacaagaaaagttttgaatgcaatcataaagagatacggaagtccaacgagtgtatttattgaattagctagagaaatgggaagaccttataatgaacgacgggatttagaaaaactttttaccaaaaaccatgctacaaatgaaaaagctagaaatgcaattcgagaacttcaccctgaaataagtgctccacgtggtcatgatattttaaaatataaattgtggcaagaacaatgctgcaagtgtgcctactcattcgagcctatttctttagaaaggctatttgaacccggttatgttgaagtagaccatattattccttatagtaggagttttgatgatagtaatgctaataaggtattagtgttagccaaacagaatcaaaataaaagaaatcaaacaccttttgaatggtttggccatgacgagatccgctggggccattttgaatcatttgttaacgcgatgcaaattccttcaaaaaaagtagctcagaaaaaaagatctttacttctaaaaaaagtttttgatgatgaacaagaagaggcttttaaatcacgccatcttaatgatacccgttatattacacgctattttaaaaattttgtagaagaaaatttattgtttagggaagaattaggagtcaaacagcatgttttcactgtaaatggcgcatatacgtcattaatgcgaaaacggtggggttttaacaaatctagggaggaaaatgatttacatcacgctgtagatgctgttattgtcgctgtaagtggaccttttcggcaccagattagtgcttattttaaacaaagagaagtaagtgcaactcagttaatgaaacgaaaaggtgattattttccacaaccatggccaggatttggaagagaattacgttctagaacacttcaagatcctaaattacttaaaatggcgcttgaaagtctagaacttccaagttatgatgagaaatttataagtggtttgaaacctatttttatctcaagaatgcctaagagatcagtaaaaggtcaaattcacgaagaaactttgcgcagaagaagaggggaaacggaaaaaggctatgtaagaataatcaccaagacaaaattagaggatatttcttttaacaaaaatggtgattttaatatgtatggtaaagaatccgatcccaaaacttatcaagccattaaacaacgttatttagattctgggaatgataagaagaaagccttcatcaaacctctatataaaccatctaaagatatggataatgccccattgatccgaactattaaaatcgaagataagaaaaatcagattgtagacttaggtaatggagcggttgcttttaatggtagtattgttagaacagaagtttttcggcatagagagtcaggaaagttttatttagctcctgtttatatagcggatgtattaagaaagcgtatcccagagaaatttattacagcaaataaaccgtatgatcaatggaaagatattacaaccgagtatgagtttaaattcaatttatatcccaacgatgttattaaaataaagatgtctaaaatgaaaagcataaaaaataatttaggtgaagttgtctcttggcaagaaggttatgtttattttaaaggtatcgatgcgggcactggagctctaaaaattattgatcatatgaatagttataaagatcgtataggctctcaaaatttatctgtttttgaaaagtatcaagtaaatcctttgggtttccttgttaaggttcatggagaaaagcgtcatggcatatagacatattgttattagaaatcctggaaaacttgccacacgagacgagcaattgcttattgtacaagaggataccattcggataccattagaagatatttgtacgattacacttgaagaacctgcagtcacaattacgagttctcttttaagcaaatgtaccgaatatcatgtagaacttattatctgtgataaaaagcgaatgccaagtgggattgtgcaaccttttaatcaacattcgagacaaaaagttgtattggaattgcaattgaaattaccgaaaccttttataaaaagaatttggcaaaacattgttattcgaaaactagaaaatcaagggcgctgtttagagcttcttaataaaagtgacgatgcagaaaaattatttgccattagtagaagtgttgaatctggtgataaaagtaatcgtgaagcatatggcgcacgattctattttatttcgctttttggtcgtcactttcagagaagagaagacaatgtaagaaatattgctttaaattatgggtacagtattatgagatcgttagttgcacgttcactcgtaaggtacggctttaacccttgttatggtgtatttcacgatagtcaaacaaatgcttttaatttggcggatgactttatggaagtgttacgcgcttttgttgacgtaacagtggctaaatatgtaaaagaagacgaagaatggtcatctgaaattagacagaagttgttttcgatattaaacgtagaagcaatgtggtctggggagcgtcaaagtataacaaatggggtggatcaaatggtaaaaagttatgtatcggcatgtagacagcgcgatgcttcattacttcaattacctgaattaattaacttaaataatcattcttatgagtaaatttatgaggattatcgtattctttgatttaccagtgatgacgccaagtaaccgtaagaattattcgaagtttaggaagtttcttctaaaggatggttatacgatgatgcaattttcagtttacacgagaatttgtaatggagatgatgctgttagaaagcatatgcagcgaataaaagaaaatcttccacctgtgaacggcgctatacgagctttgaaagttactgaaaaacaatttgaaagtatggagattcttttaggaacaccaagctcagaagaaaaaataggcgcaaataaaacagattttttttaaaaaagcacttgcaattatttcaagtgctttttactttgttaaaaatcgatttaaaaagccactggggagatagcttttaatctctttttcaacgtttttaagaaattgaaccaccttagaaaccatgtatatcaagggattcaggggtatggatcgtatcacatcagagattataggggaactatggcttttaatgttctaaaccttccaattgtatcatcgtatcacatcagagattataggggaactatggcccaattgattcaatactatcctttttatttatcgtatcacatcagagattataggggaactatggcggataaagttcataagggaaatatcgacctatcgtatcacatcagagattataggggaactatggcttaatataagattaacgatttagataaaatatcgtatcacatcagagattataggggaactatggcttttggacatgctactagtaaataaatgaatcgtatcacatcagagattataggggaactatggcaatatttgttcctttaatattccatttttatcgtatcacatcagagattataggggaactatggctatcgtttgttttgagtcagataatgaaacatcgtatcacatcagagattataggggaactatggcgttgcttcggtaacggcatcttttgcaaaatcgtatcacatcagagattataggggaactatggccttgccaacaaagtcatcatcaaccggaacatcgtatcacatcagagattataggggaactatggcatgagtttatgcgtagattagaaaataaagatcgtatcacatcagagattataggggaactatggcttcacgagcatccgtttcactaactgcaagatcgtatcacatcagagattataggggaactatggcttactgtaatctacatctccagtttgtgctatcgtatcacatcagagattataggggaactatggcttgcatatagtcgttattattacctggaccatcgtatcacatcagagattataggggaactatggcatttgtcagtgtcccaatggccacgtaattatcgtatcacatcagagattataggggaactatggctgctttgaaaatcaagtgttcacgttttagatcgtatcacatcagagattataggggaactatggcgttttgtgacatttccaagcattcaactcgatcgtatcacatcagagattataggggaactatggcatccagagtaggcggacggtataagagtgatcgtatcacatcagagattataggggaactatggcgaagtggatgaaatatgacaaactaaattatcgtatcacatcagagattataggggaactatggcttcgttgtagctaactattataaatgtacgatcgtatcacatcagagattataggggaactatggctatcgtttgttttgagtcagataatgaaacatcgtatcacatcagagattatagggg

SEQ ID NO: 2080 - DNA, 15232 bp, synthetic construct
  misc_feature 1..15232: note = Synthetic
  source 1..15232: mol_type = other DNA
cagaggcgtccgtctatttcattaaatatcacgaagcggcaccggagcggtttttcgaactggaagctaaggggctagagctcattcgtaacacgggtactattaatgcgcccctagcctttacctaccaagacaaaccgggtgaatcattcctcgttcttgaatggatcgaaggccgtgagacaaaaggaactcaagctgtcctcggtgaaaaactagcagcactgcacagcacatcagctgagcaacatgggttccatgacaatacatatatcgggctcctagaccagccaaatgacctctacgataattggctgtcttactatcgtgacaaacgccttggcggccagctggattacggcatccaccatggcaccattaccgggcaccgccgtgacttattagaaaaattacttacccgtctggagacatggatccctgaaaacgtaaccccgtctccgctacacggtgatttatggggcggcaattggctggcgggcccgggtggtgaaccctatctgattgacccgtcttttttatacggtgatcggtatttcgaattggcattcaccgagttgttcggtggcttctccaaatcattctatgacgcctatgctgccaatgcgcctataagttccgattacgaaacggtcaaaccattgtatcagctgtactatctgcttgttcacttaaatattttcggcgaaatgtatggggcccgggtggatgaagttttagaacggtatgtcgggtgaccttcacatttgtgtgatatccatcactgacaaacagcatgagtgcgttatactggaaactagacagatgtgtggaggtccgtaatatgacattatacgaaattcttatttttattcatatattagcggccattcttggtatgggacctggctttgttatgacattcattattgatcgcgcaaccactatgacagagctccgacacggtttcgcactgcgtcgtcgtattcatatgtttatcattgtcggcgctgttttgctgctggtcacaggcatcggcatggcgcttatcaacacggctctgttgcaccaagggtggtatattctcagcctgatcttattcttcgcgatcctcgctgccggccccttgctgcttcggcctttgatgacaccgattaaagtgatcttgagaacccataagagtgaagccattcccgccgaatacaaacagctctccaaaaagttgtttatcgtcgaacacgcaaccaacgtactcatcatcgtcattattgtgctcatggttttaaaacctttttgaatgaaaaggaagtcgtcaaacattggtggcttcctttttctttttagaagacatagtctaaaatgtttacgaaagaaacagccagtgctataatggttggcaattattttcaccgtttaattcccttaaagcagggaatgccaaaacaaaggaggccatgggtatgcgaaaagtaacgttggaagaagtgtttaatcatccggtgacgcaaaaatatgtagggcgttcaggcatggcccatgctatttcggttgcggaatatgcttacattttcgccgggcaatacggtgttgaccccgacagagccacgaaagccgcgttgttgcatgatgttggccattacacatggtatcgtgaaggggaatgggactatgagctgtataaagaaaatgatattcatgcgattaagggtgccaacagggctcataaattgcttgtgagaatcggcgagtacccacaagctgcaaaagatatcgccattgccatcctcctgcacacagattcttacctcccaaaaggcagcctcgaattgaatgcacttcagcaagttgtggcacttgccgacgaagccgacgaacaaaagggcggcaagcatcattataaaaccatttcacacgaggcagcacttgagcgcattcgggcccttgatgctgccattgatcaaaaaatggcacaggaaaatgtgtgattacgaaaaaagctgatcagcggctggactctctttggttagagtgtgcagcctgtgatcagcttttcttatcggcttccaagtactcaaggaagtaatcgcttaaattcttcctaccataagcgcgggccaaaatgtccttcgtcataatgtccaggaaaaacttccccagggcatactgctttttattgaagatttttagaacaggaagtaagaccaacaagagtggagccgggatgttaaaatatcgttctttttttcgaaggaccccaaacgcgattgccccaatttctgcatgccgatactcatgaggtcccccgacttcgagtacagtatcatcatgttcccgtagagctgaaacgcaaaaatcggcaagatcttcgccgtgaataggattaacacggttttctcctttatcacgcagaaatacccggcctttctgggccattttcaggtattcagtcatgtccgagaaatagccagtgggtttcacaacgatataattgagcccggagttcctgagttcacggacaaaggctgattttgcgttaacgatggggttattcatttggcgatcgccacaaacatggatatacatgaatttccccacgttttctttctgagcttcatgaagcaaatggaggtttccttgatagtctacatcatgaaatgtgagagagcccttttggcgtgtgaggccgaccgcagaacagacaaaatcaacaccttcacaaacgcctttgatcgactccgactcagtgacatcacccacccacacgtcatcaactaagtgatcgacagcaggttctaaaaatgggccagtcttggaaagtttttgttcattccggactaaagcccgtacattatacccttcctttttgaaggtctgtacaagatgttttcccaaatagcccgtagccccggcaacgagaacttttggcatgtcaccactccttcctgaaacagggaccatttcaatctctgtcaggctagcagattatccttctcccaaatattgatcgagtgtttgtccgctttccctgagttgttgagcagcttgctttccgacataacgcaagtgccaaggttcatattggtattgggtgatgtcttctttgcctttcggatagcgaatgatgaacccgaaatcagctgcatgttctttcacccattgaccttcaggggttttaccaaaatctgtgaccaagcgaaagttgacggattcactggtaatgtccatggtaagccctgactggtgttcactttcgccagggcgggcgctgaagttgttggctgcttcttcaccgtgcttttcggcgtaattgttgaataggcgaacttgggtgtcatatgccctgtaaccggactgggcgtacaaggtatggccggctttttctgctgctttgaataggtcttcaagagcatcggcagcgactatccgcatttttttctttggcaaatcctcttcaaatggaaaacgaacgtcaggaactttgagatcgattggtgtatagtcggctggtaacgcgtgcgatttattaactaatgcgagctgatcgtagggatttgtgataacaggcgtgcctctttcgttcgatcccgagactggctgagcctcgtgtacaggcaatttgttcccgggtgtaaccttggcagcgaatgtttcttggtccagttctgtcaaggcctcgcgcgtttccgcgttataaacgccaagcgccataatgggatcaagttgcaactggatatcagtaatagcattggtcgtagccatgtcataggtgccgcttgcgtccatatcatagccgagctttattaaagattgctgcagttcgcttacagcatcccccgtgtcttgtttctgaagatgagcatccggccagacaagtgcttcttgctctcccatgtcattatcttctcccttatcattcgtatcagccgtttctgtgggctgttcatttgtgttcttattgatattttcttgattgttattgtcagcaggggcacaggctgttcctgctatgagtaaaaaagtgatcataatcgttaatcgtgtgtatgttttcaaggtttgtctctcccaatcctatgcaaattgcttccaaattatattgtcgcatataatatttgccccgacaatagcaacttctggtcattccaacccggagccgcacatccctatcgcccaccacatacactgtcggtacaattgctgagggagcgaagggtatggatggctatgaaccaactgaaaatcgcttaaaactcatgtcgggaattctgttctggtgtgcactcgttgtcgtctccagcgcttatgtcacgacgcctttgacaggcatttttgagcagggatttgacgtgtcctcaacgcgagcggtgctgccgacaagccttttttccttgttttatgcgctgggatttttattttttggtcccgtttcagatcgatttggccgaaaagaaacactcgtagccgggtttgcctcgttaaccatcgcaaccctttgcacagggatggttagtcagttcggcacatttctgttttggcgcagtgtgcagggatttgcagcagcctgttttgcaccaacagcactcgcctatgtgtttgacgtttatcccaggcgaaagatcggaggagtggttggactcatcagttttggctacgttgcgtcgggaatctttgggcaagtggttgctgaatggattggtcaaacgtttgattggcacttggtcttttacctgttcacgatcttttatgccgcttcttttattgccatcatcgcccttctgccgctcgccaaaagacaggtcaaacatcaacaggctgttcggcatttcttacatggaacgaaaacagtgtttcagcatcgcggattgttaaagtgttactgcattaccgttctgcttttgctcatttttattggcatgtatacgatcctaggcgatatgctcgtccgcgcaccttttaatctggatgatggtgctgtcatgatggtccgtgctgccggtttgatcggaatgctctgttcactctttgctggaaaatttattacagctttcggaaaagaacggatcttgcaatcaggattgttattatcggtaggcggactgctcatgcttggtctcgttaacggggtgggattgatcaccttagcaagcatcatatacgtcgccggaatgtcactcatctttccagcgattatgatgatgatcggcgatttttccggcggggtgcggggcgtggccaatgcgtggtatgcatttatcctgtttgccggggctacagtcggacccatgtgcgcggttggtattgctgagatcactggaccccgtttggcagttgtgctcctgggcggtgtgctcgctattgcgttggggattgcgttgacgtttaaacaatatggtgatgagaggaaggacggattacatgagtaagtttctagtaatacaagcaagagtacctctttcgcgagcacaagggaacggaatgtgagaaagggcagtcggatacgagagcaaaacgggttcaaacgagagaaaggcagtcgggtacgggagcaaaacgggttcaaacgagagcaaggcagtcgggtacgggagcaacaccacttcaaacgagagcaagagcatctagactgtgaacaacactcttaaacacaaaccaagccttcacatgttatactgaataaaacataacttggagggtgcatatgtcttacattattagtgtcgaccgtttgaaaaatcgtctggaaaacaatttgaataatacgttgatcgttgacgttcgttttcagctgaatgacgagaacgcaggccagaaaacatatctcgagagtcatattcccggtgccgtatatttggatttgaaaaaagatctgtccgcgaaaccagctaaacacggaggcactcatcccctgcccgacacagacacgttcgctgccaagatgggaaacattggcatcgatgaagagacaacagttgttgtgtatgatcagaataacggaatgtttgccccgcgtttttggtggatgttgcaccatttaggtcatgataaagtttacgttcttgacggaggctttgatgcatgggtagaagcgggttatgaaacgactgccgaaattccagatttgaacccaacaacatttacaccaaacccgagacaagatgagacagtggatatagatgatgtgaaacaaagaagtgacgatgttctgcttattgactcccgctcacacgaacgctatatgggcgagaacgaaccgatgtacagcagagcgggtcacatcccaggtgccaagaactacttctggaaaaatgtcttggatgaaaaaggcaactggaaaacaaaagacgatttagctgagaattttaaagacattcctaaagacactgaagtcattgtttcttgcgggtctggtgtgtctgcatgcccaaacgtgcttggtttaaaggcagccggttacaccaacgtcaaactgtatcccggcagtttcagcgactggatttcttatgaagaaatccccgttaataaaggggaagagtaatgctcgagcgctgccaatgggcgggcccggacccgctctatattgaatatcacgaccatgaatggggcagaccgcatcatgaagatcgccatctgtttgagatgctttgtttggaaggggctcaagcaggtttgagctggatcacaatactaaagcgccgtgacaattatcgccgagcctttgatgaatttgatcccaagctcgtcagccaatacgatgaagcaaaaattcagtctctgctcaaagatgaaggcatcatacggaacgagcgcaagatccgttctgttgttaaaaacgcccaagccttcctccgcatccaagaagcatacggtagctttgacgcctacatatggcaatttgtcggaggcacacccgtgttaaacaactggccgactcatgaagatgttccggcgtatacagaagaatccaccgccatgagcaaagacttgaaaaagcgcggcttctcatttgtcggtcccacgatctgctatgcgtacatgcaagcaaccggtatggtgaacgaccacaccatgaactgctttttgtatcatgggaagaaggatgaagcacaggcataataaaaagctgaacacttcggcaatccgctttgaaaaaaaggggatgccaagtgttcagcttttatttgtgtcgtgaataagagtaatgaaattttaccttctgtgcatgcgttccatttttgtttctatcttgtaagatgaacgtcttcaattggaaaaggacaacgcgtccctgcaagagcagcagatgcaagccattaatgatgtccagaagcggcttacagatattgaaggtattttaaaagaagtgggttgaccgttttgataaaaatagtaaacgaaagcaccagcctcctgaaatgggcgctggtgctttgacagtatatccaggttatagaggactttatcctgaaaaagagtgcggtatccaggttttcataaggtatatccacaaaaaatatgatatatccaggatttcgccgcacttatccaggttcttgaccattatatccaggtttcgttcacgccgtcagcaaagtccacaagccaaggcccaacatccaagcgaacccacttactccaccacaaccgctgtcccataagcaatcacttcggcagcggagttcatcacctgtgacgtctggtagcgtgcagcaacaatcgcgttggcgccgagttgttgagcctcttcaatcattctttcgcgggaaatgttacgcgcctgtttcatgagatcggagtagccttcgatctcaccacctaccaacgtcttcaaacccgcaccgatatcacggccgacatgccgtgtctgaacagtgctcccttgaacaagtcccttcacctctttaatggtcttgccaggaatatcgttcattgtgacgattaacatccacatgcacccctcttcaattgttaccatccttacgcaagaacctgcccataagtttcacttcacccaacttatggccgccacaaaaaaagcagccacaaaaagtgactgcttcaagattcaaagcttgaatgcctttatttcatcattcatctgttcagccaacgcggccaattgatgagcgctctctgacacttcctccatcgaacttgatgtctcctgtgctgaggctgcagcttgttcaacgccagctgctgattcttcagacacagatgcaatgtcttcaattaaattgttcatgttcccgccattttgagcaatctcctgcagattctctgaaattccatggatcttatcagccatgtccgccaccgcctcattaatcgtcgtaaagcttttgccagtggcttccatttgctctgacccggtcttgacttcatcatagcctgtattcagggacacgacgacatgactcgtttcattttggatgttgtcaacgatgtaggtgatttccgtaacagaattggcaacctgctcagccagttttcgtacctcatcagctactacagcaaatcctttgccatgctcaccagcacgggcagcttcgatcgccgcgtttaaagacaagagatttgtctgatcagcgatatccttaatcaccaacacaagttttgagatttcatcagaatgcttgtccagcccttgaactttctcgacggcatctgtcacgatgtcatcaatacgcttcatttgtgctgtcgactgctccatcattgaggccccgtctgtggtcaggcgggaaacgtcctgagaggtacgggcgatctcttggccgtttttctcagatgcctggatccgttgcagaaaatcactcatttcctcagacaaatgagaagccgaattggcttgtgtttctgcacctgttgacaattcttccatcgttgaagctacttgttcattgccggccttcacttcttcagcagcacggttcagggctgtgctttggttcgacactctgccggatacgttagaaacattaccgacgatctgccgtatgtttgttttcatttgattcactgcagcggccaattgcccaatttcgtcacggctgctgtaatcaacatcggcaacagccagattcccttttgccacctcagacgtggtcacaacaacttttttcaaattagatgtcacagatttgctgacaaaatacataaatataattccaatgataagtgcagctgcaatgacgcctgtaagcacccaaatcgctgatccgatgttttgattcgcattcgtaacgagaccagattgctctttgtgcatcatcttggtaagctctgtcactttttcaatgttggcggatgtggcttctgcaacactattattctgtttcatcgccgttgacatattattattctcaactgcattcaccacagcattcagaaatagctgatcaatcttttcattgtcagacctgatttcagcaaagatctctttcatctcagcagaagagaaccggccctccatttgattctcaagctggatcagtgactcctgggtttcttgaaaagatgttcggtatttatcgcttgtggtggaaacatagtaggagacatcaaggtatttgttctgcatgagtgtagcaatttccagcatgctattgatattcttgccctcgtcctcaatcgttccgacatcattctgcccctcctgcagctggtagaatgccagactgccagctgtaataaacagaacaccaatcaataagaagactgctgtatacttccgcccgatcgacagattacgccaagccccacttttcctcttttctgatttctttttgtgcactttctttttctttaacagactctttttcatgacacgcatcccccagttaatatgtatatctttatctaatatcggcattacgaactaagtattaagtactattttgattttgtcaaaaataagtaaaaataatagtgtgaatgttgttggcgactaaataaagatattttcaaataattattgacaaaataggaataatgtggtagattaatggtaacggccttggggaaggtcggaagtatcatatcacatcaaggtttacaggtaagttattatggtaaggcattaagccgtggcgttggggatcgcctagctccgcattcatttgcggagttccccacctattgctttgaactcagactaaagttgcttttagtctttttttatacccaaaatgagtttgttattagagcaggagggatgagaatgagatatagtattggactggatattggcattacgtctgtaggctgggctgttattaatcttgataaagagcgaatccaggacttaagttcacgaatgtttgatgtggctgagaaccctaaaaatggttcatcattggcagcaccaagacgagaggcacggtcttcaaggaaaacgatcagaagacgtcggtatcgagtgggaagagtccgcaagatgattctcgataaaggattgttgtcgaaggtacaggcagaacaattgtatgattggaaagatggagacctggatatatggctgatcagaatgaatgcacttgagcgacagttatcagatcgcgagtttgctagaatcctcatacattatgccaagaatcggggttttaaatccaaccggaaaagtgaagccagtgaaaaagaaggcgggcagcttcttcaggctgtaagagccaacaaagaattaatgaaagagaacaattacaataccgtggctgaaatgctaatgctcgatgataaattccaaggtcataaacgaaataagggcggtgactattcacatgtcattgccagaagtgaaattgaagaagaaatacataccgtgtttgagaagcagcgagagtatggacatccctttgctacagcagaaaatgaagacgcatacatatccatctgggcctcccaacgtccatttgccactcaagatgacattgttaagaagatcggcacttgcacttttgagccaaatgaaaaacgggcaccaaaattctcctatacctttgaacgatttcgtgccctcgataaaatcaatcgccttaaaataatttccgatacggcatcaccacgctttctgtcagacgaagagcgcgatgctattttgaatacattgatgaataaaaagcaagtcaagtatcaagaactccgaaaaacgttgaatttggctgaccatgagcgtttcaatgaactattctatgatctgaatgaagcgaatactaaaaacgaaaacaaggtatttttgtcacttgaaggcatatggaaaatgaaacaagctgttaaatctgccagtaacatcatgcccgaaaccattcgaccgattgattacgacacatttggttatgctttgaccgtatttaaagacgacccggatattcgggcttatttaaagaatgaatatgtgaatacaaatggtaaaaaagtcagcaacctttccaatcaagcttatgatgaagcattaatatcagagttattgaatctgtctttttctaagtttggccatttatcctttaaagctctgaataacatcttgccctacattgaagatggtttacagtattatgaagcatgtgaaaaagccggttacaattttaatcagcgtgttggtcagaaaaagcatgcccttctacctgtgattccaacaaaggatatcgccaatcccgtagtaatcagagcattgtcccagactaggaaggttgtcaattcaattattaaacgctttggccctccgtcatttatttatattgaaatggcacgggatatggggcgacattacacagaacggcgagaaattgaaaagcaattcaacaaaaacaggcaagtaaacgataaggcaaaagaacgcattcaagaactgcatcctcagcttagcgatccacggggtcatgatattctgaagttcaaattatgggaagaacaaaatgggtgttgtgcctattctatgaaatctattacaatggatcatttactcgatcccggttacacagaagtggatcacattattccatacagtcgcagctttgatgacagtaatgcgaataaggtacttgtgctgacaagtgaaaaccaaaataagagaaatcagaccccttatgaatggtttggcaatgacgttgtgaaatgggatgagtttacgtcttatgtgaacacgttaaaagtacgcaagaagaaaaagaatttactgcttaagaagaactttgacgaagatgaagcagagcaattcaaatcacgccatctcaatgatacacgttacatcacccggtttctcaaaggttttattgaggacaatcttcagtttcgtgaagaagaaggtaagaaacaacatgtccataccgtaaatggtgcttacacgtcattaatgcgaaaacgttggggtttcaataaaaacagacaggaaaatgacctgcaccatgcccttgacgccgcaattgtcgcagtaagtttacctaatcaacaaaaagtaagtcgttacttcaagcgaagtgaagagcatgcatcacagcttctgaaacgggaaggtgaacgctttcctgaaccatgggagggattcagaagagaactcgaagcaagaatggtccaagaccctgatcaattgaaaatggccctcgaaagtttatccatggcaggttatgatgaggcttttatcaatgaagtgaaaccgatatttgtttcgcgtatgccgaagcgttcgatcaaagggcagattcatgaagaaactctccgtcgacatcgggatataatgatcgtggatttatgcgcgtcgttacaaaaacaccactggaaagtataccatttaagaaaaacggtgactttccaatgtatggtaaagaatcagacccaatgacataccaagcgataaaagaaagattcctggaatatgacggtaaaaaagacaaagcatttaaagagccgctatataaaccatccaaggatatggagaaagccctattattcgcagtgtgaaaatagaggatacgaccaaccgagcttttgaactggataacaacactgtagcggcaaatggaagtattgcaaggacagaagtattcagacataaagaaaccaggaagttttatttggcaccggtttatgtaagtgaggttatggctggagtgaggccgagtaagttcattacagctaacaagccctttgataaatggataaacatcacagaagaatacgagttcttatatagtctctttccaaatgatataatcaagataaaaatgcctcgagaaaaaacatctaagactcatacaaaagaacagtttacttggacagaaggaattttttactataaaggcgttgatacgggcacagctgcaattaaaataattgatcataaagatagttttgaagatagggtaggtacgaatgggcttaaactttttgataaatttcaagtcgaccctttaggaaacctaaccaaagtgaataaggaaaaaagttatgtcgtataggcatatcgttattcgaaaccccgcaaaattgtccaccagacatgagcaattggtgataaagcaagatgagcaagtgacgatccctttagaggatatatgtaccatcacattagaagatcctgcaataaccataacaaatgctctacttagcaaatgtaccgagtatcatgtggaaatgattgtttgcgaccgtaaaagaatgccgagtggaattgtacagccgttccaccggcattctaggcaaaaaaccgtgatggacatgcaattgaaattaagcaagccatttaaaaaacggacatggcaaaaaattgttatctctaaactggaaaatcaagcacgctgtctggaactgcatcataaaggggatgaagctcaaagactgtacaccatcagccgctcggttgaatcaggtgaccgatccaatagagaggcgtatggcgctaagatttacttcgaagcgcttttcggaaaaggatttcaaaggcgagaagagaacgtttataacattagcatgaattatgggtacagcattattcgctcactagttgcccgctccctgataaggtatggtttcacaccaagttatggggtgtttcatgacagtcaaacaaatgcatttaacctggccgatgattttatggaggtgttgcggcctttcgttgatgctgtgattgtggaacatgtagatgccgattcagtatggtcctcacagattcgaaagaaactttttgaagtacttgaaattgaagcagcatggagcaacgatagattaaatatcacgcatggggtggataacatggttaaaagttttgtatctgcatgccggcagcaagatgcaaacttactaactttgccagaactcattaacttgaacgttcaccagtatgagtagatatatgcgtatcattgtattttttgatctgccggtcgttttacccagagaacgaaaagcgtatgcccgatttagaaaatttttgttgaatgatggctataccatgcttcagtactcagtttactcgagaatttgcaatggcgaggataacgtaagaaagcatatgaggcgactccatgaacatattccacctgtaaacggagcaatacgtgcgatgaaagtgaccgaacgtcaatttgaaaacatggatatccttctaggaacgaccacagctgaagaggaaataggtccaaaaaaggttgatttcttttgaaaaaatgcttgcaaaataaatttgcaggcgttttttctatttactttgataaaaaactatcaaagtggttaaagaaaacgagatattcttctctttttttaaaatgaaaacccttgaagtggggatgcttcaagggtttcagggccatgtatcatatcacatcaagatttacaggggaattatggccatgaacctcctttaaaataaaaaagaagcatcatatcacatcaagatttacaggggaattatggcttaccggatacaactgatacaaaaaaaccgatcatatcacatcaagatttacaggggaattatggcggattgactgcttttaaagcctggatagccatcatatcacatcaagatttacaggggaattatggcagttggtttgtgggcgtattgtccggactatcatatcacatcaagatttacaggggaattatggcaagcgctgtgtccatgctttcatttctcctatcatatcacatcaagatttacaggggaattatggctgcacgaactgtgctattgctgtcgtccatatcatatcacatcaagatttacaggggaattatggca

SEQ ID NO: 2081 - DNA, 15210 bp, synthetic construct
  misc_feature 1..15210: note = Synthetic
  source 1..15210: mol_type = other DNA
ttggcatgatttggattggtaccttaattataccaaaagccagtgttcatgcgggtttttttacgtttttttatccattttcatggcgcttttttattgatttatcagggtgcgaaactcgagtatgaagatggttttgtcagagagtaccattaccaatggaaaattatcattccaaaaatgggaaagctgtatcatcatatttcagcttgggaaaatgaaccacacgatgcaccatggatgcccgagaaatacaaaattaaatcagaacttcaccaccatcatcatgtgcctggtgacagggggcagcgaaaggaaaattgggacatcttaaccttagatgatgccttttctttcgttgttcattacatacgcagcggtgaagagtataggccatagagggctcccaatttgtgaaggagttctgttacatttattcacaaaagacggacttgagtggtttaaacatgcaattacttcacatccgtttgcaaccgcttcttagcagaccttatctcaccagtaaccggcatatgcccggacgccttagccagtccataaaccggcatgttcccatatatcgcttcataatgcccttgtggcacaacgtaggtttcatgataaatcccaacagcatcggtatcgcctattttccggttaaaattcttccatgctgccaaatgcttttgtcctctggaataggcaagcagatcctccttggaccgccagtacgtaatcatgactgttgtgcgcagtccgaagtaattttccatcgacagaaaaccaagctcctcctgattttcatacaactcccgaatcatacccggcatcgctgtaaaaaccggcagccatttgttgattgccagccgcttgttgatgcgcatgccaatcagaaacacgacaacatcccggctattttccgttgtgtaccgcccttcataaatatgtttatccatcgctagccctcccattgttaatttgatcaatcgtgtcactgcaccaatcaatcgcggcttttgtcaatcgtttcccataatccagagtgaaaagccaataaggggaatcctgtttgttatgcataagtgaggcaatcatcgcctcaatcgctttatacgtgctgtaacgctcctcaagcttttgctgataatcttcaagctgcctgatggtcgtatcagcatactggtgacgactgaaaaaaagcttcagcagcacagcgtttctttcaacaggtatcgcatcaattggggtttgcagccattcctgtaatgccgcctcgcctttagctgtgataacatattcttttttatccggcttaccatcctgcgttgtggtccggaccgtcgccagttcatccgtcacaagctgcttcagcattgggtaaatctgaccatagctgattttccaaaaatgattcagactctggtcaatcatttgcttgatgccataccccgagtggcaatccgtcgtgagcaacccgaggatggcatattttgtatgattatcttttttcatggaatcacctatcaatatgatatgtatctttgtgatatagtatacagaagatatttgtgaatgacaataatattttgacatttatttgtttttaattgcacatgtttattggtaaactgttgatagaaagtgtagtggaaagggatgtcatctcatctcatttagtttgaattttgcatccatatagcaaagactgtaaaaacttctgttagaaaatattgacaaatgcattcgggaaaattataatagatataacgacctaggggaggtcgtaagtatcatgatatcatatcacatcaaggttcacaggtaagttattatggtaaggcattaagccgtggcgttggggatcgcctagctccgcttatagcggagttccccgtacatctatgactaaatcatttagtcattttttttatacctaaatcagggtgttcacaaactatataaagcagggtggttaaatgagatacagcatcggcctggatattggtatttcatcgattgggtgggcggttatcaatctagacaaagaacgaatcgaggatttgaattcccgtatgtttgacgttgccgagaatcccaaaaatgggtcatcattggcagcgccaaggcgtgaagcaagatctgccagaagacgaattagaaggcgtcgctatcgtgtcagtcgtgtacgcagctttatcgttggaaaagggttgttatccgatgcccaatcagatcagctctacacatggaaggctgacgatttggacatatggctgactcgggtcaacggacttgaaagaaagctgactgatcgtgaatttgcccgagctttgatccactatgccaaaaatcggggttttaaatcgaatcgcaaaagcgaaagaaaagaagcagaaacaggtttattgttaaaagcggtcaacgaaaatacccgtataatggtggaaaataactatcgaacgtcagccgaaatgctcctgctggatgataaatttgaaggaagaaagcgaaataaaggcggagattattcacatgtgctttccaggcacgaaatcgaaaatgaaatacgaacagttttcgcaaaacagcgtgaattcggtcatcgttttgcaactgtagaaaatgaaaatgaatacataaacatctggggctcccagcgtccatttgcaacacaagaggatattgctaagcgaatcggtaactgtacatttgaaccgaatgaaaagcgggcaccgaaattttcctatacatttgagcgcttccgtgcgtttgataaaatgaaccgtctgcgtatactatctgatcagtcttcacagcgtaaacttaaagatacagaacgtcatgccattcttgaacagttattcaataaaaaagaagtcacctataaagatttaaggaaagtactgcaattgcaggaacacgagcgttttaatgaattattctatgatttaaaccaatccaatgaaaaaaatgaaaacaaaacgttcctgtctctggaaggtcagtataaatttaaaaagataatagcggaagtggaaggcaagacactcgctgagtcctacagaccgattgattatgatacatttgcctatgctctgacggtttataaagacgatcaggacacacgtgattatttactgaatgcttacgtcaatgaaaatggcaagcaggtcagaaatttggctgatcgtgcatacaacgaagaagtaatagacgcattgcttaatctgtcattttctaaatttggtcatctgtcgttcaaggcgttgtataagatattgccatatctggaagaaggctatccataccatgaagcatgtgaaaaggccggctatcatttcaatcaacgaattggtcgtgaaaagaaaaatttcctcccagtgataccaacaaaagacattgctaaccctgttgtcgtccgttcactttcccagacacggaaagttattaatagtattattaaacgatacggtcagcccacagaaatttatattgaattggcacgggatatggggcgacattataacgaacgcagagaaattgaaaaacaattcaataagaatcacaaactaaataaaaaggctaaagatcggatatatgaactgcatccggaaatcagcgaccccagaggacatgatattctgaaatataaattatgggaagagcaggatggccgctgtgcttataccacaaagaaaatagaaatgcatcgtttatttgaacatggcttcgcagaggtggaccacattattccatacagcagaagctttgatgacagcaatgcgaataaggtgctggtgttaaagaaggagaaccaggataagaaaaataagacaccgtacgagtggtttggtgaagataaagctaaatgggatcaattcacttcgtatgtgaatacgttaaaaattcgaaaaaagaaaaaagatttgctactcaggaaaaattttgatgatgaacaagcagaacaatttaaatccaggcatttgaatgatacgcgatatattacgcgttttataaagggatttattgaggataacctacaactgagggatgaggaaggacgaaaacaacaggtttttacagtgaacggcgcctatacctcacttatgcggaagcgctggggttttaacaaacatcgggaagagaatgatttgcatcatgcagtggatgctgtgcttgttgcggtgagcctgccttttcgccaccgggtaagcaattatttcaaacagcgtgaagaacatacatcacaattgctgaaacgtgaaggcgagcgttttccagaaccatgggaaggctttcggagagaattggaggccagattgatccaggatcctgataagttaaagttagcattggaaagtctagcgttaccaagttatgatgaagcgttcattcgtgaactgaaaccgatttttgtatcacgtatgccgaagcggtcaatgaaagggcagatacatgaagagtccatcaggagacatcggggatttaccgacaagggattgaacttaatggtgaagaaatatgtccttgaagatattccatttaacaaagaaggggatttcccgatgtacggaaaagaatctgatcccaaaacttatgaagcgattaaacagcgatatctggaaaacggaaaggatgccaaaaaagcgttcagtactgtgcttcgtaagccatccaaaaaaccggaaaaggctccgatcattcgcagtgtcaaaattgagtcgaccgctaatcgcatatttcatttggatgataaaacggtagcagaaaatgcgagtattgtccggacagaagtattctgccataagaaaacagggaaatattatctggctccggtttatgttagtgatgtggttgaaaaaagatctcctacaaaatttgtaacgcaaagaaagccatataaagattggttagaaattactcacgattatgattttatttttaatttgtactcgaatgatgtaataaaaataaggatgccaagagaaaaaacttccaagactgattcaggtgggttcgtgaaatggatcgagggtaccttctactttaaaggggttcacacgggaactgcacaaattttaatagcagatcatatgaatagttttagtgatgctataggttcccaaagattagcattgtttgaaaaataccagacagatcctttaggcaatcttagtaaagtacatggagaaaagcgtcatggcttatagacatttggttgttcgtaacccagctaaactgtcgacgagatatgaacagttggttatcaagcaggaagaatcaatcagcattccattggaagatatctgtacagttactttggaagatccagccatcacgattaccaattctgtcctaagtaaatgtacagaatatcatgtggaactgattgtatgtgataaaaagcatatgccgagtggaattgtacaaccttttcatcggcattccaggcaaaagacagtattggaactgcagatgaatcttggaaaaccatttaaaaaacgtatttggcaaaaaatagtgatacaaaagcttgagaatcaggcccgttgtttggagttgctccataagggtgaagaagcccaaaaactctatgcaatcagcagaagcgttgaatcaggagaccggacaaatcgtgaagcttatggtgcgaagctttattttgaatcgttgttcggctcaggctttcatcgacggcatgacaatgtttataatatttcgctgaattacggttacagcatcattcgttcattggttgctaggtcgattgtgcgctatggattcatgcccagctttggtatattccatgacagccaaacaaatgcatttaatttggcagatgactttatggaagttttgcgtccgtttgttgacgttaccattgcgataaatgttagcagtgattcggaatggtcgtcagaaatccgtgaaaaacttttcgaagtattggaaatagaagcggtttggaatagcgaacgattaaatgttacacatggagttgataacatgattaaaagttttgtgtctgcttgccggcagcaagatgcaaatgtgctaatgttaccggaattaacaaatattgctgtacatgcttatgagtaaatatatgcggattattgtattttttgatttgccggtggttattccaagagaaaggagagagtatacccgctttcgtaaatttcttttggaagatggttattcgatgcttcagttttctgtctataccaggatttgtaatggcgaggatagcgtaaggaaacatatgcaaaggcttaaacaaaatcttccgcctgttaatggagctatccgagctttaaaggtaaccgaaaaacaatttgagaatatggaaattttattaggatcaacaactgctgaagaagaattagggacaaataaagtggatttcttttaaaatttgcttgcaatcattttttgtaagcattttttattgtactttttatagaaattcaactaaaaacgagtgtttttacagagataattttcttttttaaaaaaagaaacccttgaaacggggaagaatcaagggttttagagccatgtatcatatcacatcaaggttcacaggggaattatggcagaatcacgtctgtttgcatggccattacatcatatcacatcaaggttcacaggggaattatggcaacgtcaatgctaaagaccctgacacacaaatcatatcacatcaaggttcacaggggaattatggcaagcatctgcattaataccgatgatgtctgatcatatcacatcaaggttcacaggggaattatggctgatgatacgtggtatgcatccgattgtgatcatatcacatcaaggttcacaggggaattatggcttcatcatagcacttatttagataatccgtatcatatcacatcaaggttcacaggggaattatggctttattaacgatctcatccgctagtaaataatcatatcacatcaaggttcacaggggaattatggcgtgaagcttaatgttgatcaattttacggtatcatatcacatcaaggttcacaggggaattatggcggatctttatgagcattactgtcatgtgaaatcatatcacatcaaggttcacaggggaattatggctatcccttcagattcatcaccaatttcaatatcatatcacatcaaggttcacaggggaattatggcccggccaaaaatcgaaaaatcacagttgagatcatatcacatcaaggttcacaggggaattatggcgatttcttcgtagcctaactcacgcaaaatatcatatcacatcaaggttcacaggggaattatggcacagggttcaacggggtcaagatgcatgaaatcatatcacatcaaggttcacaggggaattatggcgtgattttccatactttttaatgttttgtgatcatatcacatcaaggttcacaggggaattatggctcatgctcaccaacagatattaaatcattgatcatatcacatcaaggttcacaggggaattatggccgcaaaagcctttaccgttatttgaatggtatcatatcacatcaaggttcacaggggaattatggctgttttacaggtttaacaaactggacaaatacgaataatagtggaaaatgaacaattttggtttcttgattcacttgcctatttaaactttataccctaacataaagctatacattttatgtacagccactacttgttatgattgatgcctggtagcatttatgctattataagtgcataaaatgttattaaaaggctgggtgtaatggtttttgagctggtgtttcatgataaaattaaaaattttgaggaaatactactagaaaaagctaaccacgaaaagcgtaccaaagggaatggagattggttggacgttgccgagcgttatttagctcaaaaggaacgtttgaaattatacccttggcctgaagaatttaatgaccaaataccagaagaggaattcccgcctgttatgaagcatatcgtgcgaaacacaacgatcaccaatttgtatcgatggggaattcccggccgatcgacaggtaatcatcgaattttatatgctattcataattatcataaggtcattttagtctattattttgataagcaatataacggggatattcaaaggcaggatattcaaccggccgaagaacgctatttagcgtattgtatccataatccctcgctttatcctatccaaaaaggagagtgattttgttgtcttttacagtgaatgatgattttaataagaagttggcagatatcgttggtaaggatcatgttgaagaaatcgaacagcgaggctatttagccgcgcaaattgtgagccatcgtcataaaaaacaaatgacccaacaagaattggcaacagccattaatgttgctaagtctacaattggccgattagaggctgggctaacgcagccaaattatcaaacgcttctctctctatctcgtgctttagatacgcctctaacaattgatgcaaaatatgatgaccgtcaaattgcgaaaatataatccattacttgtaaatatctttttgaagccacaaaaccctccagtcgtttcagttcaggaaattataaaatatgttcgccattggaaaagtgaataaaacactctttaaaaattgctcgcaccaaaaagtgggcaatttttatttttacacaccattataacaaaatcgccagacaatattttgcataccattacgtgtcatgacatgatacaataggcataaaactggcccaagggaatgggataatttggtaaataattggaaatatagtacaacaattaaatccagacctttattatatactgaaacaaaaaaactggctgacctgattttacaagggtataacgaattgaaactgaaagaacaggttatcaataataatattttccaggtaaaatctgaaagtcggaaaagggaacttgcgtcaacaattctttcaaggctcaatatactggatgaatacctcaccagatgcctgattgaaagtgatgtggaaacaagtaaaattttagtgttgtacaccattgtcaggacagaccgtttattttacgaatttatggacgaaattttgagtgaaaagctcgcctttcaggatcctgtcataacggattctgatttcaattcgttttttgagtcgaagcggcagcaaagtaataaagttgccggctggaaggaatacaccttttacaaattgaagcaagtgtacatacggattttgttcgaatcagggttactgctgaatcaaaaaggcgagcgaaaagtggttataccgattatcaacccggatattatcgatcatataaaaaaacatgatgacccaagatacatcaatgtgctagcggaggttgagtatgaggacgataaatgagcgactggatgagattctgcccaggataaccgatccatcattccgtgaaaataaaggtttgggtaatgaaattggctatcatatattcgattatgaaccggaagatgaaatgctcgtgcgggagcgcgttaaatttatcaaagattcggtcaacaatgatgcgtctgatcaaaatatcattgaatttgacctgtatgaagtcgtactcaatatccttgagaataaagggtacttacagaaaaatttcgacatggaacagaaaaaaggtagtaatttcatactgaatgcgacccgtaaatcactgaggctaacgttaaacaatgatctggttatcaagtatatcgcagaccgtgtacaggacaacgatattgtgtttataaccggggttggaaaggcgttcccgatcattcgttcacacgtcattctcaataaccttcataaagctgtcggggagaaccctgtcgtcatgttttttcctggacggtatgacgggcaggaactggtgctgttcggtgagataaaagatgaaaattactatcgtgcatttcaattgatagattattagggggagatatccatgcacatacggaaaatgtttgaccgtcaaatagaccgtgacattaaaggtgttgtcaaagtcggacaggatgccgatgaaaatatttatcaggagcttgaagagtatgttgtgaccgatgaacttcagaaacatattggcgaattttttgcggcatataaagaagggattaccggcccgacggataaaatcggtgtctggatttccggcttctttggatcaggtaagtcgcactttcttaaaattttatcgtatctgattgagaaccgaaccgtgaatggtcagcaggccatcgaattttttgataataaaattgatgatccggtcattttgtcagacttgaagcaggcaggcgatgtcacgacagatgtcatgttgtttgatattgatgcgaagagcgagtcggattcaatggccgacagggattccattgttaaagtgttgaacaaggtattcaatgaaatgcaagggttctgcggctcaattccgtggatagctgaaattgaacggaatatggccaaggatggcagttatggggaatttaaagcgatctttaaagagatttcgggcagcgactgggaagatgcccgtgaggatttctattatgaagaagatgcgattatcgaagcgctctcgaaaacgacacaaatgagtgaggatgctgcaaggaactggtttgaacgtgcggaacaggaatatacgatcagcattgagcgatttgcgaaacgcgtgaaagaatacatcgattccaaaggggaggatcattatgtcgctttcttaatcgatgaagtcggtcaatatattggcgagaattcgcaggccatgctcaacttgcagacgattgtccatgaacttggccgccagtgtcatggcaaagcatggattgttgtgacaagccaggaagacatcgattcggttctcagtgttaaagggaatgacttttccaagattcagggacgttttgacacgaaattgagtctgtcgagcgcgtttgttgatgaagtgatcaagaagcgtattttaacaaaaaatgaagcaggcagacagacgctggaagaagtgtaccgaaagaacagctcgatccttcagaatatattgagcttcaaagacagtgcggatatgaaaaagtatgaaagtgaaccggacttcattgacgtgtatccgttcgtgccttaccagttcaacctgctgcagaaggtgtttaccggcgtacggattcatggagcttccggaaagcatttggcggaaggagagcgttcgctgttaagtgcctttcaggagtcggccgtccggtttgccgaccacgaggaaggtaaactggttccatttcccgcattttatgaaacgatcgaaacattcctagattccagtattcgtacagtcattattcaggcccaaaagaacgcaaagctggagccgtttgatatcgacgttctgaagttgttattccttattaaatatgtgaaagagctcccggcaaaactggaaaatattgcaacattgatgattgatgctatcgacgtggataaaatcgggctgaaacagacaattgaagcttccctgggccgactgatccagcaaacattgattcagaaaaacggtgatgactacattttcctgactaatgaagagcaggatgtcaatcgtgaaatcaagcatatgaacgtcgaaacatcacaagtgatccaaaaaattggcgaaattattttcgatggcatctataaagataataaataccgctattcagccaaatatcattttccgttcaatgcatttattgatgaccggcctgtcaaaacacaatcagctgatatcggaatccacgtgctgacgccatatgcggatgccgctatggattacaacgcttctgaactaaaaatgatgtcaatgcgagaaaacaacgtcattctgaaactgccccaagacacatcttatttggatgaaatgacagaaatactgaagatccaagcctatttgaaactcaagagcggtacgtccgtttctcaggttgttgaggatataaaaacccgtaaatcacgtgaagtaaccaaccggcgggaacgggtaaccacttatctgacagaagccttgaagtcagctgacgtctatgtcaattcgcagcaaatcgacattaaaaagaaaaacccggctgaccgtataaacgatgcattccggctgctggtcaaaacacactacaacaagctggatgatttgaaggcatttattgattcaacgaaagaactgcaggatttaattaccgcgtcaagccaactgacggcagacggcaatgatccgaataacaatgcccgcaatgaagtggacagccatatcggccgtctgactgatcggaatcagcaaatgaccatcaaagggatacggaacttttttgcgaatcccccctatggctggctggaattggacacgaccgcactaatgctggaactgtttaaagcccaggagatcaagttccaattaaacaacagtgagctgcagctggatgatccgaatctggtcaattaccttacaaaacgtgattatatagaccgagtcattgtcaaaaaacgcgagcgcatttcacctgtaatgctgaaaaatgtgcgggatttaagtcaggaactgtttggtatctcggcactgccgacagatgaagacgggttaaaaagcagatttaatgagctgttgaaacaagagcatgaaaaaatcaaagaccttctgggaaactaccgcaatcaatactatccaggcgagtctgtcctgaaagaaggcaagaaaacaattgaaacgttattggagattaatgacacggcgacatatttcaataaagctcggcaattgcgcaatgaattaaaagcatacgccagggattccaaagaagtcaaaagtttctttgataatcagcaggataaatttgacgaagcgatgaagcggctgaatatctttgaatacaaccggacttatgtgaccgatgaaacaattaacgcaacggttgacaagatggaaaaaatcgttcggcatgttgaaccatatgcccggatacaggaattgcccggcctgtatcaaacgtttgatgaccattttgttaccttgctggaagaagagtgtaaacccgttaaagagacaattcaacgggatgctgatgagattcagcaagcgttgaacaaggtcgacgcgttaaaaacaaagctttccgccacattccgtcaaaggttccgtgacctggaagagcggctggatcgtgtccataacctgtacgaagctattgcgatggagacagagagtgaccggttaaaagtccgctgcatggatgaaattgaacgcgaacggcaaaaaatggctgcagaacaggcggttcccgatacggatagaagaggcgaagacacaccccctgttgcaacacagcgtaagacaaagacactcagtaaaaatatgatgattaaagggacgaaaacattaaagtccaaagaagaggttgacgatttcgtggaagatctgcgagcaaaattgatgaatgaattggacgaggatacaacaatcaatttggtatagaatgctacggggagtgttggatatgaaagtagcggaagtgcgtgaaaagctgaaaagcagaaaaaaagatgagcttcagaaattaattgtggaaatgtataagcaatttcccaaaaaggtgcgggagacaaaggaaatcgataatctgattgacaatcccgatttgtttaaaacgaggaagcaaaactcgaaaaaggctgtccaaatgccggaccttctcagtgtggaatataaggtgaaacgctttttggaaaatgcacgggctcagaattatattgctcctaaccgtgttataccaaaaaaggagcgttccaattggcgttttaccgccaaaagacttgttgaccagctgacagtcctgtccgggcagtcggaacatgtcaaagcatgtgcgtactatttggaagagatttataaattattttgttatgcatccggtcattacgttttcgcaagccaggaaccattccacacaatcaggctgccgcaaccggatttttataatcgcgttgtctcacttaaaaagcaagtggaagaaccggacacttggattcgagaatcaatgctgctgattctggaacatgaccatgatcacgatatattgaccatatccctttcggaggttttattggcgaatcttcataatgccccgctcaaggaaagagcggtcagtatagcacaacatctggtacaggaaaaagaagccgaggtcagtaaagaagggcatataaacaggaaattcatcaagtattgggacaaggaatatatcaatgatttggtagagatgattttgatgatacaaagtgcgcttggggaatacaaggcggccaatgcgttttttaaaaaacattatatggctactgccggggaagtgaaattatatgtcctcttaaaaaatatcatgcgctatgaacgcgtcgatgattggctgcgcgaatacgaatctgctctgaaaagaggtatccggccaagggattcattgcaggacacgactgactatataagacgtgagaatgaattcccgagattcataagaagttatgagtagaacggggaaacagtactggagggtgcgacgatggataagggtgctatccgaaaatttgcagtaagtgcacgtaacaagctgttggaagccgtagcgcaaaaggcgtttgagctgggtgtcacgaaagatgcgattaaagaagcggacatctatcaggacggtttcatgataaaccagaagtactataaacaatatcagatcaaacagcgggaaaagttgattcaggaagtgaaccaaaagggctatgatcaggtaatcgaggaagtggcctatacgtggttcaaccgtttcatcgcactgcggtttatggaagtgaatgactatctgccaactgggatacgtattttctcctcaattgaggcaggtaagagagaccctgatgctctgaccgaagtgcttatgctcgctgacgatctggaccttaatgaacaaaaagtttatgaactgcaggatgccaatgatgatgaggatttattcaaatacatattgatcaagcagtgcaataagcttggcgaaatcatgccaatgatgtttgaggagattgaggattataccgaactgcttctgccggaacatctgctcgttgaaaattcagttgtccgcgatatggtgatga

SEQ ID NO: 2082 - DNA, 15035 bp, synthetic construct
  misc_feature 1..15035: note = Synthetic
  source 1..15035: mol_type = other DNA
atacccgacattgcaccaaatgacttcaactgtaacagctgaattaaaagaagatacgcaaatcatcgattggtttactgcactatttccgtgtggatcaatcacaggtacacctcggttagaaacgatgaaactgatcgatcagctagaaactcaggcaagggaagtttattgtggtgcaattggttacatcacaccaaatcgtgaagcgatttttaatgtgccaattcggactgtgatcattgatcgagaacagggcaaggcgaaatatggagtcggtggtggaattacagcgggttcagaagcagctaaagaatatgctgaagtcgagacgaaggctgcttttctgacaaaaaaaagacgttcattttctttgcttgaatcattacgcttatcaaatcaacagtatcctaacctagcggctcacctcaagcgattaggggactcggctgcctattttggatttcactataatcagcaaacgattcgtgcacaactcgaatcgtttggggaaaatttttcaacaaaagattataaagttcgtttattgttagatcatcatggtgaagttcaattaaatgctgaagaagtgttactaacggacaagtcggttaaggcttatttagctgatcagccgattgataaaaacaatccctatttgtatcataagacaacgattagggatcaatatgatgaagttgagattcatgagccagataacttttcgacactgttgtggaatgagcatggtgagttaacggaattttcaatcggtaatcttgttttaaaaatgaatgggcattatttgacgccaccaattgatgcgggtctattgccgggtgtttttcgccaaggattacttgaacaggggaaaatttctgaagcaattttaagaaaagaagatttgaaaaaagctgaagaaatttggttaatcaatgcagtacgtggctgggtaaaagttggaaagatcatctgagtgactgtttttaaaaaatggtcagttatttgtctgtttcaagctcgagattcgtgcgaaattgtctaataagtgctacaataaagaggcatatttgctttctattctatgcaagatagatggagggaattccgatgtcaaaagtacaaacaaaacatttagttaaacagtttaatttagaaattattgcagggcatgatgggcttgatcgagggtttgttatgagtgatatttcccgcccagggattgaattaacgggttattttcgttattatccgaaagcacgaatccaagttttgggtaaaactgaaatatcttatttgaatgagttatctgaacaagagcgaattgatcgttcaaaacggctctgtacaaatgtgacgccttgtatcgtcattacccgaggattagaagcgccacaagaactgatcgatcaatgtaataaatcaaatgttccattactgagttcaccatataaaacgacacgtgttgtcagtcgattaacaaattttttagaagcagaatttgcgccatttacgacgatgcatggcgtgttagttgatattcatggtgtcggtgttttgattactggacaaagtggtgttggtaaaagtgagacggctcttgaattggtcaaacggggacaccgtcttgtagctgatgatagtgtagaaatccgtcaagaagattatgaccgtttaatcgggaactcacctgaattgattgaacatttgcttgaaattagaggactaggaattattaatgtcatgacactctttggcgcaagtgctgttcggtcacgtaaagaaattgattatgtgattaatttagaaatttggaatgagaaaaaacagtatgatcggattggaattgatgatgagttaattcgaattattgacgttgaaattccaaaaacaacattacctgtccgtccagggcgaaacttggcggtcattattgaggtcgctgcgatgaacttccgcttgaagcgtcttggggtcaatgcagctgaagagttttcaaatcgattaacagagatgattgaaaaggaaaaagagaatttagaaaatggaatcaggtcggaatagttagaaggaggatttgttttgatgctattaaatgcaccattaaacccagttttttttgaacttggcccaattaaaatatattggtatgcaatttttattgtaactggcgtaatcgttggtttattacttgctaataaagagggcgaccgcttaaacttacctaaagatacatttggcgatttattactatatgcactaccaattgcgattttagcggcgcggctctattacgtgctctttgaatggcagcgttatgtcggtaaaccttggtggagtatatttgctgtttgggaaggtggccttgccatacatggcgcgctaattggttctattattactgggattgtgtttgccaataaaaataaaataccattttggaaacttgtagatattgctgcaccaagtatcattattggccaagcgattggtcgttggggtaattttatgaatcaagaagctcatggtggccctgtttcacaagctgcttatgaaaatttcattcgcttcttacctgattttattgaaaatcaaatggtgattgatggtgtgttgtatcacccaacttttttatatgaatttttatggaacttacttgttttcgctgggttgctatggttgagacgacggaacccactgcgtggcgaggtatttattaattacctgatctggtattcagttggtcgatttttcattgaagggatgagaacagatagtttgtatatgtttggtgatacaattagaacagcacaattcatctctattttaactgttgttgttggtattatctttattatttatcgccgaaaatccgatcaagtaaacgttcgatataacggtaaaaagatctgatcgaacaacctgctgatttcaaccaaattagcaggttgtttagtaaattttataatccttgattaaattaatagatgaacaattgagttgtaggcggcaccgtgacttcactccggatggacgcgcaagacgtggcagttttaatctacacaataagaattttcagagcggtactgggactacgattatcgttctatcaaagagatatgtttctacagaagtcgccatcctgacggaaagtgaagtgtcttcagatgatgggactcaagtacaaaggctttaggtagttagaaattttagggggaaatgcattgaaaatagatacactattgtttgatttagatggaacattgatagatacaaacccattaattatcgaatctttcctgtttacaatcaaaaaacatacagggcaaacgtatacgaaagaagctgtcttaccttttattggaccaccactaatcgagtcaatggaaaaaattgatccgaaccaggctgaggaaatgatggctacatatattgagcataacatgagtaatcacgagggctttgttcacccatatccaactgttgtcgacacaattaagaagcttcacgaaaaaggctataaattagcaattgttacgacgaaaataacagaaaatgcacgcctaggcttagagattacaggactcgcgccgtattttgatgttgtcattggtttaacagaggttgaaaatgccaaacctgatccagaacccatttttaaagcacttgaagcgcttggcgaaacggtagacaatgcactgatgattggggataactatcatgacattgaagcgggacaaaatgcggggacgaaaacagcaggtgttgcatgggctattaaaggaagagaaacgttagaagcattaaaaccagattatatgctagaagaactagcagacttattgaacatattagaggtggattaaatgcgtcaaaccgaacgccattcagttgaaggctcgaatgcgctttggcaaatgtataaaacagtctcatttttaaaggtcgttaaaaattttctagttatccaactcgcacgttacacgccatggttaccaatgaaaaattggctgtataaaaattttctaaacatgaaagtgggcgacaaaacagcttttgctttaatggtgatggttgatttaatgtttcctgaacgaattactgttggtaacgactcagtaattggttacaatacgacgttattgacccatgagtatttaattgatgaataccgtctgggtgatataaagatcggtgatcaagtgatgataggagcaaattgtacgattttgccaggtgtctcgattggtgatcgtgcaacagttgctgccggtactgttgtcacaaaagatgttgagcctggtagtttcgttggtggaaacccgatgcgagttatttttacgaaagaagaaatggaacaaagaacgcaatcaagacttgattgacaattgtctaaggatcaatcaagaatctgttatttgtaagattgtttaggggggcaaagagatgaaattgtccaatcgaaatcgagaagagacgttgcaagctttaaaacaaaaaacatatgatgtcttaattattggcggcggtctaacaggagcgagtattgcacttgatgcaacaacacgaggaatggataccgctttgttagagatggctgattttggctctggcggttcgtatcgccaaagtatgttgagttttgagcaaggtgattactattataaaacatggaaagacttagaagtagaaaaagaaacaatcgcaacaaatttttcagcattatatcaacatacaacaggtatgtatgtcaaatatcgcggtgaccttgatctaaaaaatttaacgacgattaaaagaagtttactatttccatttagaaaaagacagacaaatgatactactcaagtcgtgcgtgctaaagatattcagcagtttgaaccactcgtcaatctgagacatttggagcgaggatttttatttgaaagtggcttaatcaatcgctcattaatggcaattgaattgattaaacaagcaagtcaactcggaacagacagtgtaaattatttgaaagtgattcaatttatttatgatcaagataatcaaatcattggtgttaaagcagaggatcagatcaatggagattcagtgtcgatttacgctcggagaattatcaacgcgacggggaaaaattttaatcgaatccgtaaacttgatttaaccgatcaaaaacaaacacttcctcaaacaatcaataaaaaaacgttaatctaccttaatacggctacacctccaattaaacggattctaacttttaatgatattcaaagagcatcttacgttacactggttccagacaagggtaaattgctcttaacatcagtggaaaaattagtgcgaccagagaaattgtctcatcgaccgtcagaaacagatattaatcattatctcgatttacttaatcaagttgttaaagattacagatttaatcttgacgatgtaattgacatcaatttaacttatgaggtaaattatgaatcaaatagtgagatcactaatttattgctgatttctgatggaggattaatttcggtatttggaactgaaacagaagcgtatcggttatacgccggtaaagttgtcgaccatcttgcaaaaaaattgaagaaagaaatgaatattctttattctaattcagaaacaaatgtaatctcgattaatcagaaaaaacaagttgatcctgatgaatttgaatctttagcaattgatcaagcagagttaagtcaaatcacaaaagtttatggcgaccaaacgacacagttactgaaatactatcagcgtgctgaaaagaaatcgacaaagcataaaattaatcaattgctttgtgcagagctcctttattcaattgaacaaacagcgatttattcaccactcgatttcttcattcgtcggacacgaatgattcacgatcttgatcatctatccgagcaaacaactgggatcctcaatctactcgcccagaaattagcctggacaaaggaagaacgctcatattttgaacgggaattcagaatatggttaaccgaacaagattaacatgttaaactataatgagatgacttactcattggttattaaatgaaaaaaagcaaaagaggcgaaagacgatagacaagaataacaaaagtaaaaataactacaataaagcaatcatcccttttattccggatgcaaaattttatttttccaaaggggtcgatgctttttacaaacgaaaatttgatatcgccttaaaatggattaaaaaagcagaggaatcagatccaaatgagattctttatccaattcagatgtcagttgtttatactgagatggagaatttccaccttgctaatcaaattttaactgatctatatcaacacaatcatcaagactatccagaactctattatttgatggcaaataattatgcccatttgggtttattaaacgatgctgaaaaatatgcggcactctatttggaaaaggatgctgatggtgaatttagatctgaagctgaacaattattaacattgttagaacttggtttatctgatgacgatgaggactttgattttgactttgaacgagaagatgagattctgatttaccaagagacagctttttatcacttacaaagacgtaattggcatgaagcaggaaacattttaaccgaaatgattcaacgatttccagactatcaaatcgcaaagcatcagtatcactatgcattattttttgttggtgaacatgaagaggcgattcagttagaagaaaaaatgtacaagcaatatcctgactcaacctacagcatgacaaatttaattattttttatcatgatacgggtaaagttgaacaagctaatctcttgattaaaaagctctcaaatatttatccaatccattgtgaagcatcgttaaaaattgcgatctcatttgcttacgtcggtcattttaatcaagcttttgaacgtttttacccattaccaaaaggaaagttaatcaatcacctcgattattatcgttactttgccctttcagcttctgcgcttaatcatcaagcacttgcaaaaagaatttgggcagaaggctgtaaaagacacagtgagttagcgcgtgaaccactaccttggttcaaagattaagcctgtgagcagattgttagacgaaaatagtgaaaaatacgataatgggtatacattatacaatcgaatctagagaattttgagttgaagggatgaaaaatatgtcagaagaacgaatttatgatctgattattattggagccggacctgctggaatgactgcagctgtctatgcttcacgagccaatttagcgacattaatgattgagcgagggattccaggtggtcagatggctaatacagaggacatcgagaactatccaggttatgaaagtattcttggaccagatttatcaaataaaatgttcgagcacgcaaagaaatttggtgctgagtatgcttacggaatgattaccgaagtgattaatgaagaaccctataaaatcgttgtggcaggtaacaaacaataccgtacgaaagccattatcatcgcaacaggggcaaaacataagaatctaggtgtgcctggcgaagaagaactcgctggacgaggtgtttcttattgtgctgtttgtgatggggcctttttcaaagaaagggaacttttcgttattggcggtggagactctgctgttgaagaagggatgtatttaacgaaattcgccagcaaggtcacgattgttcaccggcgtgatcaattacgtgcccaaaagatcctccaagatcgagcgtttaaaaatgagaaaattgattttatctgggatacagttttaaagtcaattaacgatgttgatggtaaagttggtacggttactttggaaaatgttaaaacaggtgaaagttatgaaaaagaagctgctggagtctttatctatattggtttagtcccgatgacagaaccattcgaatcattaggaattaccaatgaagaaggctacatcccaacgaacgaaaatatggaaacatcgatcccaggaatttttgccgcaggcgatgttcgtgaaaaaactctccggcaaattgttactgcaacaggcgatggaagtattgctgctgaaaacgttcaagcgtacattgaacaattagaggaaaaatttgagacagtaaaataaaaacattacaaaatgaacacaaaattaaacaaagctttacctcttcttaacgcagttgtaacacgactgaaacacacgtggggtatactataagtaattaattaacccccttttttaaaatatattttgaggcacagactacatcgagtctgtgctattttttttggctaaaatcaatcatttaattgatgtaattcacgagcaattgattcaatcataaacacaactggaacttggctcgtgatattcgtatattgataaaattcctcagttaaataataagcaatattgatatctgacatcttgccaatcgttgtatgcttattattagtaatactaatcactttactgcctttttgcttcatttgatttaattgattgatcgtaaaatgactctcacctgaaacagacagagcgatcgtcacactattgttttctagttttgaatgaatcggatacgatgaatctttaatatacagtgaaaattttcctaaaccagagaaataacgtgcgccatactccgctaaaataccagagctgccgttaccgataaaaataatgttatccgcatgcttcacaagctcagcagcagtcagaatcaactgttcctgttcagctgttaaattacgttcgaaaaattctagtacgggatgatgactactcttaactgatttatgctgattttcttgttcaagtttcagctttgttttaaactcggaaaagccttcacagccgagttttttacaaaaacgcaaaattgttgtcgttgagacgtgtgtttcagctgctaattcccggattctcatataagcaactttttcacaatgatgaatcacataattataaatcgacgtctcgagctcatttatattgacaaactcacttcagaagatgagtctagtggaacgatgcaaaacattgtcgatctaaagtggcaacccgaatttattaaggcattgcgcgcgattccttgtccataccaccgctactactataagacagaggaaatgtttgccgaagaaatgaaagcagcagaaacggaaggtacaagagcagaagttgtccaaaaacttgaaaaagatttattcgagctctataaagacgaatcattagcaatcaaaccaccacaacttgaaaaacgtggcggtgcatattatagtgatgcagcttgtaatttaattgactcaatttataacgaccgtaaagatattcaacctgtcaatacgatgaataatggtgcgatcgccagcatcccaaatcaatctgcagttgaaattaactgtctgatcacaaaagacggcccaaagccaattgcaatcggtgatttaccagtcgcaacacgcgggctcgtccaacaaattaaatcatttgaaagagtcgcagctgaagccgctgtaaccggtgattatgagacagcattgctcgcaatgacaattaacccactcgtaccatctgatactgtagccaagcaaattcttgatgagatgttagaagcacataaagcgcatttaccgcagtttgggtaagaccgtttaattcacaaaaaagtcaagatttattcctaaaatatgttgacaatgtaaaagatggggtttataatggtattaacgacctaggggaaggtcgtagaatcatattacatcaaagttcataggtaagttattatggtaaggcattaagccgtggcgttggggatcgcctatacccgtccatgtgacggggctccccatccttatgacaagcaatgactaaaagtatttagtcattttttttatatataaagctagtaaataattcaaaatatatagaaaaaggatgatttgtatgaggtatgatattggtttagacattggtatttcatcagtaggatggtcagttattaaccgggataaagatcgtatcgaagcaatgaatgtgcggatgtttgatgcagctgaaaacccaaaaaacggatcctcactagctacaccaagaagagaagctcgctcagctagaagaagactgagacgaagacgttatcgtgtaggtcgtgttcgacaatttattattaatcaaggactacaatctgccgttgaagcgaatgatttattcgactggcaagacggagactttgatatttggctcgttcgagtaaatggactagaaagaaaattaactgatcgcgaatttgcgcgaattttaattcattatgccaaaaatcgtggctttaaatcaaaccgaaaaagtgaaacaaaagcaggtgagggcggtgttttactaaaggctgtccaagagaataaagcattgatgcaagaaaaagcatatcgtacagttgcggatatgctacttcgtgatgagaaatttgaaggaaagaaacgtaataaaggtggtgactattcacacgtgctcgcaagaagtgaaatagaggaagagattcgaattgttttcacaaagcaacgtgaatatggacatccattcgcaactgaagaaaacgaagagacttacataaagatatggagttcgcagcgtccattttctactcaagaggatattgtgaagcggattggaaattgtacgtttgaacctaaagagaaacgtgcacctaaatttacttacacatttgaaaaattccgtgcattagacaaaattaatcggttgcgaattatttcgactacatcaccacaacgcccattaacaaaagaagaaagattattgttagttgagcaatgtatggagaaaaaggaagtaaaatataaggacttaagaaaaattttaaaattggaagatcatgaaaaatttaatgaattattctatgatccgagtgaaacacatgcaaaaaatgaaaatagaagatttgtctcacttgatggttattatcaattaaaacagatcgttcatagtgtaaaagataaaacgatcgctgaagcatttcgaccaattgattatgatacattggcttatgcagtaacggtttataaagacgacaatgacacgcgtgattatctcagaaataactatgtcaatactaacggaaagccagtctataatctagccaatcgagtatatgatgaacagctaattgaacaagttttaaatctatcgttctctcaatttggtcatctatcattaaaagcgctaaataaaattattcctttcttagaagaaggttatcagtatcatgaagcctgtgaaaaggctggatataatttcaaccaaagagtaggattagaaaagaagaggttactacctgttataccagctgatgagattgcaaacccggttgtgataaggtctttatctcaaactagaaaaataataaatgcaatcattaaaagatatggctcaccatcaaatatatatattgaaatggcacgagacatgggcagacattataaagaacgaaaagatctagaaaagcaatataataaaaaccgaacagtgaatgataaagcaaaagctaggatcagagaattacgaccagaaattagtaatcctagaggtcatgatatcttaaaatttaaattgtgggaagaacaaagcaacaggtgtgcgtattcactagatccaattacaatagaggatctatttgatcaaggagctgtagaggttgatcatataatcccatatagtaagagttttgacgatagtaattcaaataaagtattagtatttgctaagcaaaatcagaataaaggaaatagaattccatatgattggtttggctctgatactgttaggtggcaagaattcaattcatatgttaaagctttaaaaatacctaagaagaagaaggatctcttgcttaaagaaaattttgataatgatcaacaaaatacatttaaagcaaggcatctaaacgatacacgttacattactcgtttcttaaaaggatttattgaagataatttagaattcaggaaagaagaaggtaaaaagcaacatgtctttaccgtaaatggagcttacacctctttaatgcgaaagagatggggctttaataaagaccgtgaagagaatgatcttcatcatgcggtagatgctgtaatagttgcggtaagtcatccattccaaaacagagttagcagatactttaaacgcagtgaacaacatgcttctcaactattgaaacgaaagggagaacgattccctgagccatgggaaggttttacgagagagttagaggctagattagttcaagatccagataaactaaaattagcacttgaaagcttgtctttatctggatacgatgaggaatttatctctcaagtaaaaccaatctttgtttcgagaatgccgaaacgctcggttaaaggacaaattcatgaagaaacattaagaagacatcgtggctttactgaaaaagggcttaatttaatggtgaaaaagtatgctttagaagatattccattcgataaaaatggtgattttccaatgtacggtaaagaatcggatccgaaaacatatcaagtcattaaagagagatacttggaatatggaaaggataaaaagaaagcatttaatgatccactatttaagccatcaaaaaatccagaaaatgctccaataattaggagtataaaaattgaaacaacagcaaatcaagttttttatttagatgataaaaccgttgctgaaaatgctagtattgcaagaacagaagtttttcgccataaagagaatggtaagttttatttagcacctgtttatgttagtgatgtcgtggcgaagcgggttccagagaagtttatcacggcgttaaagccttattctgaatgggatctgataacggatgcctatgagtttctatttaatttatatcctaatgacgtgattaaagttaaaatgcctagagaaaaaacttcgaagacaaatacaggagagataaaaaaatggatagaagaaatattttattataaaggtgttgatactgcaacagcacagttgaatataactgagcataaaaatgagttttcagatagaataggttcaaagaatttgaaactcattgaaaagtatcaagttgatccgttaggaaatctaactaaagtgaatcaggaaaagcgccatggcgtatagacatatcgttatccgcaatcccgctaagttatctacagctaacgaacaattggtgattaaacaagaagaagcgattaaaataccgttagaggatattgtcacaataacgttagaagaccctgcaataactattacaaatgctttactgagtaaatgcacagagtaccatgttgaactgattatttgtgatcgcaaaagaatgcctagtgggattgtgcaaccattccacaggcattcaagacaaaaggcagttttagaaatgcagttatccttaagtaaaccatttaaaaagcgaatctggcaaaaggttgttgtgagaaagttagaaaatcaagcgcggtgtcttgaattaaatcatatgggagaagaggctcaaaaggtttatgcaattagccgaagtgtagagtcaggtgatcgaactaatcgtgaagcatacggtgcaaaaatttattttgaacttttatttggtaaaggttttcagcgtagagaagaaaatgtctacaacatttgtttgaactatggttatagtattatccgttcgttagtggcaagggcactagttaggtacggatttacgccaagctacggtgtttttcacgatagtcaaacgaatgcatttaatttagcggatgacttcatggaagttctcagaccctttgtagatgtgattattgtctcaaatgttactgaagatgatgaatggactccagagattcgtaaattattattccatgtattagatatagaggcggtttggaacggagagaaattaagtgtcacgcatggcgttgacaacatgataaaaagctttgtatctgcaagccggcagcaagatgcaagcctattaattctccctgaactgactaatctaaaagctcatagatatgagtagatatatgagaattatcgtcttctttgatttgccggttgcccgtcgacaagataggaaagcttacgcaaaatttagaaagtttttattaaatgacggctatgttatgttacagtattctatttattcaagaatatgcaatggacaagatggtgtggcaaaacatatgcgaagattaaatgaaaatcttccacgtgtaaatggagcgattcgagcgctgaaaattaccgaaaaacaatttgaaaatatggatattttattaggaacagtcactccagaagaagaattaggagcaaataaaatagatttcttttaaaaaacacttgcaaattattttgtgagtgtttttttaacgataaatttaattaatttgaacaaaagtgtgatatatttactagaattcgagtggaattttaaaaaagaaatcccttgaaacggggaagaatcaagggattgagtgccatgtatcatatcacatcaaagttcataggggaattatggcaagaaaaacacagagcaatcaacagaataaatcatatcacatcaaagttcataggggaattatggctgatgatgatgcggataatctcaccttctaatcatatcacatcaaagttcataggggaattatggcgcctcgtttagtccacttacatcgggcaagatcatatcacatcaaagttcataggggaattatggcacactaactgatgaagattggaaaaatgttatcatatcacatcaaagttcataggggaattatggcgtagcacgccctacccactgctttttaccatcatatcacatcaaagttcataggggaattatggcatctcattcatgtttaatggtggtaggtcaatcatatcacatcaaagttcataggggaattatggcggtgaatataacaac

SEQ ID NO: 2083 - DNA, 14934 bp, synthetic construct
  source 1..14934: mol_type = other DNA
  misc_feature 1..14934: note = Synthetic
tatcgtaactgatacaaaaggacatataaaggccgtcaaccctgcgtttacgacactttctggatttactgaaagtgaagctcttggtaaaaatccgaatatgctgagcgctggtagacagtcgcccgaattctataaagagatgtgggaagtaatcggaaatgatggtcagtggcaaggtgaactatggaacaaacacaaaaatggtgaagactatcttgaaatgttaacaatagcaacagttaaagatgattccggggacattgtccgatacgttgggactttccttgatataacaccggaataagaagagggcatccggtcgttaaggctgggggcccttgctctattgtgtaaggataaggaggacgtcaaatggagggccggtattcaagacaaacgctttttaagccaattggaatagaagggcaagaccgtattggcaatgctgcggctcttatcattggttgcggtgcactgggaacggcaatttcagaaacgcttatccgggctggtgtgggtaagttgattattgctgatcgtgactatgtcgagccgtcgaatttacaacggcaacaactatttacggagcaagatgctattgacggaacgccgaaagtcattgcggctgagcgcagattgaaagcgattcgtagtgacgcacaaatcgtaccagttcttgaccatattgatggtcctctattggaaagtctagcgaatgatattgaaatcattgtggatgcgacggataactttgagacgagattacttataaatgacatagcttggaaaaagaatatcccatgggtttacggtgcatgtgtgggaagtacaagcacaatgtttccgtttgttcctggtgcgtccgcttgtttccggtgtctcttgcctgtccttccagctgtgaacgaaacatgtgatacggcgggtatcatctcccccgcagttcagatcacggctgcccatcaaagtgcagaagtgctcaaatggttaactggaaatacggatgcgatgcgtaaaaaggtacttcattatgatagttgggcgaacacaaacatcgaggcgggaatctctcggatgaaaaacccgtcatgtgaaacgtgtggaaccaatccgtcctatccatcccttcaaacggggaatggtacgcagtacgctgttctttgtggacgtgatacagtacaagtcatacccgaaaaaggccgggtactttcccttaccgaggtagaagaagttgcgaaacgacttggcaatccctatcggaaaacaccctattttgttgagatgaaatcgaacgatcaccgctgtattgtatttgcaaatggccggttactcattcatggattgaaagatattcaagtaggcaggaaaatgtaccatcaatttttcggctaagcgcagggaagataaggagtggaaacgatgtcaactgaacatgaattcgatgaacaaaaacaattgatatactgtgtccttacaattagtgatacacgaacaatttcgaatgataaaggtggatggaccattcgtaccaagcttgagacggctggacataaaattttcgaaacatggatttgccaagacgataagatggaaatcgagtcaattatcgaggaatggctgcgcaatccgaatgtacatggcattataacgacaggtgggacaggcatcggcttccgagatgtaacgccagaaacgcttgaaccgtatttcacgaaaaagatggatggcttcggccaactgtttacaatgctaagctacacagaagacgtcggttcaaaagcgttgttaagccgtgctacagcaggtattgtaaaagacaaggttattttcgcgttacccggatctcttaaagcgattgagttggcgatggagaaactagtattaccggaattgcatcacattcatcatgaacttacaaaacacctgggcgattaacagcagaaaaaaacgtacagacaatcagttgtctgtacgctcataatctccattttttccacctgttttagactgtaagtaagtcgggccgatgaccatgtctttccccgcagctttacacatgtcgtatacagtcaatgctgcaacggatgcagctgtaagtgcttccatttcgacgccggtcagtccttttgttttcacttccgttgtgatggctatttcaaaatgatcatcttcaggtgcgatgagccattcaaaatggacattaattcccgtcagtggaagcgggtgacacatcgggatgattgtcgatgtctgtttggcagccatgacagcagctacctgagcaaccgcaaagacatccccttttttagttgttccctcggaaatttgagaatgaatctgttcattcacacgtatggaggatttcgcaattgcagttcggaatgtttctgatttaccggagacgtcaaccatcttagcgcgcccctgttcattaaaatgggtcagttcagtcataaaggacatcctttcgatttgttttatgtttagtataccattgatagtaaggagagatatgttgtgatggaaatgagaaaaccgatagccgtttcagaagcgatccagcgggtaatcgaccgtgttcaaccgctcggtagcgaaaaaattgcacttgcagaagcatatgggcggatacttgctgaaccaatcattgcaaaacacgatgtccccccttttgacaagtctccttatgacgggtttgctattcgatctgaagactcacttggtgcatctggtgagaatcggattgcgtttaccgtcatcgatcatattggtgcagggcaactagcaaaaagaagtcttgccaagtcggaagcgatacgcatcatgacaggtgcacctattcctgacaatgcggacgcggtcgttatgttggaacaaacagtggaaacagaaacaggatttacacttcgcaaaccgtttattgcgaatgaaaatatttcagcacaaggtgaagatgcaaaaaaaggtgaagaactcattcaatcgggaacgttcattcatccaggcaccatcgcattgctcgcaacattcggctacgcagaagtaatcgtcgccaaaaaacccattgtaggtattttatcaacagggacagaacttcttgacgtgcaggaagaattggtacctggcaaaattcgtaactccaatggtccgatgattgccgcacagttggctcgtatggggctggattcaaaatcatacggtatgcttgccgatgaccttgacgcttgcacggcaactgtaaaacaagctcttcgtgaaacggatgtcctcattacaacggggggtgtttcagtaggagacttcgactatttacccgctatttatgaaagacttggcgcagatgtgttgttcaataaagttgcaatgcgtcctggtagtgtaacaactgttgcgctagcggataagcaattcttatttggcttgtcgggcaacccatccgcatgttttaccggatttgaattgtttgcgagacctgtgttgctgaaaatgatggaatcagaaaaagtttatttgccttatgcgaaggcggttcttggtgaggacttcaaaaaagcgaatccctttactcgctttatacgggcaatttacgaatcgacgcctgccggtgcaacggttcgaccagcaggtttcaacaaatcaggcgcagtatcttcgattgcacgcggtaatgcaattatcgttttaccgggtggaacccgtgggtacgaaacgggaacggaagtggatgtcttgctcctgtgtatggaagaaggcgatgcgacgtgggtgctgtgaaaacgttacatgtaatcggttataaaaatagcggaaaaacaacactgattgcaagatgggtccgtttattgaaaaagatgggttattccgttgcagttttaaagcatcacggtcacggtggtgcacttagcatgcctgactcagaaacggatgcgatgcagtttttcacgacaggcgccgacgtctctattgttgcaggtggaggtgcggttcaattgctgatgaatgaggaacccgacttcacgcagttaaagcaactcgctatcacccgtatttcggatgttttactgattgaaggctataaagaacagatgggggataaagtcgttcttcttagaagcgaagaagattggcaatcgctgcacaacgtacaaggcgtacagcttgtagtgggagcacctgacacagcgattgactatccacatatttcgtcaagggcggaagaccggcagttggacttttggctgcttgattggataggaagggaagagcatgatgaaaccgtatgaaattgttgaaacaccaatagaaatacagaagtatgcggattatgtcttacatgccggcgcgggggcagttaccgttttcacaggcaatgtaagggaatggacgcacggaatccgcacattatatttagcatatgaggcctatattccaatggcggagaagaaattggctcaaatcggtgctgaaatggaagacaagtggccgggcgtgaaagtagcaattgtccaccgaattggtgagttgcatatctcggatattgccgtactcattgccgtgtcttcatcgcatagaaaggcggcatatgaagccaatgaatacgcgattgagcgcattaaagagattgttcccatttggaaaaaagagatttgggaaaacggagaagaatggattggtgcacagaaaaagtatccagaagggaatggttcagaatgattacagtcaattactttgcaaggctccgtgagttgaccggtaaatcggaagaaacgattgaatcggattcaatgaccgtccaaaaactgttggattgggccgaagacacgtatccgggcttcggtaaaagcacagtacatgtagcggtgaatgaagaatatgcattgaaagaagatatcatccaatcaggggatgtttgtgcattcatcccaccagtgagtggaggatgacggaaacggttggcgttatactggctggtggattgtccagacgtttcggctctccgaaagcatttgcacagctaggcgatttgaagttctacgaaatcgctatcaaggcgctcacagctcaatgtgatgaaattattatcgtgacgcggccagaacttgtgaaagactttcagacagatgcgcatgttataattgataagacggaatatgcaggacgcggtccgcttgcagggattctgtctgctatagaattcgtgcaagcggaccgctatatcgtattgccctgtgatatgccgtatgtaagtgaagctgttattggaaagctggaaacgtttcacgaaaaagatatcacggctgtcatcttggaaggacgagctcacccgcttgtttctatatgggatagccatctgaaatccgaattgcagaaggcattgaacaataaccagctaagcgttatgaaacttttagctgaaagtgaagcaacatggattgagggaagttcattgactgacggtgaaaggctcgtgttcacaaatatgaatacgcctgacgaattggaaaggggctgaagaaatgaaagcaatcacagacaaactcggtcgcccgattcgggatctccgtatctcggtaacggaccgttgcaactttagatgctcgtattgcatgcccaaagaaatattcggtgatgattatgcttttttgccgaaaaatgaattattatcatttgaagaaatcgagcggcttgcgaaattattcgcgtcactcggtgtaaagaaattacgtttaacaggtggagaaccacttatgcgtagggatttgcccgcattggtttcgaaactgatgaaaatagatggcattgaagacattgggctgacaacaaatggtgttttacttcgtcaatatgcacaacccttgtatgacgcgggattgcgtcgtttgaatatgagccttgacgcacttgatccggaaatcttcggcaaactgaatggccgagggattaaacccgacctaattttagcgaatattaatcatgcccagaatatcggctttgaaataaaagtgaatatggtcgttcaaaaaggtgtcaatgaaagcgaaatactgccaatggctgcctatttcaaagaacgaggcattgttctgcgctacattgaatttatggatgtcggcaatgataatggatggagctttaaaaaagtggtcacgaaaaaggaaatcttcgacatgctaaacgctgaatatgatatagagcctgtggaacaagattattatggtgaagttgcaaaacgttatcgctataaagacaacggtgcacaagttggcttcatcacatccgtttcagaatcattttgctcaacatgcacgcgcgcaagattatcatcggaaggaaaattatacacatgtctattcgcatcgggtggcttcgatttgcgcgacttaatccgcagcggaatgtcggatgaagaattacaagatgcaattagcggtgtatgggcaaaccgtggagatcgttattcagacgagcgcacagaacaaacagcaaaaaaccgcaaaaaaattggcatgagctatataggtggataagacgttgcttcggcagcgtctttatttgatgtaagggatagtgcacctcttttaatccggatgccagcttctgccacaatttgaagtgcgtaaatggtgtcagaaaccggcaccgggtgtgtgggatatgtgttacataccagcgaaggcgcctcaaaggggtagccgaagcaataagacgacagtgaacttctgtccggcttattgcgggaggcatccccgagcgccgacgcgtattcagtggacctctttcaatccggatgccagcttctgccacaatttgaagagcgcaaatggtatcagaaaccggtaccgggtgaattagatggagtaattgtaagagaattcgcgtcactgatgatacaataccaataacaaggagtgattattatggcaatggattttttttaagtgaatttaccgaccgaatttctacccttaatcaattctttagacggaataaatattgatggcaaggtaaaagtatcattagccatcggactttttgttgaaaagcaagtgactctcgccaaggcgggagagctgtcaggaaaaacaataggaaaatttatagacctattacgtttaaagaaaatttcatggatggaatacactgaagaacatttacatgacgacgaacgagcaatccgtgaaataatgggagatagtagtaatggggaaaagtgaaatagtaaggttgaataaatgactatctacataaatcaagcgaaggcgccttatcgggggtagccgaagccatccccaagcgcggaagcgggattcaatagacttctattaatccaagatgaaatcaatcgaaaaagggaataatcttcccaatgttgaattaaaagatatagaaatgaataactcaagggaggaatcgaaatgaaaggttcagcaatcccctatctaacattttacggcgaagcaaaagaagccactgatttctatgaaactgtatttggtttagaaaacctaggcgtgcaaaagtattcggatacaaactttccacacccaccggaagcggcggactacctgatgcattgtcatctgaagaagaatgattttcaactaatgctggcagactccgcggacaagcgacccgaaaacgaaagtcatggtctttccctcaccattcaatgcgaagacgaagaagaggcacgacgtctctacgatagtttacgacaaaagggtaaagtactaatggaactgcaagacacgttctggggtgcgaaatacggaaaagtgaaagacaagtttggcttcacgtgggacttgaactgtgaaaaaagaagactgaatagcatataaaagttctaacggtgcatttaaacttactttaaatggtacttcctaacaagtgaaaataacttttctatacaactttacaagtataagaatatttgatatattataagtgtgacttggggaagtcacgaatcgtattacagcaaagtttatagggttcttatggtaaggcataaagccgcggcgttggggatcgcctatccgtttatacggatctccctcaaaaaagtgactaaagtaattgaggccgctgaaaaagtcccttattaaaactaaaaccaaaagtctccatggaaaacgcttcggcgcttcgtggatgcctcccgcgataagccaggcagaagaccgctgccagtcttatcgctccggctaccactgtgaaggcgctttcgctggttctgtctaagcacttcacttaggttatttaaaagtaataagtacaaaaaacatgagccgttccacgataaaatcgaggaatggctcatgttttttgtagtataatgaagagactaattctaggcggtgtcccgatgatttcaaatcaagaaacgttaaacctcagcccatttacggcgatttacgatctcgttgtgccaaaagataatcagctacgtcaaatcaatgaccttgtcgatttctcttttgtatacgaagaattaaagaataaatattgtctcgataacggtcgcaatgcagtgtcgccaattcgtatgttcaaatatttattgcttaaatcaatctttgatctatcggacatcgatgtcgtggaacgttctaaatatgatatgtcgtttaaatattttcttgatatggcaccagaagacctggcgattgatcctagttccttaacgaaattccgcaaactccgtcttcaggatgcgggtttattagacttgctgattcaaaagacggttgaaattgcattggacaaaaagctaatcaacagtaaaacaatcatcttagacgctacacataccaaagcacgttataaccaactatcaccgaaagagtttttaatggagaagtcgaaaaacgtacgtaaagctgtgtatcaaatcgatgaatccatgaaaggaaagttcccagctaaaacaacttctaacgaagtgatagatgaattagcctattgtgaagaagtcattttagtgattgaaaaagaagcccatcttgtcaatattccagcggtcagagagaagttaaatgtattgaaggaaattgtagaagactatacagaacagctcgattactcagcggatccagatgcgcgggtaggtcataaaacagaagactcctctttctttggctataaaacgcatattgcgatgaatgatgaacgattgataacggctgcgattgtgacaacgggtgaaaaaagtgacggtaagtatctacaagaattgattgagaaaagccaagaaacgggaatggaaattgaaacggtgcttggagatgccgcgtactccgaaaaagataatattcgttatgcgaaggaccataagcttgaactcatctccaaattaaatcctagcattacgcatggtaatcggataaaagaagatgaatttgagtttaataaagacgcaggaatgtacgtttgtaaagcaggtcatatggcgattcgaaaagcgcgtacaggaaagaaaaatgtaggacaaaaccaaagccaaacctattattttgatatcaataaatgtaaaacttgtccgcttcgtgaaggttgttacaaggaagatgcgaaaagtaaaacctattctgtgacaattaaatcgactgagcacaaggatcaagaagcgtttcaaaatagtgatgagtttaaagaaaaagcgaaatcacgctataaaattgaagcaaaaaatagtgaattgaaacatagacacgggtacgatgtggccacatccgcgggtctatttggcatgcagatacaaggggcgatggctatatttgcggtcaatctcaaacggattaggacgctaatgagggaatcagagtaagaaataagaaggaaaaagacgccattttgttcaattttgaacgaaatagcgtctttttcaatttaggcctactctcggaatctaaaccgtaagtttttcagcggcctcaagtaatttagtcacttttttgtatacatattaaaatccaatttaaagggagtgtacaacatgaggtatgacatcggactagacatcggtgtaacatcagttggctgggcagttattaacttggataaaaacagaattgaagatttaggagtaagaatttttgaagtagctgaaaatcccaaagatggctcctcacttgccactccaagacgggaagcaagatcctccagacgtcgattaagaaggagaaaataccgagtatctagggtgaggaagcttattgtggagaaagggttattaacaagtgtacatgcagatgcactttacgattggcgagatggcgactttgacatttggcttctgcgggttaatgcccttgagcgtaaattacaagaccgtgaatttgctcggatcttaattcatgctgccaagcataggggatataaatcaaacagaaaaagtgaatcaaaagaagaggataatggcgttgtattatccgctataaaagaaaatcatgagaaaatgttggagaaaggttatctgacaacggctcagcttttagttcatgaagcggctgattatgaagggcgtaaacgaaacaaaggtgggcaatatacgcatgttttcgcacgtgcagatcttgaaaatgaaattaacatcatattcgataaacaacaagagtttggacattcgttcgccacccaggaaaacaaagaaatatttttagaaatgtggggttcccaacgcccatttgcttctaaagatgagattatgaataaaattggggaatgttctatagagaaaggagaaaaaagggcccctaagtttacatatcgttttgaacggtttcgggcattggataaattgaatcgtttacgaatcttagctccggaacaaaaggggaggccattgactgcagaagagcgagaaacggtgctgaatatgttgctagagaaaaaagaagtgaaatataccgcattacgtaaagaattgcatttgcaggaggaagaacgattcaacgaattgttttatgatgaaggaaaatcactggcgattaatgagaaagttacatttctatctctagagggacaatataaaattagaacaattataaaagaaacagaaggaaaagatgcagtatatgaatacagacccatcgactacgacgcaatcgcctatgccttgacggtttttaaagatgatcaagatattaaagactatctactaaaccaatatgtcgataccaaaggaagaaaacagttcaacatttcaaatcggatatacagcgatgggctgattgatagcctactcaatttatcgttctctaagttctctcatctctctttgaaggcattaacacaacttcttgtccatatggaagaaggaaaaacatttaaagaggcctgtgatttctgtggatactcaattggacaaaccaaaaatcagaagaaaacaaggttattgcctgttctaccggaagaagaaattcgtaatcccgttgttctacgtgctttatcccaatcaagaaaagtcataaatgcaattattaaaaggtatggaagtcctagtaacttgtatatcgaactagctagagagatgggaagaccgtataaagaacgaagagaaatatcgaaagaatacaatacaaatcgttcggtgaatgaacgtgcaaaatcatctgttatagaatttagcggcataaaagatccaaggggccatgatattttaaaatataagttgtgggaatcgcaggatggtcgatgtgcttattcattaaaaactatcccgctcgaacaattatttgagattggttatgcggaggtggatcatatcattccgtatagtagaagttttgatgatggaaatcagaataaagttcttgtacttacaaaggagaaccaagataaacagaatcgaacgccatatgaatggtttggtcacaatgaaatagaatggcaaaagttcatttcgtttacgagttctttaaaattggggcggaaaaagaagagcctactacttaaaacgaattttgatagcggagaggaagaagcattcagagaacgtcatctgaatgatacgcgctatattacaaggttcttgaaaaattatattgaggaaaatttgaagtttagggaagaggaggacgataagcaacgggtattcacagtgaatggtgcctatacgtctctgatgagaaaacgatggggattcaataaaaatcgacaagaaaatgatttgcatcatgcattagatgcggcaatcattgcggtaagtcgtccgtttcgatatcaggtaagtgcttatttcaaacaacgtgaaatgagcgtatatgaactgcttagaaagaaaaatagacgctttccagaaccttgggagggcttttcaagagaattagaggcacggatgcttcaaaatccaattcattttaaactggcgctggagtctttagattcggattcctatgacgatcagtttattaatgagacaaaaccaatttttgtttcgaggatgcctaaacgaggtgtgaaaggccaaatccacgaagctacgttacgtagaaaaagggatgagaatgaaaaaggttatacagttgtcgtatcgaagacgaagttagaaaatattcctttcgataaaaaaactggggactttgcaatgtttggaaaagaatcagatttaaaaacatacaatgcaataaaagagcgatatttgtcatatggaaaagactccaagaaagcatttactgaaccgctttataagccttcaaaaagtccggagtctgcaccggttattaggtcaattaagattgaggataagcggaatttatatgtgaatttgaatgataaaacgattgcggataacgcgagtattgtgaggacggatgtttttcagcatgaaaaggatgagaagtattatttgttaccggtttatgtatccgaggttaaaaatgttaagaatttaaataaatttatcactgcgaaaagaccgtatacgcaatgggtggaaaaaacggatgaatttatgttttgttttagtatgtaccccaatgatttaatccgagttaagctaccggcacctaaagaaagtagagattcaagtaatgaaataatcacttggcaagatggtttcttttattataaaggtaccgatacccaaaacgcatctattaccattctttcccaagaaggtagtttgttggatcggataggcgtacaaaggctattaacgtttgaaaaatatcaagtagatcctatcggaaatatccaaatagttactaaggaaacacgtcatggcgtatagacatattgtaatacgcaaccctggaaaaatttcaacgcggaatgaacaattactgattcatcaagaggaaactattcaaatcccgctggaagatatctgcacgattacaattgaagaaccggctgtaaccataacgagtgcgctgttaagtaagtgcacggaatatcatattgagtttattgtttgtgatcagaagcggatgcctagtggattattgcagccgtttcatcgtcactctcggcaaaaggttgtaatggaaatgcagttagctttatcgaagccatttaagaagaggatttggcaacaagttgttatcagaaaacttgagaatcaagctaggtgcttggagcttcttcataaagcggaagaagcgcagaaagtctatacaatttcgcgcagtgtagagtctggggatcgtacaaatcgtgaggcgtatggagctagattatacttcatgatgctttttggacaagactttaatagacgggaagaaaacgttcgcaatatttcactgaattatggatatagcataattcgttcattagttgcacgagcattagtccgatacggatttattccttcgattggaatcttccatgatagtcaaacgaatgcgtttaacttagtggatgatttcatggaaccgctacgtcccttcgtagatataatagttgcccttcacgtgtctgaggaaatggaatggtcaaaagaaattcgcgaaaaactatttggggttttaaatcaagaagcgatctggaggaatgaaaagcaaagtataacgaatggggtcgataaaatgatacagtcttacatcgctgcatgtcgagaaacggatgcgactcatcttgttttgcctgatctcgtatctctagaagaacatcggtatgagtagatttatgaggctaattgtattctttgatttacctgtcgttgaggctagtgatcgtagacaatatacgaagtttcgaaaattcctattaaaagacggatatataatgctacagtactcagtttatatgcggatatgtaatggggaggacgctgtgcaaaaacatatgaatcgattacattcccgtattccgcgagtaaatggcgcgattcgatgtttaaaaattactgaaagacaatttgagaatatggaaatattattaggggtaaaagcggtggaagaggattttggttcaaataaaacggattttttctaaggaaagtgcttgcaaaagatgcaggtactttttttatattgcaaaatgcgaaaaaaagcgtctgttaaaggaaaaagatgctctctaaaatagtgctttttaaaaaaaagaagccctataaaaccagtggtttcaagggctccagggacatggatcgtatcacagcaaagtttgtaggggaaatatggcgagggcacgcaaccaatcaacatgcgagcaatcgtatcacagcaaagtttgtaggggaaatatggcaaacattcgcccgaatcctgccgctttcaatcgtatcacagcaaagtttgtaggggaaatatggccgtaacccggctatactcccgattttccaaatcgtatcacagcaaagtttgtaggggaaatatggcccttccgcttgaccctaacattgtcgacatatcgtatcacagcaaagtttgtaggggaaatatggctgattcccacgtctttgattctgttccacaatcgtatcac

SEQ ID NO: 2084 - DNA, 14633 bp, synthetic construct
  misc_feature 1..14633: note = Synthetic
  source 1..14633: mol_type = other DNA
gcatatcagccgctttttttctacatataaggaaagcattgatcatccaacggacaagattggtgtctggatttcagggttctttggttctggaaagtcacactttctgaaaatattatcctacctcgtggataaccgtgaagttgatggaaagagagcgattgatttttttgaggataaacttaaagatccaatcgttctcgaagatatgaagaaagccgctggcattgatactgatgtaattttgtttgacattgatgccaagagtgaggcgggtgtcaagacggaaaaagattcgattgttaaggtgctgaacaaggttttcaatgagatgcagggtttctgtggttcgattccatggattgctgatattgagagacagatggacttagacggtaagtacagtgcttataaaactgaattccgagaaatttcagggagaaaatgggaagatgcgcgtgatgatttttactatgaagaagattcaattattgcagcgttaagccgggctacacagatgagtgaggaaacagcacgacattggttccaacatgcggaacaggactatacgatcagcatcgaccgattcgcgaaacgtgtcaaagactatattgatcgaaaagggaacgatcaccacgtggtattttttgttgatgaagttgggcagtacattggcgataattcggccgcaatgctgaatttgcagaccgttgttcatgagtttggtcgtcagtgccacggtcaggcatggattgttgtcacgagtcaagaggacattgattccattgtaaaagtcaaaggcaatgacttttcaaaaatcatgggccgcttcactaaaatgagtctatccagtgcattcgtcgatgaagtcattaagaaacgtattcttgagaaaaatgtacatacttcactcatccttaacgatgtttatcaggaaaaagaatcgatcttgaaaaatctactttctttttcgaacaaaggcgctgaaatgaaaagattcagcagtagtcaagaattcatcgatgattacccattcgttccttatcagtttgctttgcttcaaaaggtttttactggcgtgagaatccatggcgcttccggaaagcatctgtccgaaggtgagcgttccttgctcagcgcttttcaagagtctgcagtccaatttgcggatcgtgaagaaggactgctcgtgccattttctgctttttacgagacaattaagacgtttctagattctgtgatcactaatgttattgtgcgtgcttcaacaaatggatctttaacacctgatgatattgatgtgcttaaactgctctttctaatcaaatatgtaaaagaagtacctgctaaccttgaaaatttagcaacgctgatggttgatgcaattgatgcagataagatcgaactcaaggaaaaaatcagtgaatcactgaaacgattgataagtcaaacacttgtccagaaaaatggagaagaatacatttttctaaccaatgatgaacaggatgttaatcgggaaatcaaaaatatgcatgtggaatcatcagaagtcattcaacaaattggtgaggaattgtttggatcgatctatccaactaagaaataccgctactcaactcactacaattttccatttaattcagtcataaacgatcggccaattggaaatcagacaagtgatatcggtcttaaagtgttgactccggattatgagacagaaaatgatttaaacgaacttcagttaaagtcgatgtccatgcgcgaaggtaatgtgatccttcgtatgccgcaggatacatcgtacttggatgaaatggaagaaatccttaaaattcaagcttatcttaaactgaaaagtggggtttccgcgtctcagacaattgaagacatcaaaacacgcaaatcgcgtgaagtgacagatcgattcggtcggatcagcattgcacttattgaggctttgaaaattgctgaaatttatgccaacggcgagcagttaaagattaaagaaaaaaatccggtcgatcgtatcaatgatgcgttttttgctttaatacgaaatctttacaacaaaatcgattacattacagaatttgttgacaataaaaacatgcttatgactttgctgaatgatcggcaggatcaaatgaccgtctttgaggaagatatccccaactatctagccttaaaagagtcagacggttatatcgaacggatgtccatgcgtcatcagcagatgacggtcaaaacgatcatcaatcatttctcagaaaaaccatatggttggttggaactcgatacaacagctgtgctcgttcgtctttttcaaacacaagaaattaagctgatgatgaacagtgtttatcttcaaccttccgacagcaacctttttgaggctgttactcggagggatcttactgatcgtgtaatcgtaactaagcgggaacaaatttcaccggcattgttaaaagcggtcaaagatctttgccaaatactttttgatcgatcctcagtaccgacggatgaagacgggctgatgcagacatttcaaaaattgttagatcaggaactgcatgacgcaggcaaaatgcttgatttgtaccatgaacatccgcattatccgggaaaagaaattgttgaatccgggcaagacgcaatgagggcattggcagatattcacgatgccggaaccttttacaaaaaggcatacagtctcaaaagagatttagaggattatgccgatcaggtgaatgacgttaagggttttttcagcaatcaacggaataaatttgattctgcccttcatctactgaccgtttatgaaaaaaaccaatcctacatcacagatcaagattttctgaatgtagagcagcaaatggcacagatcgtgcatcatgtttctccatatggacaaattcataaattgtctcttctttgtgatgcattccgcgatcagttcatgacattgatcgaaaaagaaagccagccgattgaaaaaataattgaccgtgattttcaagaagttcttgatgaactgaataaagatccggaacttaagactaaatttgccacagattttcgccaaaattttattagattaaaagaacagcttgagaaagcggacagtgttatcgaagttattgccaagcagactgaaagtgaccgattgaaagtacgttgtatgaacaaaattattcttgaacgcgagcaacgcacacaggacgaagtgaaacaggatcctgttgttgatctgcatccaccggttattgatcacccagtgaaaaagacaaaaaccatcagtaaacatatgattatgcaggggacacgaacaattgcttctagggaagatatagaccgtgtcgtagatgaactacgaaaaaaattagaaaaagaattcgatgaaaacacgattattaagttggtatgactttgggagaacatatgatgaatgagcaaatcgacaaaaaagcgattaaggaatttgcaatctatgcaagagaaaaattgattaaaggtgtcacacaaaaagcttttgaatttgggattaccaagaataaaatagttaaaccagaaatctttgaaggcggttttaaaatcaatggagtactctatgataagaatcaattaaagcagcgcgtacacttaatcaatgaaatacatatacatggctatagttatgtgatcgataggattgcctacacgtggtttaaccgttttattgcccttcgattcatggaggtgaatggctatctgccaactggtattcgaattttttcctctattgaatctggaaaaaatgaaccagatgttctgagtaatatcgagctggtagctgaagaacttggtttagatttgggacaagtttacgactttcaagatcgaaatcaaaacgatcgtctttttaaatatatactgattcatcaatgcaacaagttaagtgaaatcatgcctaatattttcgaatcaattggtaatgattcggaacttcttctgcccgataatcttctttctgaaaactctgtgattcgagtgatgaccgaaaatctcaaagaggaaaactgggagcatcaggttgaaatcattggctggctctatcaattttataattctgaaaaaaaagatgaagtttttgctgaattgaagaagaatataaagattggtaaagatgatattccggctgccacgcaactttttacccctaaatggattgttcaatacatggtggaaaattcactaggccgtctgtggcttgaatcccatccaaatgaggagttgaaacagagatggtcttattatatagatgaagtagagcagccgttgaatgttcatcgtcaactgaatagctttataaacagaaatctgaaccctgaatctattaaagtgtttgatccctgtatgggatcaggacatattttagtgtatgcctttgacctactctttcaaatttatgtttcagcaggttactccaagcgagatattcctcagttaatcctgcagaataatatttatggactggagattgatgagcgtgcaaaacagcttgcgtacttctcattagtgatgaaggcccgtttctatgatcgacagttattcagaaaacatgtcgatattcatgtttatgcggttcatgaaagcaacagcattactgatgaagacattgatatctttgcggaaaacaaactattaaaagagcaggcacggaaattagttggtacatttgccgatgcagaattgtatggttctattttgaaagtgcctgattctatcgacttagagatgttgaatgcacgtataaaggaaatacaaaaaaaggacagttatgatttctttttagaagattttaagttaaataagctagccctctttaaagctcttgttaatcaagcaacgttgcttgcgatgaatttcgaggtggttgtcacaaacccaccttatatgggtcgaaaaggaatggatgaccggctatcgaagtttgtaaaaagtaattaccctgatgcaagcgcagatctattcgcagtaatgatggaacgatgcattcaatttgcgcggaaaaacggatttattagcatgattacccagcagtcctggatgtttctgtcatcttttgaaaaattgagattgtttcttctaaaagaagaacaaatctattcgatggcgcatcttggagccagggcattcgctgaaattggtggggaagtcgtacaaagtaccatgttcgttttgcgcaatcaaacgattccaaattataatgccacttatgtaaggctcgtagatattaaagacgcagatggaaagtcaaagcagtttaggaataataaattaaatttcataagaactcaagacggattctcagatatccccggctcaccaattgcttattgggcaagtgatcaagtgagaaagatttttagagaaagcttacctttatcaaacttaagtcaaccaaagatggggatgaggacgggagataatgagcgttttatacgtttatggtttgaagtaaataaacaaaaaattcactttaaaaattatgaaccattcaaaaatgactataaatgggttccatacaataaaggtggagaatacagaaaatggtatggtaatcattattttctagttaattgggaaaataatggtgctgagattaaagagaacacaagaattaattatccgcagttaggagaaaatttaggatggaagatctcaaatgaaaatgattatttcaaagaatctatttcgtggtcaagaatcagttcttcaaagtttggggtaaggtattataacgaaggttttatttttgatactgcaggttgttgtatatttgatacttcgttaattatccttggcttattagctagcaaactgacgattttttttctaaatatgatgaatccaactctagcttttcaagttggggatttaaaaaaaatacccattataaattttaaaaatgaatcatccattatattacatttagttcatcaaactattttaatctccaaatccgactgggattctttcgaaacgtcctgggattttaagcggcatccttttctcgaattccgagatggagcagtgactttagaagaatcatacagcaattggaaaaaggaagcagaccgacgttatattacattgaaagcaaacgaagaagagttgaaccggatttttattgatctttatggcctgcaagatgaactaacgccagaagagtcggatgacgaggtcacagtcagacgtgcggatcgtgaacgtgatgtgaaatcatttctttcatactgtgtagggataatgtttggtcgttattcactggatgaagaagaattgatttttgccggtggagactttgataacggacgctataagaactataagccggataaggacaatgtgattccgattactgatgatacttattttgaagacgatcttgttgggcgattgatttcgattttgaaattgacttttagtgacaatactttggagcagaatctcgacttcattgcacagtcattaaatacgaagtcgagtgaaacgtcgagacagcgaatccgccgctactttcttaaagaattttacaaagatcatgttcagatttataaaaaaaggccgatctactggctttttgacagtggaaagcaaaatggatttaaagcgttgatttatttgcatcgatatgagcctggattagtagcgtgtgtgcgaacagattacttacatgcaatggagcgtaagtatgaggaagagatgagtcgcttggatctgctggtggaatcggatgcacaagggcgggatcgggtgaaagcacgtaagcaaaaagagaaacttcaacgacaactaagtgaatgccgtcagtacgatcaaattatggctcatatggcaaatcagcagattaaattggacttggatgacggggttaaagtcaattatgcaaagtttcaaagcatcgtagtgccacagggagcgggaaagaacccactcaaagctgacctacttgcaaaaatataaatagatatagattaggagctgcggctatgaatctgaaagaagtgcggcgcatgttgaatgaactatttcagaaaccgctgtgttacggtcaaaaacgtcatctcgtgttctggtatgacggagcaggggactttaaagaggatataaacgaccttcagtttgatcagatacgtgtttggaaactgacatcgcataatttatttgcgacgaagtatgaattggagaagaaggatccgaattcttcttttctcatctatgctccgatggcaaagcctgccccacatgaagactggctgcttgaccaattgaaaatgggaatggaattttcgacggataaaacgacggtgatcatgcgtgagctgggaattgcagatccgatccttcaaccgattgttaagcattatgcaaagttttttaataataagcagagatatactgctttccagtcttttgaaatcactgattttgatcagcaatccattgatgttggcgttttgtctgtgctgtgtcgaaatacggttaatactccagatgaggtagtcaaaacactgatgcgggaatatgtggaagagagtaacagatcatgggaagcaatcggcaaatttggcgatccagaaagtttctggattttgatggagagaatgtatgactatacccggaatgaacgatcattacaagatctgttcacatttttcctgctgacctatctttccggtacggctcctgatcttaaattgccagattgttggaaggactatgtttcgttgaaaccaatgaatatcatcgtgctgatgaatcagtttatgaatcagtcggataaccgcgatgcttttcagaaactctcggaattggtggcaagcaccatttatcttgatgattacctcaaaaaatgggatatacaagactatgttggtgcagatgcattccgcggatttgatggtgctgttattgagtatattgaagcacagcttgcagcgggagtcgatcaatttgatacatatcagaatatgatcaatgcacgtcgaacgttacattggtaccacgattatcgggacgtctacgtggcgatagaggaggcaattcttttaatgcgtttggacaaggagcatcagcacttcgttcccgaggcttcttcatatgatctaatccaagcgtatataaaagactattatcgttatgatcgagcttatcggaagttttatactgcttatgaccgttgccaaaaggatgatcttttaattaccttacgcgagcaggttgaaagagtttacggcaatgtttatatgagggagctagcaaccaaatggacccaaggtttgaagcagtctcaaaatgagaaatggcctattgccggagtgccacagcagaaccgtttctatcctgatctaattcagccctttttaaagaaaaatgaacgcgtttttgtcattatctcggatgcttttcgatatgaagcagggcgcgaactgatggatcgattaaatttggagcttagaggtacagcagaaattgctgccatgcaaagtactctgccatctttcactgctttgggtatacctgcaatgcttccacaccattccatccgatatgagatcagcgagagtggaaatcagtcggtgaaggtggatgatgtcataattacgggaattgaaaaacgaacccttcttttacagaagagagttaaggagagtttcgcgattcgtgaacgagatatacgtgacctatcccgacaggaaatgcgggaacgattacaatccaaaaaggtaatctacatctatcataatcgaattgatgctaatggagatcatgcaccctctgagtcggaagtatttgctgcaaccactcaagcaattgacgagattaccgtactcatcaataagcttgtaaataatttaagtgcatcaaccattcttgttactgcggatcatgggtatctttatcagcgcgatccaatcaaacagagcgacaaattgccagttgttagtggacaaacattgcaaatgaatcgccgttttgtcatcggtgaccagaaaccaaattcagagggcactttaacattttcaacggaaggcttactatcaaatgatccgccactttttgtcactgttccgaatggtgcagagcgatttatgattcaaggtgcaggtgcgaattatgttcacggcggtgcgatgcttcaggagatcgttgtaccagttgttacatttaggaataaccggagtaacattttgcgcaaggtgaacgcgaaactgatgagcagttctcgtaaaatcacgacaatgattttgtttcttgaatttttccaaacagaacctgtagaagaaaaggtgcatccgcgccgattgattgcttattttatagattctcatggcgaaagaatcacgaatgagaaccatctacttgctgaccgttcttcagaaaaaccggctgatcgggtttatcgcgaaaaatttgtttttaaaaatcgagactataatcgtcaggctacttattttcttgtgcttgaagatgaagaagagaacgttgaaaaaaattttgaacggattcctttcactatagacattgctttttccgatggttacggtgtttaagatttggaaagttgtgatgtggatttggatcaaattaatatgcaagcatttaaacatttgacaaaaaagataaaaaggagctgatggtcatgaaatttgtatactgtcgaaataagtcgaaaatgcattaattaaaataggacaaaagtgattgacaaataagcccagtaatttaaaataatagataagcgatttggggaaatcgctgtatcacacgtatcgtatcagatcaagttttatagagtttgtatggtaaagcattatgctgtggcgttagggatcgcctcccgttatgggaattccctcattaaagtgactaggcccatggtttagtcatttttttgtaccaactatgactgaattttaaaaatacataaaactaatttcctatggagctgaaatatatgaaatatagtatcggtcttgatattggcatttcatcggttggctggtcggtaattaatctagataaaaaacgtattgagaagatgggtgctagattgtatgatgcagctgaaaatcccaaaaatggctcatcgcttgctgcgccccggagagacgctagatctgcccgaagaagattaagacgcagaagataccgtgtcggcaaagtacggcaatttattctcgagaagggattactcacacgtgggcaaatggaacaactctatgactggaaggccggcgatctggatatctggctagtccgggtcaatgcacttgaacgccttttaacggatcgtgagtttgccagagtgcttgtgcatcttgccaaaaacagagggtatcgttcaaataggaaaagtgaatcaaagaaagatgataatggtcaagtattgtcagcgatcaaagcaaataaggaattgatgaaagaaaaaggttatcaaactgtagctgaaatgcttgtaagcgaaccggaaaaatttgcgggcagaaaacgaaatagagatggtgaatatacacatgtgttggctcgcggcgaacttgagcaagaaattcagttgatttttgaaaagcaacatgaatatggtcaaagattcgcaacgccagacaataaaaaaatatatattgaaatatggtctgcacaacggcctgttgccacaaaggaagatattctaaaaaaaattggtgactgcacttttgaaaaaggcgagaaacgcgcacctaaagcttcgtatgcttttcaatattttcgtgcactagacaaattaagccggttgagaatcctatcttcaagccaaccatctcgtgaactggctgaggaggaacggaatgcgattatcccatatttgtttgataaggaaaaggtgacgtattttgaactaagaaaaaagttatccttagcggaggatcaacgatttaatgatttgttttatgatcccgcggaggatctgaaaaagaatgagaataaagtattcctatcattaaaagaacaatatgaaataaggaagatcataaagaatgttgaaggaaaagatgcattagtgcagtatcgtcccgttgatttggatgaaattgcttatgcattaaccatttttaaagacgataaagatacagttgattatctttccaataactatgtcaatgaaaaaggaaaacggataaacaatcgagcaaatcgaaaatataataaagagctcattgataatctgttaagtctctcattttctaagttcggtcatctctctttaaaagcattgaacaaattaattccgctgatggaaaaaggtattccttatttcagggcttgtgatgaattgggatatcgattggacgagcaggttggtgagagtaaacaacatcttcttcctgtcattccggctgatgaaattcgtaatccggtagtcatccgttcattatctcaaaccagaaaaataattaacggaatcatcaaacgctatggatcgcctttatatatgtatattgaattagcgagagaaatgggacgcccttataaagaacgccgtgatttggataaacaatacaataaaaacagagctgtaaatgatgacgcaaaagcatacattcaagagttgtatccgcataagaatcctcaaggacatgacatattaaaatttaaactctggcaacagcaagattgcaaatgtgcttactctcaagagacgattcatttgaatgatctttttgaatctggttttacggaagtagatcatataattccgtacagccgcagctttgatgacagtaacacgaataaagtccttgttttgtctaaaatgaatcaagaaaagaaaaatagaacgccaagtgaatggttcggtgcagacgaacatcgatggaaaaaatttgaaagttatgtcaaaactttgaaggtggcaaaaaagaaaaaagacttattgcttaaaaggaacatggacgatgagcaggagcagacgtttaaagcgagacacttaaatgacacgcgctatattacgagattcatcaaaagctttgttgaagataatctagaatttcgtgaagtgaaagatgcaaagcaacatgtttttgctgttaatggtgcgtatacttcattgatgcgcaaacgttggggatttaataaaaatcgtgaagcaaatgatttgcatcatgctgttgatgcggtcatcattgcggtcagccaaccattccgttatgaggtaagcacatatttcaaacatcgtgaggtcagtctgaaacaattgcttaagcggacatgggatcgttttccggagccgtgggaagagtttgttaaggaattgagagcaagaatattgcaggaaccggaaagactaaagctcgcactggacagtttggctttagatagttatgatcaggaattcatcagtgaagttaagccgatttttatttcacgtatgccgaaacggtctgttaagggacaaattcatgaagagactttgcgtcgggtacgtgggacaaggaaagatggatatgccagaattgtgacaagaaccaaattggagaatatcccgtttgataagaagactggtgactttccgatgttcggcaaggaatctgatatgaagacctatcaggcaattaaacagcgttatctggaaagcggcaaggataaaaataaagcatttattgaaccactctataagccggcaaaggatatgaacaaggcgtcaatcatacgatcagtgaagattgaagataaggcgaatcaggttgtttcactaaaagacgaggctgttgctgctaacgctagcattgtccgtacagaagtttatcagcacaagaaaacaggaaaattttatctggtccctgtttacgttgccgatgttgtggcaggaagggagccgaagaagtttataaaacctttgcagccatatgagaaatgggtagatattacggatgattataaatttttatttaatctcttctcaaatgacgtagtctatgtaaaaatgaaaaaatcaaaaacaacaaaatcaaacttaggagaaacaataatgtggcaggaggggtacttctactataagaaaactgattcagcaacagcacaaatcggaatcatggatcatatgaatagctatgttgatagaattggatctcaaaatctacagatttttgaaaaatatcaaattgatccactaggtcatcttacaaaagtgcatggggagaaaaaatatggcataccggcacttagtcattcgtaatccggcaaaactatcaacaaaagatgaacaattgttgattcaccaggaagaaacgatacgaataccgcttgaagatatttgcacgattacattagaagaaccggcgattacgataacaagcgtgcttttaagcaaatgtgttgaatatcaagtagaactgattatctgtgatcgcaaacgtatgccgtgtggcgctattcagccattcaatcaacattcccggcaaaaagttgttctggaaatgcagctgaagttgcccaaaccatttattaagcgaatttggcagaaaattgttattagaaaaattgagaatcaggcacattgtttggaactgttaaataaaggtgaagaagcgcagcgattgttttcgatcagtcgcagcgttgaatccggtgatcgcagtaatcgcgaggcttatggcgcaaaagtttacttcactgccgcattcggtgaaggttttcaacgccgtgaggagaacacacgcaatatagcattaaattatggttatagcattatgcgctccctcgttgcaagagccttggttcgatatggattcaatccgtgttttggcgtttttcacgatagtcagaccaatgcatttaatttggcggatgattttatggagacgctacgagcttttgttgatgtaacggttgcgatgaatgttcatgaaaaagatgaatggtcatcagatattcgcaaaaagctttttgatgtgttgaatattgaagccatatggaatggagaaaaacagagcattacgaatggggtagatcagatggtgaaaagttatgcaactgcatgtcggcagacagatgcatctcttttacttcttcctgaattagttaatatcaacagccatacatatgagtaaatttatgagaataatagtattctttgatctgccggtaacttcaagtcgtgaaagaaaagcatatagtcgctttcgaaagtttttattgaaggatggctatactatgcttcaattctctgtttactcacgcatctgcaacggtgaggatggtgtgcaaaaacacatgaaacgtttgaaagaaaatcttcctcccgttagcggagctattcgttcaatgaaaattaccgaaaagcagtttgaaaatatggatattttattaggtgaagatacgccagaggaaagattaggatcaaataaaacagatttcttttaaaaaggggttgtttttcaagcaatctcttttattttgcacagaaaatgattaaaaagagtaaagaaagttaaaaagtgatgcatttatgatcgctttttaaaaataaaaaccccttgaaatggagatgtatcaagggattcaggggcatggatcgtatcacatcaagttttacaggggaagtatggcttcag

SEQ ID NO: 2085 - DNA, 11005 bp, synthetic construct
  source 1..11005: mol_type = other DNA
  misc_feature 1..11005: note = Synthetic
agaatttttccaaaccgaaaaaatagaaaataagaaaaagccactacggctgaaacttttttttattgaccaagacggggctagaatttcaaatgaaaatatcattatcgcggatcggcaagtctcatcgcccgaggaaagagtttttaaagaaaagtttgtcttcaaaaacatgaagtatgataaaagggaaaagtattatcttcttcttgaagatgaagatgaaaccgtggaaaatatctatgagaaaataccatttacaattgatattgcgatcgccaatgactttggcttttgattaaatgggggagagaagatggaggatttaaacgaaaagttgaatgaatactttgccggcaaggttgttcgaaaagatctaacgaaaaaaattaaagaaggcgccaatgttcctgtttatgttctggaatacttgttaggcatgtattgtgctacgaatgatgaggatagtattcaagacggagtggaaatggtcaagaaaattctttcagataactttgtccgtccggatgaagcggagaaggttaaatctaaaattagagaacttggccggtatacggtcattgataaaatcactgtaaaattaaatgaaaaaagagatgtgtacgaggctgagttttccaatttaggcttaaaaggggtcgcgatttcctctcattttgtaaaagagtttgataagctattagctggcgggatttggtgcattttgaaaatggaatacttttttgatgaagaacaaaaaggaattagcccttttagtattgaaagtattacaccgattcaaatgccgacgatgaatattcaggaattgtttgatggacggaaaaatttctcaaaagaggaatggatcgatgttctgatacgttcgattggaatggaaccgacccaactgcaggaaaatgtaaaatggcatatgttgctgcgtttagttccattagttgaaaataattataatatgtgtgagcttgggccaagaggaacagggaaatctcatgtttataaggagatttccccaaattctatcttagtatctggcggacaaacaacggtagccaatcttttttataacatgtctacccggcaaatcggactagtcgggatgtgggactgtgttgcatttgatgaagtggccggcattacttttaaagataaagatggcattcaaattatgaaggattatatggcttccggttcttttgccagaggaagagaagagaaaaatgcgaatgcctcgatggtgtttgtgggaaatattaatcaaagtgttgatgttcttttaaaaacctcccatctctttgatcctttcccagatgcaatggcgtatgactcggcattttttgatcggatgcatttttatcttcctggatgggaagttccaaaaatgcggcctgaattcctaacaaatgaatatggttttattgtcgactacctagctgagtttttccgtgaaatgcggaagcgatccttttcagatgcggctgaaagatatttcaggtttggaaacaatctgaatcagcgggatgtcatagctgttagaaagaccgtatcaggtatgatcaaattgatatatccacatggagaattcaccgttgaagaagtggaagaaattttacgatatgccctagttgggagaaaacgtgtaaaagagcagcttaagaaaattggcgggatggaattctatgatgtcaacttttcgtatatcaataatgaaacgatgatagaagagttcgtgtccgttccggaacaaggcggcggcaagattattcctgagggtttaggaaaaccgggacatatatataccgttgcacgtgggaaatcagggatgatcggtgcatttaagatcgaaacagaagtggtgagcggaagcggcaagttggaaaggaccgggctaggctctgatcgggaagcgaaagaaagtgtggatacagctttcagatattttaaagcgaatagcaaaaatatcagcaggagcatcagcacaacgattaaagattatttgatgcatattcaggatattcatgggatcggattaaccagtgaactatctttagcagcttttatcgccttgtgttccggatctatccaaaagccggtgcaaagtcaaatggcggtattaggctcaattagtattagcggcactataaataaagttgaagagctggcaaacgttttacaagtctgttttgattcaggtgcaaagaagatattgcttccaatgtcctctgcagttgatattggtactgttccgcctgagctttttgctaagtttcagattagtttttatcaaagcccagaagatgcggtgtttaaggctttgggggtagaataaagccattttgtgaacaaagtatgacaattgataaaacaatgtgaataaaatctaaattctcttaataatgaattgacagaatgtgacaaaataccctaaaatatagatagtggcctaggggaatggtcactaaatcatatcagatcaagaattatagggtttttatggtaaggctttatgccgtggcgttggggatcgccttgctctgcatttttgcagagtctccccaaaaaatgactaaagcaatttagtcattttttttatagataaatgtcctaaattcatatagaaatgggtgttagggatgaagtatagtataggtcttgatattggtatttcttcggttggctgggctgtggtcaatacggacatggagcgaatcgaaaaaatgggcgtgcgaatgtttgatgcagctgaaaatcccaaaaatggatcatcccttgctgctccaagacgggaagcccgttcggcaaggcgcagactgcgaagacgtcgttatcgtgtttctcgggtacgagattttattttaaaaaaagggcttctaacgcaaattgagatggatcaactttatgaatggaaggcagaagatttagatatttggctagttcgagtaaatggtattgaacgaaagctaacagatcgtgagtttgctagagtgttaattcattttgctaaaaatcgaggttttaagtcaaatcgaaaaagtgaagaggcggaaacggagaccggagttgttcttagtgccgtcaaagaaaacactgatttgatgaaagaaaaaggttatcgcactgtggcagaaatgttgttatttgaagaagaaaagttcaatggctgtaagcggaataaaggcggcgagtatacccatgtcatttctcgtgctgaactggagaatgaaatccgacttattttcgccatccagcgggaactaggacatacttttgcgacaactgaaaatgaagcggaatatataaaaatttggagctcgcagcgtccatttgctgccaaagacagtattataaataaaattggcacctgtacctttgaaaagaatgaaaagcgcgcacccaagttttcttatacatttgaacgatttcgtgtattagataaattgaatcgcttgcgaattctatctgtctcagaacctcaacgaagtcttacagatgaagaacgtgagaaagcgcttcagtcacttttaaataaaaaagaagtaaaatataaagatttacgcaaactttttaaactaacagaatcagagaaatttaatgaattattttatgatccttctctaacagttgaaaaaaatgaaaacattacatttctatcattagaggggcaatggaaaattcgcaaagccgttgaagcagcagaaggaaaagtgctggcaaactcttatcggccgatagatatcgatacatttgcatacgccttaacggtttttaaagatgatcaagatatacgtgattacttgaataatacctatatcaatgagcggggaaagaagttaataaatttagcggatcggcaatacgatggttcattgatcgattcattattgaatctgtcattctcaaaatttggacatctatctttaaaagcattaaatagaatcctcccttatttagaggaaggggatttatatcatatagcctgtgaaaaagccgggtacgattttaatcaaaaaacaaatctacaaaagcatactttgctgccagttgttcctgcaaatgaaatcgctaaccctgtcgtgattcgatctttatctcaaacaagaaaagtcataaatgccattattaaaagatatggttctcctactgctatttatatcgaattagcaagggaaatgggacggccttacaatgaacgccgcgatatggaaaaacagtataataaaaatcgccaaattaatagcgatgcaaaaaatcatatcttggaattacatcctgaattcggtaatccgcgcggacatgatattttgaaatataaattatggcaggaacaaaacggtagatgtgcgtattcagtaaaaccgatttctattgaacgcttgtttgaaccagggtttgcagaagttgaccatatcattccttacagccgcagttttgacgatagcaatgctaataaagtgcttgtactagctagagaaaatcaaaataaacaaaaccgaacaccatttgaatggtttggccataatgaagcaaaatggcaggagtttacctcttttgttactactttaaaagtgagtaaaaagaaaaaggatttgctgttaaaaaagaattttgacgatgaacaagctgaaacctttaaatcaaggcatttgaatgatactcgttatattacgagattcttgaaaggctttattgaagaccatttacaatttcgtgtagaagagggcatgaaacagcatgtccatacagtaaatggtgcctatacctcgcttatgagaaagcgctggggctttaataaaaatcggactgaaaatgatctgcatcatgcattggatgccgttattgttgcagtaagccatccatttcgtcatcgcgtcagtacctattttaaacgtagagagacaacggctgcaaacctcttaagccggattggtgagcgttttccggaaccatgggaagggtttgtcagagaagttcaagcgcgcatggttcaagaacttgaattatttaagcgagctatagaaagcctcgagttaccaagttatgatcaagaatttatcgcggaagttgaaccaatttttgtttcacggatgccaaagaggtcggttaaagggcaaatccatgaagaaacgcttcgtcgcaaacggggatttgatgaaaaaggttatattcgcgtagttacaaaaacgaaattagagaatattaaatttgatcctacaactggtgattttaatatgtacaataaggaatctgatcttaagacctataatgcgattaaacaacgatatcttcaaagcggccaggataagaaaaaggcgtttagtacacctttgtacaagcatgcgaaagatccaagcaaagcatcgattattcgctctgtaaaaattgaagatacaacaaaccgagtagtcgagctgaatgataaaacggttgttgcaaatgcaagtattgttagaacagaggtatttcgtaataaagaaacaggtcgatattatttagctcctgtttatgtttccgatgtgatgatgaggaaaattccagagaagtttataactcctggtaaatcttatgaaaactgggttgatataaatgaggaatatgagtttttatttaatttatatcccaatgatataatcaaaataaaaatgccaaaggaaaaaagtacaaagaatcgtctaggtgaaaaagtttcttggcaagaaggaattttctattttaaaggtgtgcattcccgtcaggctcaaattaatattattgatcatatgaatagctttgaggatgcagtaggctcacaaagattacttctatttgaaaaatatcaagttgatccacttgggaacattacaaaagttcaaggagaaaaacgctatggcataccggcatatagtcattcgtaaaccatcaaaactgtcgacccgagacgagcaacttgtcattaagcaggaagaagcggttcgaattccactggaagatatcgtaacgatcactctagaagaaccggcgattacgatcagtagtgcattattaactaagtgtattgaatatcacgttgaaattataatttgcgataaaaagcgaatgccaagcggaatcttacagccatttcatcaacattctcgacaaaaagtagtattggagacacagcttggcctaagcaagccatttaaaaagagaatttggcagcaaattgtgatacgaaaactagagaaccaagccagatgtttggaattactaaataaaggggatgaagcagggaaaatttatgcaatcagccgcagtgttgaatcaggagacagaacgaatcgtgaaggatatggagcaaaggtttattttatatctctttttggacctgactttcaaagaagagaggaaacagttattaatattgcgctaaactatgggtatagtattatgcgttctttagttgcacgctctctggtaagatatgggttttcaccgagtatcggtttgtttcatgatagtcaaacaaatgcatttaatttagctgatgattttatggaagtgttacgtccatttattgatgtaactgtggcaacaaatgtaaatgaggaatcagaatggtctaaagaaatccgcgaaaaattatttgcagtattaaatttggaggctgtttggaagtctgaacgattaacgattacaaacggggtggatcaaatggtaaagagctttgtttccgcgtgcagacagcaggattcaacattacttattttaccggaattagtaaatcttcaaattcatacgtatgagtaaatttatgagactgatagtattttttgatttaccagtcaccacccgccgagaaagaaaagcctattcacgttttcgtaaatttcttttaaaagatggatacaccatgctgcaatattctgtttatactagaatctgtaatggagaagatgccgttcaaaagcatatgagaaggctgaatgaaaatctaccaaatgtaaatggggcaattcgttcacttaaaattacggaaaaacaatttgagaacatgggcattttactaggaaacgctactttagaagaagaattagggacaaataaaacagattttttctaaaaaagtgcttgatattttttcaagcactttttcggttgccttaaaatttgaaaaaagtccttaaaagagctgcaaattagcaaggatttaaatattttttcaaaaaaagaaacccttgaaattggggaataccaagggtttcagaaccacgtatcatatcacatccagaaatataggggaattatggcagagttatagtaagggtcacggtcgtttaaatcatatcacatccagaaatataggggaattatggctaactccgcataaacctttattttgtctttatcatatcacatccagaaatataggggaattatggctcattgtttaatgaaccatatatttgtttaatcatatcacatccagaaatataggggaattatggcattttattaaaaggttgtcccttttgcaacatcatatcacatccagaaatataggggaattatggcgaaatatggggaataaatgatgatttacaaatcatatcacatccagaaatataggggaattatggctctaaaacaaatgagcaatatttgaacgaaatcatatcacatccagaaatataggggaattatggctgggttatcgcgtttccccaaactgataacatcatatcacatccagaaatataggggaattatggcctgcaatatatattatacactattgcagggatcatatcacatccagaaatataggggaattatggcacaagcttggaaaccttcaagcttcatgggatcatatcacatccagaaatataggggaattatggcccaatctttgatagagttccagatattaatatcatatcacatccagaaatataggggaattatggcaagcttttcgcacgatccaataatgactgcatcatatcacatccagaaatataggggaattatggctgtttatagctttcatgtttatcacatttcatcatatcacatccagaaatataggggaattatggctgattaaagtgtacatgtgataccgcaaaaatcatatcacatccagaaatataggggaattatggctctattgtcctagcattataattattagtgatcatatcacatccagaaatataggggaattaatttaagtgcctgtcagagcgaccgagcctaggttgcaacatatagtgggtgggattcccaccgagaaagaactagccattcactcgtagcgagtcttggagggcaaggggtaacccttgcctttaagcgtagacagttaggtgatgggccgaaagccaattggttgaagggattgagctccgaaataccagtcgagagggctgatgtagttgacagtacagaaagcaatacttttactttcgtaaaaggcgagaaggtagaagcctcttcggagtcgatgacctcggcacgttacacatcgatatgttgtagcaactcgggaggtcctgtcggtctttccaattgacatggagagtatggtgaaacaagcgataacaagtgagtgaaccaaacgccgcacaggaagtcggataactgcatagtaccaatgaaatcgggtaattctgatggaggaaaggcagttaccttattattgcccttatggggacacatttactacacacagaggtaggtacattaaatggaaacaaaactaataaggatagcagaattagcaaaatctcatccgaaaatgaaatttacatcactagcacatcttctcaacgaagaaatgcttaaacagtgtcacgatgaattacctagtaagaaagcacctggtattcatcacaccactaaagaagatatgcagaaaatcgagatgacaacctcgcacatcttgtagcaagaatgaaacagaaaagctataagcctgttccggtcaggagaacttacatcggtaagcccggaacaaacaagaaaagaccattggggattccagaacacgaagataaaattgtccagcgtggaatagccaaaatattaaacgcaatttatgaacaggattttcttgatagttcttttggttttcgaccaaaacgaagctgccatgacgcgttaaagatactcaatgtctacatagagaaaagatataccaattatattgtagacgctgatatcaaagggttctttgacaacgttaatcatgaatggatgatgaagtttctgaaacatcgaatagatgacccaagccttttgagattgatagctagattcttaaaaggcggttatatggaacaagggaaattattcaagactgaacgagggactccgcaaggtgggatcatttcaccaataattgcgaacgtatatttgcattatgtcgtagacatgtggtttgagaaggttgtgagaaagtggtgtaagggacacgcgtacattgttcgctatgcagatgacttcgcctgttgctttcaatacgaaagcgaagcaaaagcattctataaggctttgattgcgcgtttgaaaatgtttaatctagaaattgcagaggataagacgaaaattataccattcggtagattcgctgaggaaaactgcaaaagaaaaggaaacgggaaacctccaacctttgattttcttggctttactcactattgcagtaaaagcaaaagtgggaaatttagggttaaacgtaaaactagcaaaaagaaagttagagcaaagctaaaagagtgcaaagaatggttgaaagcaaatagaacgactgatattcacttggtaaaagagcgtcttgaccgttcgctagtgggatacttcaattactactgcatatcagacaacacgctatttgttagaaacttcaaggacgaagtaagaaagttattctttaagtggatgaacaggcgaagtcagaagaaatcctttaactgggagaaattcgctctcttccttaagagatatccattcccgacacctagattaaaagttagtatttatgaaataaagaaagagattggttatattctgtgaatgataatagggaggagccgtgtgcgttaattgcgcccgcacggttctgagaggggggaggaacacaatttgccgtaaggcagaaaggttccctcctactcgaccttgtcgaaaagtatttaattaattttattgacaatgatttttaattgtgaattatttaattctcaattgaatttaaccagcacaattttgaattgcctatgcttcagaaaacagttgaactattaaaagtttgttttttcaatcgatgcggatttcctaatttttaataaaatggtcattattctttcgacaataatccctcgatttaaaaatgggcttaatgttcagacaattatttggccacctgaatattgccattgaaattaaccacttatgccatgaaattgatccacataggacaccattttgatccttcctctgacatagagtgagccagtgctacagtcctgcaatatagatttgatagcggtctttacaaggagaggtggtaatgataggcttccttgctaggcaagcttttaactgccgtttattgcccgagaatattaccacagaggctcctggtgaagaaagacattggatagttccacctctgccatgtttttgacccactaaggacataattttgatccaccattgccaagtgagaaccagtatgctagataccttatatatcaacaatcccaccacccttgaccttgtttgtgtccgtggtagtggttttgatggcgaatggcggaaataaagcctttgaggctcattcgcatcaatagcgtaccacggacaatcacttctaagttccgctggcggggccccgaccccttccagcgatcactaagaagtggcacggcggtcaagggcaagcagctaaagctgtggttaagaaagcatgtatcactgtggattggatcacctttgtctcaaatggatcattttcttgtcacag

SEQ ID NO: 2086 - DNA, 5327 bp, synthetic construct
  source 1..5327: mol_type = other DNA
  misc_feature 1..5327: note = Synthetic
accattccaccttcataacgttggctagacaagttgtcaggaactttcggcttctagaatagaacaaaatgatcaggattagggaataacgaggagtacgtagagcgtgctactaaaatgggctatctgtattggtataaaatcattttcatgaaattatcaatcattcaatcaaaaagagattgaaagaaatcctactcaaattttattagttcaatgtgacctagaatagtttgagcgaaacttctcagaattagatagaaatacaaaaatagtctttaagctttaataaaccacgccacaatattcaagagtaaacaaaattcagtaatatcatttctttctcatgtagttagaattgatgaagaattttagtgaatttattttggattaaacgaggctacatttgaaataaaaaaatttttgagtaattatatgaaaaattgtaaaaacaggttgacaattgaatcttttggaattaatatagttataacgacctatggggaaggtcgttatatcgtatcatatcaaggttcacaggtaagttattatggtaaggcaagaagccgtggcgttggggatcgcctagctccgctttatgcggagttccccgtttttatgaagacaaaatgactaaagttaatttagtcattttttttatatctaaaataactgaatgataaatgggggcgggggaattgaggtatgctattggtttagacataggaattacatccgttggttgggctattattaatcaagataaagaaagaattgaagatttgggagtacgtatttttgatcgtgcggaaaatcctaaaaatgggtcttctttagctacaccgcgaagagaagctaggtcagcacgaagaagattaagacgaaaaagatatcgcattagtagaattcgtaaatttattgtggaaagaggactgctgacaaaaacacaagcctcgcaattatatgattggagagatggcgatcttgatgtatggctacttcgagtaaatggtttagaaagaaaactttctgatcgagaatttgctagaatattaattcactatgggaaaaatcgtggctttaagtctaatcgtaaaagtgaagcaagtgagccagaaggaggagagctactacaagcagtaaggaaaaatgcaaaaattatggaagaaaataactatcgcactgtggctgaaatgattgtattagatgaaaggtttgaaggcaggaaaagaaacaaagatggttcctattctcatgttttatcaagaagtgaaattgaaaaagaaattagaactgtatttgaaaagcaacgagaatatggccattcatttgccacacatgaaaatgaagaacgatttattgagatatggtctgcacagagaccattttctacacaggacgatattgaaaaacgaataggagtatgtacatttgaggaaaatgaaaaacgagcaccgaaagcatcgtttacttttgagaaatttagggcattggacaaactcaatcgattacgaattatctctgactatgaaccttcacgccctttaactgataaagaacgagaacaagttattgatctattatttaataaaaaggaagtaaaatacaaagacctaagaaaagtgctgagtatacctgattatgctcgttttaacgagctatattacgatcgtaatgaaagtaatgaaaaaaacgaaaacaaaacttttttatctttacaagcgtattataagatgaaaaaagcaatcaaacaaattgaagggaaaacattggcggagtcctatcgtccgattgattatgatacttttgcttatgccctaactgtgtataaagatgatcaagatgcaaaagattatttgatgaacaactatgttaacgaaaacgggaaacgtatccgtaatatagcaaataagtcatacaatgaagtgttaattgaagagttgctacatttgtcattttcaaagttcggacatctctccttgaaagcgttgaacaatattatgccttatattgaagctggtgatcaataccacgaggcatgtaggaaagctggatatacatttaatcaaaaagtaggagaagaaaaaaagaagcttcttcctgttatcccaacagaagatatagtaaaccatgttgtaattagggcgttatcacaaacaagaaaagtacttaatgcgattattaagagatacggttctccaactgagatatatatcgaactagctcgagaaatgggtcgcaattatacagagcgtaaagagttggagaaacagtttaataaaaatcgagtcgtaaatgaaaatgcaaaaaagcgaatccaagaactagttccaggtattcatgaacctagaggacatgacatattaaaatataaattatgggaagaacaacatcaacgttgtgcttattctatgaagcctatttctatacgagacttatttaacgctggttatgccgaagttgatcatattattccatacagtcgtagttttgatgatagtaatgcaaataaagtacttgtactaagtcaagaaaatcagaataaacgtaacaaaactccctatgaatggtttggtcatgataccaaaaaatgggaagagtttgtctcttttgttaacagtttaaaagtaagcaaaaagaaaaaagatttactattaaaacaaaatttcgatgatgcccaagctgaagaatttaaatcacggcatctcaatgacacaagatatattacacgctatttaaagaaattcattgaggataatctgttatttagagaggaaaaggacaataagcagactgtttttaccgtcaatggggcatataccgcattgatgagaaaaagatgggggtttaataaaaatagacaagaaaatgacttacaccatgctttagatgcagctatcgttgctgttagtcgtccatttcgacatcgagtgagtgcttattttaaaagaaaagaagaaaaaacttctcagtatattaagagagaaggagaacgtttccctgaaccgtgggatgggtttgcaaaagaacttgaagcacgtttaattcaagatcaagagaaattaaaatttgctctaaaaagtttatctttagatagttatgatgaagattttattaatcgcattaaaccaatatttgtttctcgcatgcccaagcgttcagttaaaggtcaaatccatgaagaaacactacggagaatacgtggatacaatgaaaaaggttacttacgattagttacaaaaacaagattacaagatattccttttgataagaaaacaggggatttccccatgtatggaaaggactcagatcctaaaacttatcgtgcaattaaggaaaggtttttagaatatggaggaaatgtaaagaaagcctttgccgaaccgttgtataagccttcaaagaatcctaaaagtgctccgattatacgtagtgtcaaaatagaaacatttaagaatcaagcggtttctttaaaagataaagcagttgcagaaaatgcaagtattgttcgaacagaagtgtttcgccataagaaatcaggaaaattttatcttgctccagtttatacaagtgatgtaatggcaaaaagaattccagaaagattcataacagctaatacaccatttgcaaaatgggattatataacagaagaatatgaatttctatttaatttatatcctaatgatgttatccaaatcaaattgcctagaaagaaaaaagcaaaagataacttaggaaacacattagaatggagcgaaggtattttctattttaaaacaattgatagagggactggatctttaaatatcattaatcatatgaatagttttgaggatcgtataggctctaggaatttaaaaatatttgaaaagtatcaagtcgatcctttaggtaatttaaaaagagtaaagaaggaaaaaagacatggcatttagacatatcgttattcgtaaccctgcaaaattatcgactgctaacgatcaattagtgattaaacaagaagagtcgattaggattccgttggaagacatttgtactattacattagaggatcctgcaataacagtgacccatgctttaatgagcaaatgtacagaatatcatgtcgaaataattgtgtgtgatagaaagagaatgccaagtggaattgtccaaccttttcatcggcattctcgtcaaaagtcagtgcttgatatgcaatggaatttaggtaagccttttaagaagcgtgtttggcaaaaaattgttgttcgaaaattagaaaaccaagcacggtgtttagagcttcttcacaaaggtgatgaagctcaaaaaatatatcgaattagctgttctgtagagtctggagatcgcacaaaccgagaatcgtatggagcaaaactatattttgagtttttgtttggtaaagactttcagcgaagagaagaaaatatctataatatttcattgaactatgggtatagcattatacggtcgttggtcgctagatctttagttcgttacggatatactacaagtattggcatttttcacgacagtcaaacgaacgcttttaatttagcggatgactttatggaagtattacgtccatttgtagacgttatagtagcgatgaatgtcaatgataatacggaatggtcagcacaagttaggaagcttttgtttagtgttttagatatggaagcagcttggaagaatgagagattaagtattactcatggagttgataatatgattaaaagttttgtatctgcttgccggcaagaaaatgtagattatttggtgttgcccgaacttattacaactgatagacatcaatatgagtagatacatgagaattctcgttttttttgacttgccggtagttctgccattagaaagaaaggcttacgcaaaatttcgtaaatttttattatctgatggctacacgatgttacagtattcggtatactcgaggatttgtaatggtcaggatagcgtgaataagcatatgaaaagacttaaagaaaacttacctaatgtaaatggttcaattcgtgtgttaaaagtaacagaaaagcaatatgagaatatggaaatactattaggcactacaactccagaagaagaaataggtcctaataaaatagattttttctaaaaaagacttgcaaactttaaaaagcaagtctttcccttttttatttttaaaaaaaacaaaaaaagtgtgagcaaaaatcatgtgattttttgtttttttaaaaaaagaatcccttaaaaaggggatatatcaagggattgaggaacatgtatcgtaccatatcaaggttcacaggggaattatggct

SEQ ID NO: 2087 - DNA, 5314 bp, synthetic construct
  misc_feature 1..5314: note = Synthetic
  source 1..5314: mol_type = other DNA
tgactatcaaacggcattattagcaatgacgatcaacccattagtaccttctgatacaatagcaaaagaaatccttgatgaaatgttagaagcacacaaggagcatttgccacagtttaattgagatatgacgataaaacttagttatccaaaaatattaagtggtaagagtaaaaaagcaaatctattaaagtaattagttagacacacaataaaataaatgggaaatagttaattttttactagatttaaatactactccttaagtatatatcaatctgactataaaattacctatcaaattaaggtaatattgttgaaatatgttgacaatgataaaaatgggttatataatgatattaacgacctaggggaaggttgttaaatcatattacatcaaagttcataggtaagttattatggtaaggcattaagccgtggcgttggggatcgcctatacccgcaattatttgcgggactccccatacctagtacaaacaatgactaaatgcttttagtcattttttttatatatagatatagaaaataattcaattatatataggaaatgggtgaagtggatgaggtatagtataggactcgatattggaatatcttctgtaggatgggcagttattaatctcgataaagatcgtattgaagcaatgaattcaagaatgtttgatgcagcggaaaatcctaaaaccggatcatctctagcgactccaagacgcgatgcacgctccacaagaagaaggttgagaagaagacgctatcgtgtaggacgtgttagacaattcatcattaaccaagggttattatcagaagttgagtcagacagactatatgactggcaagacggtgatctcgacatttggcttgtacgtgtaaatggagttgaaagaaagttaacagatcgtgaatttgcaagaatcctaattcactatgcaaaaaaccgaggttttaaatcaaatcgtaaaagtgaaacaaaagtaggtgaaggtggggttcttctgaaagctgttcaggaaaatgctgaactaatgaaagaaaaaaactatagaacagtagcagagatgttgcttcgggatgataaatttgaaggaagaaaacgtaataaaggtggagactattcacacgttctagcaagaagtgaaattgaagatgaaattagaatagtttttgaaaaacaacgtgaatatggacattcatttgcaactaaagagaatgaagaagcttatattaaaatatggagttcacaacgtcctttctcaacgcaagaggatatagtaaaaaggataggaaattgtacttttgagacgaaggaaaaacgcgctcctaaatttagctatacttttgagaagtttcgcgcgttagacaaaattaatcgattaagaataatttctagtgattcgccacaacgtccactatcacaggaagaaagagagttattgctagattattgttttaaaagaaaagaagtaaaatataaagacgtacgtaaattattggagttaactgataaccaaagatttaatgaattgtattatgacccgagtatgacaaatgataaaaatgagaatagaaaatttgtatctttagatggatattatcagttgaaaaagatagttcgtgagattgaagataaaacaattgccgaggcttatcgtccaatagattatgatactttagcatacgcattaactgtttataaagatgataatgatacacgtgattatttaagaaataattatgtaggtccagaaggtaaaaaaattcgaaatttagcgaatcgggtgtatagcgatcaattaattgatgaattacttaatttatcattctctaaatttgcacatctatcattaaaagctttgacaaacattattcctttcttagaagaaggatatcagtatcatgaagcatgtgaaaaagctggctataatttcaatcaaagagttggcaaggaaaagaaaaaactattaccagttataccaactgatcaaatagcgaatcctgtcgttattcgttctttatcacaaacaagaaaaattattaacgctattattaagagatatggatcaccatcacaaatttatattgaaatggcaagagatatgggtagacattatagcgaacgtaaggatctagagaaacagtataataaaaacagatcaattaatgatagagcaagaaatagaatcaaagaactacatcctgaaatcagtgacccaagaggtcatgatatattaaagtataagttgtgggaagagcaaaatggaaaatgtgcatactcattaaagcctattaagcaggaattattgtttaaccctggttatgcagaaattgatcatattattccttacagtagaagttttgatgatagtaatgcaaataaagtattagtattagctagagaaaatcaaaacaagaagaatcggacaccatacgagtggttcggatctgatacagttagatgggaacaatttaagtcttatgtttatactttaaaagtccgaaaaaagaaaaaagatttattgttgaaagaaaattttgatcacgaccaagctgagacttttaaatcaagacatttaaatgacacccgctatattactagatttttaaaaggatttattgaagataatcttcaatttagggaagaagaaggtagaaaacaatatgtctatactgttaatggtgcttatacatctctaatgagaaaacgttggggttttaataaaaaccgagaagaaaatgatttacatcatgcggttgatgctgtaattgcagctgtaagtttaccgtttagacatcgggtaagtaactattttaaacatagtgaacttcatgcttctcaactattgaagcgaaagggtgaaagattcccagagccatgggaaggctttagtcgtgaattagaggcacgtctgattcaagaacctgaacgccttaaattagctttagaaagcttagctttatcaagttatgatgaagaattcattaatcacgttaaacctatttttgtttctcgaatgcctaaacgatccgttaaagggcaaatacatgaagaaactcttagaagacaccgtggctatactgaaagaggcttaaatttaatggtgaagaaatatgcattaactgaaattccgtttgataaaaacggtgatttcccaatgtacggaaaagatactgatccgaagacatataatgcaattaaagaaagatatctagagtacgataaagataagaaaaaggcgtttattgaaccgctatttaaaccatctaaaaaccctgaaaacgcaccattgataagaagtgtgaaaattgaaaccacagccaaccaagtgtttcatctagatgaaaaaacagttgctgagaatgcaagtatcgcaagaaccgaggtgtttcgtcataaagaaaacggtaagttttacttagcgcctgtttatgttagtgatgttgtagcgaagagagtgccgaagagatttataactgcacataaaccgtatagagattgggattttataacagatgaatatgagtttttatttaatttattcccgaatgatgttattaaggtgaggatgcctagagaaaaaatatcaaagactaatctgggagaaaaagtaacttggaaggaaggtttattttattttaagggtgttgatgccgcaacagcacaattaactataatggaacataaaggtagttattcagatagaattggttcaaaaaatttaaaggtgtttgaaaaatatcaagtagaccctttaggtaacttaactaaagtgaacaaggaaaagcgctatggcgtatagacatattgtaataagaaatccagcaaaattgtcaacttcaaatgaacaattagttataaaacaagaggaatcaatcaacattccgttagaagatattgttactataaccctggaagatcctgcaattacaattactaatgccttattaagtaaatgtacggaatatcacgttgaattaattgtatgtgaccgaaaaagaatgcctagtggaattgttcaaccattccacaggcattctagacaaaaagcagttttagaaatgcaattatcactgagtaaaccatttaaaaaacgaatatggcaaaatatcgttattcgaaagttggaaaatcaagctcgatgtcttgaattaatccataaaggtgaagatgcagaaaaggtatatgcaatcagtcgaagtgttgaatctggagacagaaccaatcgtgaagcatatggtgcgaaagtttattttgagttgttatttggtaaaggatttcaacggagagaagaaaatatttataatatctgtttaaattacggttatagccttattcgttcgttagttgcaagagccttaattagatatggattcacacctagttacggagtttttcatgacagtaaaactaatgcatttaacttagccgatgattttatggaagtattaagaccgtttgtagatattatcataatatcgaatgttagtataaatgatgaatggagttcagaaatacgaaagaaattatttcatgtgttagatattgaagctgtatggaatggagaaagactaagtgtgacacatggggtggatagtatgataaagagttttgttactgcatgccggcagcgggacgcaaatttgttgattcttcctgagcttgttaatataacttctcatcgatatgagtagatatatgagaataattgtgttctttgatttgccggtggttcgcagaaaagataggaaagcatatgcgaaatttagaaagtttttattaaacgatggctatgttatgctacagtattctgtatactcacgaatttgtcatgggcaagatggtgtggcgaaacatatgagaagattgcatgaaaatattccacctgttcatggagcaattcgagcaataaggattaccgagaagcaatttgaaaatatggatattttattaggtacagttaccgctgaagaagaacttggtccaaataagatagatttcttttaaaaaacacttgcattttaagaagcgagtgttttttcattgttaaattcataaaaaactagtaaaaaacagatagaatgttgtgaaaatagaccaatttttaaaaaagaacccccttgaaacgaggaagtatcaaggggttaagcgtgatgtatcatatcacatcaaagttcataggggaattatggccatacgttttaataaaccttgatataactatcatatcacatcaaagttcataggggaattatggcatataaatcgactacttgcgaatcgtcagcatcatatcacatc

SEQ ID NO: 2088 - DNA, 16741 bp, synthetic construct
  misc_feature 1..16741: note = Synthetic
  variation 15040..15297: note = n is a, c, g, or t
  variation 15902..16137: note = n is a, c, g, or t
  source 1..16741: mol_type = other DNA
gacttgggcaggtaataaacattgaaccagcggcaacacaaaacctccgccgccgaagttaattccggcggcgtcatcaccacctcaaagaccagccgcccaccgcgccaacgggtcgatttcgccttctgaatctttccgcgccagcacacggtcgttcccgcctcggctttggacaactcgacaaatttccgccgatcctcgtaacggtgcggcaggtgatagagcaaatcggttaccgtcacgattcccagcttcgccagcaacgcgccgcgttgcgcgcccactccgggcacgctggcaatttcagcttggggatcgattacagccatgttgttaccaattcggagaagaataaaaccgtaaagcatctccccgcaactccaacctctttttgtttgaagaagcaccgggtcaaaaacgtccaatattcacgactgactgcggcataaaaccgcctttgtaacaccgcctcacgcacttacaaccgcgcatccgccggtactcgacacttgcagaacgggcgtcaactcctctatgatattactttgactcattttatgaaaaatccttccgaactttccgacaccgaaaagagggagcagatctgcccggtctgtggcgaaccgctttttcaggaaaaatgcaaggtcgtctgccgcagcaaacgctgcatctatcgtatcgttttcaactgttcggaattttaacatgcccccactctcccatcccctggcctcctacaagccgccggtcttcgtcggcacggtcatcacgccgaaaggattacgcctgctcaaccgcatcaattccaacggcgcgcaaatcatcgaagtccgtggcgacgaactgctcgcccgcggcgcgaaggaggaacagatcgaactggccctcatcgaacgcgcccatcccgttctcctgacgttgcgcattcccgccgaaggcggcgcgtacaagtggcgcaaaggccaacgcgaagccctttacctgaaatggctcccctacgtcgacctcatcgacatcgaactggccgaagtcaaatcattgcgacgcgtcctccaggccgctcaacgcgcggagaaatcggtcatcctctcctcccattcgctcaagaccgcgctcaccgaagcccggctcaagcaattggtcggcgagttctccaaatatcccgtttcctgctacaagatcgccgccctggtcaaaaccaaggacgacctgcaacggctggcctcactcctgtttcaacatcaaaatcatccctgggtcgtcatgggcgtgggtcatctggcggcttacacccgattaatctatgccctgttgggttcgcgcctggcctacggttatctcgattctcccgccgctcctggtcaaccgtccattgccaagctgagacgcctgttggcgcctttcaacgatacccgtgcaacccgataaattcgtctttctggatcccagcggcaaacgctggccccggctgcggtggatgctcttcgcctcggcatgtctcttttttgtcgccagcgtcctgttcgtccagacgctcttcgtgacgccgcatctcgaattgcccccgtctgtccgccagatgaaaagcgagttgatctcgctccagcagcaacccaccgcgcaaaacccggtcaagttctccttcctggagaaataccagcaactcaaaaagaacaaaccctccaccccacgccccaaacgccagccgcgcgaaggcatccgcctcggctactacgtcagttgggacgaggacagcttccagtccctcaagcacaacgccgcagctctcacccatatcgcgccagaatggttctccatgcagtacgacggcacgctcctgcgacgccccgatgagcgcgtgaaaaaattcgccgaggaaaaaggactcaccctcattccgctcctgaccaatctgaccgattccggttggcagcccgaagcagtcgaaaatctcgccaacggctcgctcgaaaaacagatgctcttcatcggccagcttctcttccgcctcgaccgcgcccacgcccagggcgtgctcatcgactggcagcaactcgacccgtcctacaaggatcaatacacccagttcatcgcccacatggccgaagccttccaccgcgaacacaaggaagtctggctcagcgttcccgtcggccaggaactcgaagcctttgatctcgatgcgctccccgacatcgtcgaccacttcgtcgcgcaactctacgacgagaacggtgagaacgacacccccggcccgatcgcttcgcaaaactggttcgaaggctggctccacgtcatgatgggttacggcgaacccagccagtggatcatcggcctcggcctgcacggttacgattgggcttcgaaccggaccgaagccgaaaccatcggcttcaccgacgccatggcccgcgccaagcattccaacatcaaaaatctcgccgtcgaaggccccgattacaacccccacttctcctacctcgacgacaaaatccagcacaccgtctggttccttgatgccgtcaccttcctcaaccaactccgctcttccgaagccgagggtgtcggcggctttgcctttgtccgtctcggcctcgaagacgattccatctggcccgccctcaaactcctcaagactcccgcgctcaaacccgaccagttcaaaaccctctcggttctaccgtccatcaaccacatcggcgaagtcggacgcggacagttcgtcaccgccgatctcaacaacgaggacggttcccgtaatctctcgctcgacaaattcaaccgcgtcacctcctcctacagcaaattacccgaatatctgaccctgttccgcgaaggggccgcctctgcgcacgaagttgccatcacgttcgacgacggcccggatcccaagtggaccccaaagattctcgacatcctgaaacgcaataaaatcaaggccgccttcttcctcgtcggcaaacaggccgagcaataccccgatctcgtcaaccgcatcctcgcggaaggacacgagatcggcaaccacacctacacccaccccaataccggtcaggtcacgcgcgaacaggttcgtctcgaactcaacgccacccaacgcctcctggaagccatcaccggacgttccaccacgctcttccgccctccctacaacgccgacgccaaaccccaggacaaggacgaactcatcccgctggaaatcgcccagcagctcaattacatcactgtccttgagaacatcgacccggaagattgggcgcgtcccggagtcgacgaaatcgtccgtcgcgtcaaggaacaacgccgcgacggcgacatcattcttctccacgatgccggtggcgaccgctcgcaaaccgtcgccgccctgccccgaatcatcgattatctccgcagccgcggcgaccagatcattcccttgagccagcttgtcggcataccgcccgaacaactcatgccccccgtcagcgacaaacgcgaccgcgtcacccacatgatcagcaacatcggtttcggcgtctaccataacgtcacccaggccatgatcgccttcatgctcgtagccaccggactggtcgttgtccgcaccctcatcgtcatcgccctcgcagccgaacaccgccgccgcaccgagaaatatatcctccccacgttcgcgccgcccatttccgtcatcatcgccgcctacaatgaggggaaagtcatcgccgaaacgctcgactctgtcctgcgcaccaactacaccggagccattgacgtcatcgtcatcgacgacggctccaaagacgacaccgccgcgcgggttgaagccgcctcgctggccgatcctcgcatccgcctcctgcgccagaccaaccagggcaaagccatcgccctgcgcaacggcatgaccgccgccaaacacgacatcttcgttctcctcgacgccgacactcactttcaggccaacaccattccccatctagtcgccccgctgcgcgatgaaaaagtcggcgccgtatccggccacgccaaggtcggcaacacccgcaatttcatcacacgctgccaggcgctcgaatacgtctgcggcttcaacctcgaccgccgtgcctacgccatctggaactgcatcaccgtcgcccccggcgccgtcagcgccctccaccgcaaggcagtcgaagctgccggaggcattcaggacgacacgctcgccgaggacaccgatctcacgctggccatgcaccgcacccattacaaaatcgaatacactcaccgcgccgtcgcctggaccgaagcgcccgaaaacgtccgcaatctcgtcaagcaacgctcccgctgggcctttggcacgctccaatgtctctggaagcaccgcgacctcgtcctcgatctcgaccatcccgccctcggctggttcagtctgccgagcctctggttcttccagatcgtgctggtcgccatcgcgcccatcatcgacatcgtcctgatactctccctgattaccggagccacgcctcaaatctggacctacgtcctgctctttctcctcatggacttgctgctcgccgtcctggcctgctggatggaaaaggaaccgttgagccattcctggcgaatcattcccatgcggctcttttaccgcccgctgttaagctgggtcgtctggaaagccattatccgcgccctccggggagcccttgtcggctggagcaaactcgaacgcaccgcctccgtccacgtccctcagacctcgaccgaacattcatgaacccggcccaccgacttctccttctcagcaccctggttctcgcgatcgccctcggcaacggcggctgttcgcgttctccctcaccctccggcaacacgcaacacgcacccacacaactcgccgtccccgacaacggcgtttacaccggagcctatatcgactttggtgacagcgaagacgatgtcactctcgaagccatcgaaaattttgaaaaactggtcggcaaacatcaggccatcgttgcctcttccagctactggggccagcaatccttcccccgcgccaatctcgaaattattacccactacggcgcggttcctctcgtctactggtcgccctgggacaaaccctacgaacaaaacaccggcatcgatcgcttcaatctcacggccatcctcgctggaaaatggaacgcctacattgacaactgggccgatcaggccaaggacttcggcaaacccatgctcgtcgcctggggccttgaaatgaacggaacatggttcccctggtcgggagaattctacggtcgcgagaaagtcatcgccactgtcaacgggaagaaaattttcgccggccccgactactacaaaaaagcttaccgctacgtcgtcgaccgcgtccgcgcccgcggcgtccgcaacatccagtgggtcttccacgtcaacagctactcctacccgcaggaaatgtggaaccagatcgtcgaatattatcccggccccgattacgtcgactggatcggcatgagcgcctacggcatgcaattcaaagacgacccttgggtcaaagtcgaggacgccttcgaatatccctaccaggacattgccgcacttgacccttccaaacctctcatgctcgccgaatggggcatcggcgaatttccccacgacggcaacaagggcgaatgggtcaaaaacgccttctccgaaatcaaaaacaaatgcacgcgcgtcaaagccattgtgttctggcacgaacgctgggaaaacgaggacggctcctacagcaatctccgcgttcaatcctcccccggttcgctcgacgcctaccgcgccggcgttgccgatccctactggctcggcactcccaagttcaaatagtcgccacaatcctgtggaatccggaaaatcggcaggagattttccctcgcggcatgaaaactttctggtgtgccgcgccccgcatgctttaattgccgcttacacatgatccgcttccttttgcaagctggctacaacgttgccttctttgtggcctttatcatcacctggccctacttctcctatcgcctctggaaacgcggccactggtggcgcggtcttgagcaacgcctcggcatctaccgcaaggccgtccggcaacagctccgcaacggttccgacatctggattcatgccgtcagcgtcggcgaagtcatgctcgctcgcgtgctcatcgaaaaactccgcgagcaaaatccaaacctcaccgtcgtcctgagcaccaccaccgccaccggttaccgagtggccgaacggttagccgatgacaagaccgtcatcgttttcaaccccatcgatttcctctggtcggtgcgtagcgccttcgaaactttcaaaccacgccgtctcatcatgatcgaggccgaaatctgggccaattacatctggtgcgccaagcgccgcggcattcgcatctacctcgtcaacgcccggctctcttccaaaagcgaggaacgcttccgcaaattccgctgggtcacccggcctgtcatgcaggaagtcgacctcatcttcgcccaatgcgaggaagacgtcgcgcgccttacccgtgccggtttcgcctccgaagccatcttcaatgtcggcagcatgaaatacgacgtcgccaacatccccggcagcgcaccggccgaaatcgacgcctggtggtcactcctcggctggtcccaaagcactccgattctgctcgctgccagcacgcaccccggagaagaagtaatcatctcccggatttacaccgaactccgctcccaataccccagtttgcgactcgtgatcgtcccccgccatgccgaacgcggaaccgaagtgctcggtcaatgtcgcgacctcggtgtcaaagccgtcctgcgcaccgaactttcctccccgctttctaatggcagcacacccgaagcactcatcctcaacagcaccggtgaactcaaatcgatctaccccaaggcgacgctcatcttcgtcggcaaaagcatttgcggccacggaggacagaacttcatcgaagccgccaaactcggcgcaccgatcatcgttggtccctacatggagaatttcccgcaacaaaccgcagaattcgtccaccgcaatgcactgatccaggtcgaaaacgaaacccaactcgccgcccagatcaacgaactcctcggctccgaaatcaagcgccgcgaactcggtcaacgcgccttccagaccttccacgataatctcggtgctggccaaaaaacggcccacatgatccttgacgccatcgatgccgacaaaacagcgaaacagaattaagacttatcaggaatcccgataaagcctttcgtaaattccgtttgtctttcgttaatttcgtctaccgcctttgcttttttataattccttaaattccgttaattcccgcctaaaagcttttcgtttcccttttaccgtctcacccggttcatcatattctctgggtaacgcgcacccaatgcagctccagccgggaacacagcatcaagcgccgccaactccgactcgctcagttcaacattcagcgcgccgagattttcctccagatacttccgcctcttcgtgcccggaatcggaatgaactcctcaccgcgcgccagcacccacgccaacgcaagttgtgacggcgtacaccccttcgccttggccaactccccaacgtgatgaaccaaatcgagattgcgcgcgaaattctccccctgaaaacgaggcgacttgcgccggtaatcgtccggggcaaaatcctccggcgtcttgaacgcccccgtcagaaagccgcgtccgagcggactgtaggcgacgaaggacattccaaattcacgcacagccgcgagcacaccgtccgcctccgtctcgcgagtccatagcgaaaactcgctttgcaacgccgcaaccggatacaccgcgttcgcacggcgaatcgtttccggagccgcttcggagattccgataaagcgtactttcccctccttcaccaactgagccatcgctccgatcgtttcctcgacaggcgtttccgggtcgatccggtgttgatagtagaggtcgatatgatccaccccgagccgcttcaaactcgcctcgcacgacacacgcacatactccggcctgccattgacgccgcgggacatcgggtcggacggatcgcgaacaatgccgaatttcgtcgcgagcacaacccggtcgcgcaaacccttcaatgcccggcccacgagcagttcattgtcgcccatgccgtatatatcggcggtatcgatcaacgtcccaccgagttcgacatagcggcgaatcgtcgctactgactcctcatcgttgcgctcgccataaaattcactcatccccatgcacccgagtccaaccgccgaaaccttcaagcccgatttaccgagagttctggttttcattatctcccaatttaacgcgttctcctaaaaagcgcaaaaagacctctcgcccgcaggccgctcacagcaacgccagcgccgccttgatctccgcttcggtattatagaaatgcggcgacaggcgcaggtgcggaatctggttgcgatcatgccgcagggaaaccgacaccttcgcctgggaaaatttcgccgtcagcgccagaatatcccgccccggcagggcaatcgtactgattccacccatccgctcgaccggcacatcgtcaaagagaacctttagtcccttcttgtgcgcctcctcgacaatcaccgaacgcagttgatgcgcccgctgctcaatcgcctcgatgccaaacgacaacagcaactcgatactgcgcttcattccctccagcccgagcaaatacaaactccccggctcataacgccgcgccgtgttctcaaacttgatctccggttgcgcaacgaaattcggtgaacgcacattccacgaacccaccagcgacggcgtcaacttttcaatgctctccttcttcacatagaaaatccccgcacccgaagggccgatcatccacttgtgcgaatccgcgctgatgaaatccacatactgcgcatcgaccgccgtcaccccgagcgattgaattccatccatcgaaaacagaatcccccgccgcctcaactcctcgccaatcgcacgataatccaatcgatacccagtgaggaaatggcacgacgccagagcgaccaacttcgtccgcgacgtgatcgccgcgaagaccagttccggagtaatctcgcccgtgcgtttcggctgcaacgccaccgggcgcacaccgcgcgtctgcgccagatacatccacggataaacattcgccggataatcctccgcgtaataaatcacctcgtcgcccgccttccaatccaaaccctgcgcgaccagattcaaccccagcgacgtcggccccagcagcgaaatctccgacttgtgcgcgccgatgagagaagcccccaccgtgcgaatcgcctccacacggcccatataatccgccccttccggatcatcgaccgaagaccgttgcgcctccttctgcaacgcctccgccgtcacccgcggcaacgtcgagaccccggcatgcgcgaggaaaatccgcgagcgggtgatcgggaaccagtcatgacgaatcgactcattggacacaacatgatcaagagcaggtgtggacataaccccaccaccctaccccaaaaccctccctgggaaagcaaaagccgaccagggggtgggggtataaaaatttagctcacgcagcacacctagctcaaatagctcacctaacacacgcaacgcacttaggaaatgtcacaggaaagatctttcctcatggagtataaagaagatcccccgcctcagattgctctggagcggggtaacttcgcatggactaaaccattattacatggttaaccacaataccgtggctgccctcctgacttcttaaaaagatttactacagaagaattttgacatcaagcagaattcgagagactttcgtttaactcagtaacctgtacgtggccctatggaaacacaatatctcattggtaaagaagctcccgtcacaaaactccctcaaactttccctaaaatcattgatgaaaatctgatgcttggcctcgatattggtattggctcttgcgggcaagcactcattagctccgatcgaatctattccactccacttggtcaacttcccctcttttttaacactgaggcaccctcttacattcgctatattggagttcgcgcctttgatgtgccggaagaaatgagcaataccgggaaaatcacactcaaaaaccccgagcgtcgggctaaaaagctcctgcgtcgtgtcaccaagcgccgcgccaaaagaatgtacctcacacgtcatctcctcaaacgcgagggcatccttccacccgactaccacgtcgacaaaatcgaatggcgaaaaaaacatgagacatcgactccctggcaatggcgtctagaagggctaacgcgaaaattaagcgactgggaatgggcagcatcgcttctgcatttcgcaaaacaccgcggattcaagagcaacaaaaaatccgactttgattccaaaggcaaggacggcggaacattacaatcttcgagagccaatcacgcggcacttcagaaatatcaaagcatcgcggaaatgatgctccaagacccacgcttcaaagaccgcctccgcaaccgggaagaaaactaccaggcgatggttctgcggctcgacctggaaaatgaaatcaaacttctttttgaaaagcaaagatccctcggcaatacccatacctcaccccaacttgaaaccgagtttctcaaaatattcaaccaacaaaaaccactacaagatccctacgcccttttaggtaagtgtccgttcgagagaacagaaaaacgcggctcctgcttttcctacagtttcgaattaagccgcgctctccaaaagctcaacaccctcaccctggtgttagcaaatcaggacaaaatactcctcaaagactacatcaacgctcccaacggcggataccgcaacttcatcgaaaaatttggcagcaaaaaatccattacctggaaagatctccgggagtggttctccatcgacgatacgatccactttcttgacttaccaatttccgcaaagggccagaaacaaagccgcgtcgatgacaaatccagcgccatggacgccttacgaaaagatacggagaaaggcgactgcatcacccgttccacaaagaaggtctgcgcccaaggctcgtacacattgagaaacgtattaggcgatgaactctggaacgcccttctcaacaaaggcgatctcgcttcactcgataacgccgccttctgccttacctttttcgagagcacgcaaaccatcatcgatatactcgacggcaaaaatctggaaccccatctccaccccaacaaccaggaacaaccacccgacctcaccatcgatccccaagtcgcacaagccataaaaaaagacctcaacagcgactccccttccctcctcaagttcaaaggaaccgtctctctctcctccaaagccagccgcaaactcctgccctttctggaacaaggtctggtctattccgacgcctgtgccaaagcgggctaccaacacaccaatagcgactacgcgctgaaaaacatcattaatccggtcgtcgtctccgtcgtccgcgaagtcatgaaacaagtcgtgcacgtcatcaacctcgctggcgtcatccccggcagtatctgtgtcgaattggggcgcgacctcggcaaatccattgacgaacgcaacaacaccgcccgcggcatccacgaacgcaccgaggaaagaaacgctaatcgcgaagccctcgccaaagaacttgaaaaatcagaagcagacatagacgacgatatgctcttgcgctacgaactctggcacgagcaaagcggcctctgtccctattgcggagaaacgttaccaaccaccaaacaatacgtccgtggcaacaacgtccagatcgaccacatcctgccccgcagccgcagccacgacaatagcttcaacaacaaagtactggttcacaccggatgcaatcagaacaaaaaaaaccagacgcctgccgaatggctggatgccacccacaatagtgacaagtggaagctgtttgccgccacagtccagcagatgccccatatgaagccgttcaaaaagaaacgctatctcttgaacgaaactttcaacaattccgacgagtccggcaaattcatcgcccgcaacctcactgacacacgctacatctccaaaatcgtcctggaatatctgaaagacatctaccgcctggcaggagaagatcccaatgccaaaggagcacaacgccgcatcttcgcccaaccgggagctctcacccacctcgtacgcaaagcctggggactggaacacctcaagaaggatctccagggcaatcgcatcgacgacacccaccacgccgtcgacgccctggtctgcgcctgcctgagcgagggacaacgccaatggatcacgcgcagtgaacagatcaaaagagccaccccgtttagccagacagtcgaaagcctccaaaatgcctacaaagacatggaggaaaaacaccaggatcgcggcactcccctgcgtgtcagcccgccatggaaatcgctccgggacgatatcgtgcatgccctcagacaactcaacgtcagccgtcgggaatgtcgtaaaggcaaaggccccctccacaacgacaccttctatcgaatggaatccgatgaaaagggcaatccctgctattacaaccgcaagagcctgctcgaaaaagacaaaggaaaaatcgtccctctcttacataaaacagaagacctcaaaaacgtcaaaggaatcgacgaacccaaaaacaactggctcaaaaaagcactcaccgaatggattgaaaaaggttccccaatcgacgaaacccagcttccgcggacctcagcaggaaccgtcattcgcaagataacgaaaatcgaaggttacaaatcgggacgccagattcaccacggttacgtcattggagggagcatagtttgcatcgacattttctccaaaacgaaaacctccaggaaaaagtccaaaactactgacgccaaatctcccgaagagaaaaactacttcctcgttcccatctactcctaccatctcgaggacgaacatccccccatgcgagcaatatgcgccgacactcctgaagatcaatgggatctcatagatgaaagctatacttttgaattcaccctctggcccaactcactatttgaagttcaaaaaaaaggatcagccaaaaaaggcgaaggtgaatatctccgcggatactatcgaggagtcaatcgtagcacaggaagaatcgaagctcgctcgctcaatgatgcggaagaaaaactggactgtagtgtcaaacaaggctgccaattcttccgcaaactcaacatcgaccgtctcggtcggataacctgcgtaaagggagaaaaacgggtatggcatggaaaggtgtgcacttaagccggccagcctatctgagcctgcttcacaataatcttcaaatcagtttcagggacaacgaaggctccagcaaggcagacgaaaaaatctgcctgccactggaagatatcgactacctgatcatcgacacctccgaggcctctctttccgggccgctgctgtccgcactcgcctcctcatcagtattcgttctcggggtagacgagaaacacatgccctgctgggcttccttcccctggactgcctattaccggcaaggcgacaccctctccctgcaaaccggtgccagcctccccttacaaaaacaactctgggcgcggatcatccgctataaaatcatttaccaggccagatgtcttcgtcactgctcacacgccgaggaaggcgacgccctggaggggctggcctcccgagttctctctggcgataccgacaacaccgaggcgcgcgccgcccggatctactgggaaagcctgtttggagatcgttcctttatccgccatgatgacgatctgcccaacgctctcctgaactacggctatgctctgctacgagccgcgctggcacgcaacctctgcgccatcggattcattccgcagatcggccttcaccattgcagccagagcaatgccttcaatctggccgatgatctcatcgaaccgtaccgccctttcgtcgacgaacacgccgtgcgcgtacttggaaaaagtccctccgatgctccgctgacaacacaacaccggcggcaaatggtcgaactgctcacacgaaatgtcctcatgggaaacgagaccctctctctgactaccgccatggaacgaaccgtgacaggactcaagcaagccctgaatatgcgggatgcggaacgactaccctttccagatttctaaaatcgacagtaaccccaactccattcccaacatgaaaggagatttgcgtaccatgtggctgatagttttcttcgatctgcccgtcaccgaggccagggaacgacgagccgcgacacagttccgccagttcttgctcaacgacggctacctcatgctgcaattctccgtctacgcgcgagtttgctacacacaggcggcagtggaaaaacatctcacccgggtgcaggatcatacaccggaaatcggaagtatccgggccctggctgtaacggataaacaatactcccgaatgcgcgtgattctgggaaaaatgaaaatcgaggaaaaaaacggaagccaacagctcctctttttctgaaaagaacatcgcctaactccccagatttaagggaattaggcgatgtctgttttagcccaaagaagtcaggagggcaaccacggcccgccggcatcgggcatgcgagcgaacgcagttttagcccaaagaagtcaggagggcaaccacggcctgcacaattggcgcagagactccacggttttagcccaaagaagtcaggagggcaaccacggcattttggttgtgagcttgatacgttatcttgttttagcccaaagaagtcaggannnnnnnnnnnnnnnnnnnnnnnnnnnnnnnnnnnnnnnnnnnnnnnnnnnnnnnnnnnnnnnnnnnnnnnnnnnnnnnnnnnnnnnnnnnnnnnnnnnnnnnnnnnnnnnnnnnnnnnnnnnnnnnnnnnnnnnnnnnnnnnnnnnnnnnnnnnnnnnnnnnnnnnnnnnnnnnnnnnnnnnnnnnnnnnnnnnnnnnnnnnnnnnnnnnnnnnnnnnnnnnnnnnnnnnnnnnnnnnnnnnnnnnnnnnnnnnnnnaagtcaggagggcaaccacggctgcaacgtttatggcccagtgttgctcctcgttttagcccaaagaagtcaggagggcaaccacggcgagccacgcgctgacgtacatacgcaccgcgttttagcccaaagaagtcaggagggcaaccacggccgaaatttcgaaatgaatggcctggagttggttttagcccaaagaagtcaggagggcaaccacggcataggtcataccttcttgagagaaacgggggttttagcccaaagaagtcaggagggcaaccacggcctatgcctatattcatccaaaatcaccagagttttagcccaaagaagtcaggagggcaaccacggcgtcaatgggacgcgctggccgtggcggatcgttttagcccaaagaagtcaggagggcaaccacggcaaacaatacggatcggatgcgcaccgggtagttttagcccaaagaagtcaggagggcaaccacggctctgaaagtgcgtcgaacaattccggcactgttttagcccaaagaagtcaggagggcaaccacggcttgcggacggtacctgtaaaagaatatcgtgttttagcccaaagaagtcaggagnnnnnnnnnnnnnnnnnnnnnnnnnnnnnnnnnnnnnnnnnnnnnnnnnnnnnnnnnnnnnnnnnnnnnnnnnnnnnnnnnnnnnnnnnnnnnnnnnnnnnnnnnnnnnnnnnnnnnnnnnnnnnnnnnnnnnnnnnnnnnnnnnnnnnnnnnnnnnnnnnnnnnnnnnnnnnnnnnnnnnnnnnnnnnnnnnnnnnnnnnnnnnnnnnnnnnnnnnnnnnnnnnnnnnnnnnnnngaagtcaggagggcaaccacggcgatgcattgaagcgtagtgtttgatgtgatgttttagcccaaagaagtcaggagggcaaccacggccggaaattctaccggctccatcatttatcagttttagcccaaagaagtcaggagggcaaccacggccacgtcgtagagcacaacgttgacttctctgttttagcccaaagaagtcaggagggcaaccacggcatatcggtttgataaatcacgcgaattccagttttagcccaaagaagtcaggagggcaaccacggcgtgatactgtattatgataatattaccttcgttttagcccaaagaagtcaggagggcaaccacggcccattacggatcatggaacgatggacgctcgttttagcccaaagaagtcaggagggcaaccacggctggaggatagggctccgctgaagagcgaccgttttagcccaaagaagtcaggagggcaaccacggcttaacgggattgttccggtcgcctctcaaggttttagcccaaagaagtcaggagggcaaccacggccagtcgcgagcgttaaaccaagtatccgctgttttagcccaaagaagtcagga

SEQ ID NO: 2089 - DNA, 24548 bp, synthetic construct
  misc_feature 1..24548: note = Synthetic
  source 1..24548: mol_type = other DNA
cctgttttcagtccggtttttacgctgtaataataagtaacatcttttccttttactacataggaatcttcaccgttatattgctcaattccggcaactttatagtcagcagattttgcaaaaccaagttcggggaacagttcgctgtcttttgccatttcggttttctgttcagcaggaagaggtattttttgtccctgtgcttccatataaccgtctttgccgtcaaaaacaattttctgcattgtatttcccatcattttaatatccatcatcatttttccgcctttgccctgaatcaggtgtagatccagatccattccctgaactttcgccgaagcagtggtgctgagtgaattgattttttgaacattggcgagccctccgatcgcagtaatgtatttgtcagcgatagaagcagtggtaatactggcgtctactttctgtgctaccggtttggtggttggattggctttatcatcgaaatatttcacaggatatcctaatttctccaacggttcagcgatttctgatgcttttcctgcgataaaaatgcggctttgctttgggtaaatcgttgcttttacagcgttagaaatatcagcagcagttaccttgtcaatagatttcagataattggtgtaaaaatctgaaggcagattctgcgttttttgatttacagcaaaacgggcaatagtttccggcctttccagtgaacggataaaatctcctttcagtttggccttagcattcgccagttcttctggttttacggtagtaattccgttcaattctgtcatgaattctttcactgctttatcggtcacttcatttcttacacttgattgtgcagaaaaagtagggccgtatttataagtggaaagggatgaatatgctccgtaagtgaaggcgtttttttctctcagattcatgaaaagccttgcttctccaccacctccaaggatgtagttggccatggtagcagcaaagtatttcgggtcattcatcttcaaatcatgaatatttcctacactgataacagactgtacagcattcggaacgtctacaatattaatttcggtggtagcaacgttagctgccggctccagcggcggatacgtggtgttggattttttccagttgttgaagttcttttcaaccagcttttttacttcatcaaactttacatcgcctacaataaccagatgtgcattgttgggaatgtaatgtttttgataggtattctgaacatcggcaagcgtaatggctttgatgctttcttccgtttcaaattcacctctggaggtatttttcccataaataagtgcattggaaacccgcgatgcgatagcgtctgcacttttttcatcggctttcagtccttcgatcatccggtctttggttttttcaacctcgtccgcagaaaattttggataggtaattgcctcagccatcattcccagaatttccgggaaatatttggacagggagttggagaatgcaccaccggaagagaagctgagattggctcccagataatctactcttttattgaaatcatccttgctcattttggtggttccgttacccagttggtctgccattacctggcttactccaactatttttccttcatagtaaggcgggcggtccatactcagggtaacattgacacgcggtaatttattgttttctaccaccattacagtgaggccgttcttcagcgtgaaggttttcggcgtggtgatgttaatcgttggggttgggcctgcaaccggcattttattgatgtcgatcttctgggcgttcaatgcacctgagatcagaaatacggctgctatatatttaaaattatttttcatgtgataattactttttttcaggtacatagttaatgatgactctttggttgctgttcagatactttttagccgcatccataatgtcctgtcttgttacagaacggtagatatcaatttctttgttaatcaggttcgtgtctcccatcaacatataattggtagccaatgaacttgcgataccctgaatgctggagttggaatttacaaactgattttcaaactgattctgaagtttttggtaatcttcctcggaaataagtgtagtctgaagttttttgatttcttcatcaattactttttgaagttctgctttaggggtggttcccatcggtaaagcaaaaaatgcgaagattccggcatcttcaaaaccgatactgttggcagaaacctgaagggcttttttctgctcatccaccagttttttatacaataccgaagatttaccaccgctcagataggctgaaaccatatccagaactttggaatctctgtgtttgttagacggtgttctgtacgaataaatataagccggaatctgaatgttaggatcggttaccgtcacttctttttcctgcgtaataggcggatccatcgggaaattcttcggcgtcaccgttcctttcggaatagaaccgtaatattctgaaatccatttcttggtttgctcaggctgaatgtcgccggcaactaccagaacagcgttgttcggaacataatatttcttgtaaaatgcctgaaactcttccagctttgcagcattcagatcttccatggagccgataaccgaccagtgataaggatgcttcacaaacatattggaaagaatggaattgaaaagattgccataaggctggttgtccattctcattcttttttcttctttcactacttctcgctgggtatctaccccaatctgatttaccacaccgctgcgcagtctttcagcttccatccacaatcctaattgctcgttattggaagggaaagtttcgtaataatacgttctgtcgttgctggtattggcattattggtgccaccgttggatgatacaattttgaaccattcgccgcgcttgatgtttttggtgccttcaaaaagaaggtgttcaaaaaaatgggcaaatccggatcttcccggttcttcgtctttcgagcctacgtgatacattaccccggtagtcactacaggagcggtattgtcctgatgaagaatgacatgaagcccgttcggtaatttgtactcttcaaatttgatttgctgtgcattcagaaagatgcttacaaaagcaactgcagcagcagataggagtctttttttcatgaaaattaaattatttaagtattggtagtaaatgagattaaaaagttacacaagtgtacgtttttttgttaagttttaatgcggttaatgtacaactattttccgatcccgaatcaactgggcaatggcgagcatatcgtccccaatcagtcggtcatcttccaatttatccactttactgcgaatgatggcatagttctcttctacaatttttgagcatttggccggccttctgaattccaagccctgcgcagcaaacatcagttccacgctgaagatattcaccagattatccagaacctgattgaattttcttccggaaatactgcccatagaaacgtggtcttcctgtcccaaactggtcggaatactgtctgcagatgcagggaaacagagggttttattttctgttaccaaggctgcggaagtatattggggaatcataaatccggaattcagcccggagctttctgttaaaagtctgggcaatccaaattttccttccaacaacaggtagcttcttctgtctgaaatgtttcctaattctgcggcggccagcgtggcataatctaatggcagcgccatcagctgtccgtggaagtttcctccggaaatactttcctcttcactcaaaataatcggattatcagtgacggaattgagttcggtttccgccagagctcttaaatgggtgaaagcatttctgctggctccgtgcacctgcggaacgcaccggaaggaatagggatcctgaacgcggtcgcagaattcgtgagattttaaattctcggagtttttcagaaacttcagcattcgtgaagcagatttgcggctgccttcgaaaggccggatctcatgaagttctttcctgaacgggcttgacgaaccacgataggcttccagtgacattgccgcagccagatcggcaagatccagcaggtattccattttttcaagtccctgtattgcatgtgctaaaatgaactgagttccgttgatgagtccaagcccttctttcgggcccaattgtaaaggaagcaaaccatgttcctgcagaaccgaagcggtatcatgaggctgatcgtttttccagactttcccaaggccgaccaacggaagtaccatatgtgcaagaggagcaagatcgccggaagcgcctaccgaaccctgttcaggaatcacgggaataatgtctttctgtagcatcagttgcattctttcaataacttccagagaaacgccggaataccctttggacagcgcatggatttttgcgatcatcatgatcttcgacagttctttgtttattggttttcccacgcctactgcatgagaaataatgagattgtgctgaagctgcgccgtttcttcttcagatattttcacatcacacagcggcccgaatcccgtattaataccatacaccgttcggtccgaggcaacaatcttccggacattttcctgcgatctcaggatttgttcgcgtgcctgtgtatctatttttgcgatctcaggattttttgcaatcttcagaacatcgtggaaagtaaaggtgttgacaccgtatatcatcatataaaaatttgctctaaaattacacaatttctcagaattctattttccgtatttttgctttgtgaagagcgatttagaattacagttgaaaacccttccttcagatcccggagtgtaccgttattacgataaaaacggacagttgctgtatgtgggcaaggcgaaaaatataaagaaaagagtactttcttatttcaataaaaatctttcaggataccgcacccgaataatggtggggaaaattcaccggctggaaaccaccatcgtccccagtgaatatgatgcgctgcttctggaaaataatctcatcaaagaacatcagccgttttacaatgtgatgatgaaggatgacaaaacctatccctggatttgtattaaaaatgaagattttcccagaattttccttacccggacgctcattaaagatggatctgaatattacgggccgtatgcgaaagtaaggcctgcaaaagtgctgctcgataccataaagcatctttataaattgcgaacctgtaacctgaatcttgcaccacagaagattgccgaaggaaaatacagagtgtgtctcgagtatcatattaaaaactgtgcagggccttgcgaacagctggaaagcaaagaggaatatgataagaaaattgaagccatccgcggaatcatcaaaggagatttccggctggctagaaattacctcaccgaagaaatgacgagatatgcttcgcttttggagtttgaaaatgctcagatggtaaaagaacgcattgatcttttagaagaatatcaggccaaacataccgtggtaaatccgaatattgacgatgtagatgtttttggaatgaccagcgatgaaactgctgcgtatgttaacttctttaaaatcagaaacggaaacatcattcagagttatacgacggaaataaagaaagtgttggaagagaccgatgaagacatcctggaagaagccatcatcgaaatccgtcagaaattcagttctcattccaaagaaattctgattccttttcctatttcagtcgaaattcccgcagtgaagctcctggtgcccaaagtgggcgataaaaaacgcatcgtagaactttccgaaagaaatgccaaagaataccgcattgaaaagctgaaacaggtgcagattgtggatccggaacgccacaccaaccgcattatggcagaaatgcaaaagctgttgcgcatgccggaagaaccgcgccacattgaaggtttcgacaattccaatattcagggaaccaatccggtgtctgcctgtgtagtgttcagagacggaaaacccagcaaaagcgattatcgcatttttcatcccaaaaccgtagaaggagccaatgattttgccacaatggaagaggtgatttacagaagataccgcagaatgctggatgaaggggaagctttgccacaactcattttgattgatggcggaaaaggccagctttcgtcggcagtgaaaagtttgaaattacttggaatttatggaaaagtaacggtgatcggaattgcaaaaagactggaagaaatttattttcctgaagatcccatcccgctgtatctggataaaaaatcggaaacgcttaaaatccttcagcgggttcgcgacgaggcacaccgtttcggagtaaggcatcatcggacacgcagaaaaaatgcgaccatccagacggaactggaagaaattccgggagtaggggaaaaatcaatagaattgcttttcaaaagattgaaatctgtaaagagaataaaagaagcaccttttgaaacgctggcagaaattctgggaacacgaaaaggcaaaatagtttgggagtactttaatcattaaaagtaggaaaagaactcaaccgttccacatcaaacttaaaaccgctggagaaattcatctggaaattagaatttaacctgtatttcagtttttttgaaatttccgtcagcatattataataatcgacattggaaatatcatcaaaaacaatatgttcattattaattttgatgccgttttcgtcaaatctcagaaaatcaataccatacttttggtgtaggttttccagaaattttaaatcttcgagggataggatattttcagacattttctttctttttttaatgtattcaaagttagtagaaaacagaactggaaatttgtaatttataaaccataatgttatataattttcattcccttgttttataaaccgtaattttgtacaaaataatgcaagtatgagcacagcaggcctcaccatcacttcccgcgaaccggtatctctggatgatgttttgatttcagattctaacagaaaacaattgctgcagttgattcgcgagaaccgtcatctgcccgagctcagaaaatacaatcttcaggtcagcaataaaattttgctgcacggaagttccggttgtggaaaaacctatacggcaaaagccatcgccacagcgttgaagaaaaagctgatcattgttagcctcagcactttggtgaattcaagaatcggagaaaccgctaaaaacctgaatgccatttttgataaggcaaaatgggacaaagcggtgctgtttctggatgaatttgaccatattggagtggcccgggattttgatgaaaaagatgtaggggaaatgcgaaggctggtgaatacgctcattcagctcattgattatcttccggaagaggtgatcatggttgcagccaccaatcatctggattttatagattccgctttgcttcgccgtttccagctgaggttggaatataccatgcccgatcagaaaagtcttgatgtgtattatgatcaactgctttctgcttttccgcaacgtttcagaaatatgattaggaaatatgaaatctcatacgcagaagcgaaagatgaggtacacaccgcagtgaaaatgggtattattgaagaattggaacagcatggagctgaggaagtttagcatcagtaagatggtctttcaatgtgttcattttaattgttgtacctttgcaccggaatggcgggctgaaaccgaacaatctgcaagtttagaatttcctttttttctttcaccttagtagctttggcagtcattcacgaggaaagtacctctcaatctttattcacccaaaaatttaatctactttaaaatatggcagattctttctcaaaaaaagaaaatttcaagaaaaaacttcagaaacaaaaagaaaaagcgctgaaaagagaagagcgcaaacaaaacaacaacaaaggaaaaagcctggaagacatgctggtgtatgtggacgctaacgggcagatcaccgaagttcggcctgatgatcaggagaaactggagatcaaccctgaggatattcagctcggagcagctcttattgaagcggaagagttggtaaaaacaggaattgttacgtttttaagcgacaaaggctacggtttcattactgagaacagcagcaaagacaatattttcttccatgaaaacaattgtgcgcatcccgtaaaaaaaggaaacaaagtttctttcgaaaaagaaaaatcaccgaaaggtttttctgcagtcaatatacaggtggtaaaataacaccgctttccaatattcctctttggctcttctttctccatcgggagagaatgagccaaaaacatgggaggcattctgcctcttgaattcccaccaccgtttcatcccgtttaataggttaatcgtttcatcggttaatcgtttagctgatgagaggatttgcttttttgctttttttgttttttttctgctgtgaaactccttcaataggaataaaattctttacctccatacttcacccgtacataccccgtagttaccccgtatataccccgtagttaccttatggttgaccgtagggcagaaattggcaacctgtaacggcttcttctaacttttatttctctccttcggactctcttgttttacaaagacttttcaatggctgagcggagccaaagccatgctttcggcgatctgcaagaaggttccgaaatttaggtatcttactttttgccttgacgcaaaaagtaaccaaaaaggtcaagactggacccttttgctaaaaaaagtgaaatttattcatagaaaacttacaaacttgcgcgattaaatgcttgttgcttcaggtcaaattttgtgtcgcgcttcaaacactgtaagtttttctgcagtccgaaaagtgagggtgattaaggaataaatttcacttttttcttaacgccaaaagctcctaggtcggttgctttcttttgaactttaggttataattaagataatggaaattaagctgtcgatggctgaggctctcgaagccgccacggcagaaggggctgctgcaccgtccgctgttcgaggtctcctgacctcggactcccttgttttacaaggacttttcgatggctgagccaaagccatgctgtcggcgatccgcaggcagattctgaaacttgctcacattcatgtggaagtgcaaaacagatcaggttgttccccttctcaatgaactgtacagcggtgtgggctggggtaattttcgggaggtttccgttcggtttctgatattatctttgcttcgccatttggtcaccaatgcgttacctgcggtactgttgaatctgcttaggatttcttttttaatctctgccatcgcataaaaattgattgttatgcagtacaaacctacacagcaaaattcacgaaaacaagcttttaggaggattgcctttcttttaccgtttgttgctcgaagaggtcctgttactgtccgaatacggtccggtaaccaaaaaggagtgctgattcagaataatagttttgttcggatgttgttcgggtcgtgttcggtaaaccttcggtaaaacccccattttaccgaacacgatccgaagagtacccgaacagtatccgaagaaagaggtgaaaaatgattcgtcttaataaaattattgcaaataaaaaagcaacgaagatcgtggaggtgttaaaagttttggctacagtgtttaattgtatttaaaggagttggggaatatttagacataaaaaaacctcctgatttatggacaagaggtgacccaaatgttttcacaacggaataatccttattgtgaactgcttcaaaattgtaataccaaagataataaaattccgtacatcaccaaatcctttgttgaaataatcaatatatttcttaattttaatgattatttataaaaaactaacaatgatgaaaactcaattagacttaaatgaggataggctttataaacatgtcctcggactagacctcggcgtcacctctatcggtttcgcccacgttgttgaatatgaaaacagaaatgaatctgaaattaagcaaattggtgtacgagtaattcagttggataacttcgataaagttgataaatccgggaaaatatcggagtcaaaaaatcctgccggtgatttcgctgctggaaaaggcctgactccaaatggaagccgcacaaagaagcgcggggcaaggagaaacttggatcgttatcaggacagaagagataatttactcgaggtactcacaaaatcaggatttataaattctgaaactaaacggacagaagacggtaagcataccacacatcaaacttgggaaatacgtgcaaaagctgtttccgagaaagttgaaaaggaagaattcgcccgaatattgttggctatcaataaaaaacgtggttacaaaagcagtcggaaagccaaaaatgaggatgaaggacaagctgttgatggaatggcagtggccaaaagattgtacgaagaaaacctaacgcccgggcaatatgcgtatgaagttttgagtggaggtaaaaagtcaattccagatttttaccgttcggatctgcaagcggaatttgataaaatatggaactttcaaaaacagttttatccgaatattctaacagatgaattttatgaagtattaaaaggaaaaggacaaagggctacatcagcagcattttggaaaattcatcaattcaatacagccgatattaaagacttggaagatgaattgaaaaatgagcgtacgataaaattaagcaaaagagatcagaaaaaattacaggcttacaaatggcgaagtgaagcggttgtaaagcagttgggaaaagaagaagtagctttcgtgcttactgaaataaataacaatcttaataattcaagtggttatttgggggcaatttctgatcgaagcaaagagttgtatttcaataagcaaacagtgggacagtacttgtacaaacaattgaaggaaaatccacatacacgtcttaaaaatcaagttttttatcgacaagattatttagatgagttcgaaacaatttgggaaaagcaagctcaatttcatcctgaattaacacaagaactcaaagaagaaattcgggatatcattattttttaccaacgtaaactcaagtcgcaaaaaggactgattagtttttgtgaattggaaagtaaagaagttgttatcaatgatacaaagaaaactattggacttcgtgtagcaccaaagtcatcgcccttatttcaagaatttaaaatttggcagaacctaaataacattttggtgcgtaaaaaaggaagccgcaaaagagtggtcaaagcacaaaaccaacattctttatttgaggaaccaaaagaaattttctcgcttgacctgacgtctaaagaaaaattatttgaagagctgaatttgaaagggaatttatcagcgaagaattgtttggatattttggggctgaattctaacgaatgggaattgaattatacccatttggaaggaaatcgtacgaataaatctttatatgaagcctttctcaaaattttggatatcgagggctatgatgtgaaagatttgcttaaagtcaagtcaagtaaagatgaagtagaattggatgatttaaaagtgccagcttctgaaattaaaaatatggttcgagaaattttcagtacaaataatattgctaccgaaattcttgattttgatgccgaactagatggaaaagcttttgaaaaacaagcttcttatcaattatggcacttgctatattcgtatgaaggtgacgactctcagagtggcaatgaaaaactgtatgaattattggctgaaaaatttggatttatgcgtgaacacgcacagattctggcgaatgtaagtcttgtggatgattatggaaatctgtccagcaaggcaatgcgtaagatttatccgcacattcgtgagaacaattatagcacggcgtgtgaattggtgggctataggcattctaaacattctctgaccaaagatgaactgaaagacagggttttggaagacaggcttgaattactcagaaagaatagtttgcgccagccggtggtagagaaaattctcaatcagatgattaacgtcgtcaatgctttgattgagaaaaatagcgaacgagatgaaaacggaaacattactaaatatttcaagtttgatgaaatccgtatcgaactggcgcgtgagcttaagaaaaatgcagcggagcgtgcagaaatgactaccaatattaacgctgcgaaactagcgcacgaaaaaatatttaaaatattgcaaaatgaatttggtattaaaaaccccacaagaaacgacatcattcggtaccgtctgtatgaagagttgaaagggaatgggtacaaagatttgtattccaatacttacatacctcgagaaatactgttcagtaatcagatagatattgatcatattttgcctcaatctagattgtttgatgacagtttttccaataaagtagttgtatttcgaaaagataatttaaagaagggaaatcaaaccgctttcgattacattgggagtgaagtgggtgaggaaggattaaagaattttatcgaacgagttgaatctctttatgaattagggaagaaaaacaaagaggaaggcatttcaaaagcaaaatatcaaaagttattaaaatctgcgtctgaaattggtgatggatttatcgaaagagatttgcgcgagagccaatacattgcgaagaaagctaaagagttgttgttcaaagtaacgcgatcggtggtttctacctctggaagtataacggacagattgcgtgaagattggggtttgatcaatgtgatgaaagaactgaatttgccgaagtataagtcgctcggattgactgaagtacaagaacgcagaaatggtcatcaggtcgaggtgattaaagattggacaaaacgtaacgaccaccgtcaccacgcaatggatgccttggctgttgcttttacaaaaagaagctttattcaatatttaaacaatctgaacgcaaggcgtaaggataagtatgaggacggagtaagcaataccaacaatagaaagtctatcggggcttcggacttgaagatttccacgcgtgatgtgttgggtattgaagaaaaagaattgtaccgggatgaagaaggcaaatggcggtttaatttgcctattccaaacttccgccaagtagccaaagagcatttggaaaatgtgttgatttcgcacaaagccaagaataaagtggtgacgaaaaacaagaataaaatttcaggaaaagaaaagtcacaaatcacgttgacaccacgcggccagcttcacaaagaaacggtttatggaaaatatcgtttttatcagagcaaagacgaaaaagtaagtgccaaatttgacttggaaacgattgaaaaagtagcaaatccttcttataaagccgctttacttcaaagattaaacgaaaatgaaaatgatccccagaaagctttttcaggaaaaaatgctttgagtaagaacccgatttacatcagtatggagaacgatattaaagttcctgacaccgtgaagttggtttggctagaagaagattattcaatccggaaagatgtcacaccagaaaattttaaagacgaaaaatccatagaaaagattttggacgaaggtgtaaaacgtattttgaaaaatcgcttgaaggaatttggtggagatccaaagaaagcattttcagatttggataaaaacccgatttggcttaaagaagaaaagggaatttccatcaaacgtgtgcggatttctggagtaaaaaatgcagagcctttacactataaaaaggatcattttggaaatgatattttagatgaaaatggtaataaaattccggcggatttcgtcagtacaggcaataatcatcacgttgcgatttataaagagccagaatttgataaaaaaggccagccggttttagatgaattaggaaaccaaaaatataatctaaaagaaaaagtagtttcgtttttcgaagctgtagaacgggtcaaccaagggttaccaataatcgatacaacctacaatcaccatttaggctggcagtttttctttacaatgaagcaaaacgaaatgtttgtttttccaaatgaaaaaatagggtttaatccaattgagattgatttgttagattctaaaaacaagaaattaattagcccaaatttatttagggtgcaaactctttccatagttcaatatgggaacaatacagttagggattttaagtttaggcaccatttagaaaccgtattggacgatatgagagaacttcaaggtgttacttttcaacaacttaaaagtttgccacccctaaagaatattattaaagtccgtgtcaatcatttaggagacattgtaagtgtgggagaatattaaattgttattatgatcacccgttccatttacatcggaaatcctgcgtatctcaaactgaaagaccatcagatgtatatcatgtgtccggaaaccaaagaggtcaagggcaaggtgccggtggaggatttgggtttgctgatgctggatcattttcagattaccgtttcacatcagttgatacagaaaatgatgggcaataatgtggtggtcatcagttgcgatgcacatcatcttcctcatggcatcatgttgccgctgcacgggcatacggaatattcagacagggtgaaagatcaactggaagcgagcgaaccactgaaaaagcaactctggaagcacacggtggaatgtaagatcagcaaccagatcagtgttttggaatccatgaaatcatatgcggatccgatgcatgattatctgaaaaatgtaaaatcaggagatacaaccaatatggaaggtattgccgcacagcattactggaaatacctcatcagccccgattttcttcggggacggtttggtgattcgcccaatcagttttttaatttcggatattctgttttgcgcagcatcgtggcgagagcagtagtggaaaccggactgatgccggtattgggaattttccacaaaaacaaatacaatccctattgtctggccgatgatctcatggaaccgtaccgtcccatggtggactacatggtgatgaactggctgaaattgaatccggacacagaagaactgaccaaagaagttaaagcttatattctgggcatcgcgacaaaagatgtaaagattgatcagctcagaaggccactgatggtggcggtgaaaagtactgctgtttcactgtacaaatgttatacgggtgaaaagcgacaaatttcttatccggaatttttatgagcaatatgaaagatatttttcgtccatgcgtatatgaatgccgaaaggtttaatgcctaccgaattatgtgggtgatggtattatatgatcttcctacggaaaccaaggcgatgcggaaagcagcgaacctgttccggaagcggttggaggatgatggctttgccctgtttcagttttctatctacatccggcattgtccaagccgtgagaatgcggaagttcacatcaggagggtaaaagctatacttccaaagcatggaaaagtagcgatcatgagcattactgacaagcaatttggtgatattgaaatattttttgcacgcagcaaggaagagcctccaccgttgtatcagcaattagaattgttttgaagtcattttagattacaatgaagaaaatgattctcatgatggaattcctgttcatcatctatacagaattttttttctgcaaaacctctaaaaacctccgttgtcaggaggttttttgaattgaggttgtgtcgtgtcacgaagataaacaattttgaaagcaattcacaaccctacaccagatgcaaggatattaattatcgttgtgtcgtgtcacgaagataaacaattttgaaagcaattcacaacgtaaaattagattgggacgaagcaaaagaagttgtgtcgtgtcacgaagataaacaattttgaaagcaattcacaacgaataacacataattacagaaataggttgtgttgtgtcgtgtcacgaagataaacaattttgaaagcaattcacaactatgaaaataaccgtaaaaaccgatccggagttgtgtcgtgtcacgaagataaacaattttgaaagcaattcacaacctgcatcatctgataatcttccacaaattggttgtgtcgtgtcacgaagataaacaattttgaaagcaattcacaacgaattatgtggtgattattttagggtttcggttgtgtcgtgtcacgaagataaacaattttgaaagcaattcacaactgattattatgaggtttacaacaattacaagttgtgtcgtgtcacgaagataaacaattttgaaagcaattcacaactcatgcaggagtatataagacgataaaaaagttgtgtcgtgtcacgaagataaacaattttgaaagcaattcacaaccaatagcaaaagaatataatatttcggcaggttgtgtcgtgtcacgaagataaacaattttgaaagcaattcacaacttgtcaccattggtgtattctgaaaggtgagttgtgtcgtgtcacgaagataaacaattttgaaagcaattcacaaccaccccttacaatgatcttcaaatctttgcgttgtgtcgtgtcacgaagataaacaattttgaaagcaattcacaactatctctcgaaaatcttttcgtgtgcaggcgttgtgtcgtgtcacgaagataaacaattttgaaagcaattcacaacttctatatattattttgttatattagagcagttgtgtcgtgtcacgaagataaacaattttgaaagcaattcacaacctgcgtcgtatttatcactctcaggatttagttgtgtcgtgtcacgaagataaacaattttgaaagcaattcacaactaataaaatgaaagaaaaaacatttgaggagttgtgtcgtgtcacgaagataaacaattttgaaagcaattcacaacgaacaaaaggagtatgctaaattcctgtttgttgtgtcgtgtcacgaagataaacaattttgaaagcaattcacaaccagaaaggcgttcttaacggtagaggtgaagttgtgtcgtgtcacgaagataaacaattttgaaagcaattcacaactgttggattccggattgatcaatcaggaacgttgtgtcgtgtcacgaagataaacaattttgaaagcaattcacaacggttatatacaagggtgtacccgtttacgggttgtgtcgtgtcacgaagataaacaattttgaaagcaattcacaactatgtcaaatttcacttacaaagaacagcagttgtgtcgtgtcacgaagataaacaattttgaaagcaattcacaacaaagctttccatcacggatgaaaaggtaaggttgtgtcgtgtcacgaagataaacaattttgaaagcaattcacaacacggttaggcgttcaaagtatcggattcgcgttgtgtcgtgtcacgaagataaacaattttgaaagcaattcacaacttagaaagagaggtttatttacacccgtaagttgtgtcgtgtcacgaagataaacaattttgaaagcaattcacaactgatcggcgcattttgcgatgtaaaatggggttgtgtcgtgtcacgaagataaacaattttgaaagcaattcacaactatgcaaatgaacaaaccaaacttaaaaaggttgtgtcgtgtcacgaagataaacaattttgaaagcaattcacaacgtcttgttacagcttcagcgtttcccgttggttgtgtcgtgtcacgaagataaacaattttgaaagcaattcacaacgacactggaaatgatccggaaaaacattcagttgtgtcgtgtcacgaagataaacaattttgaaagcaattcacaactcgtttctgtaatgtgttattgtctccatggttgtgtcgtgtcacgaagataaacaattttgaaagcaattcacaacgataaggtctaaatgtaccatcgggattgagttgtgtcgtgtcacgaagataaacaattttgaaagcaattcacaactaatactctaataaataatgtaaggtgttggttgtgtcgtgtcacgaagataaacaattttgaaagcaattcacaactgaagatgatgcagccataaagcgtttttgataattaatgcttttttcagagagcaattaatattttgcgtatcaaatgcaataatggtcaaatccaattgactgattattttattacgttcaagctctccggcaaaaatagcggaacactctaagcgaacaggaaattatatagaggatgttcagtattgatgattttcgttatctttatcgaactttaaaacctatcttaaagtctatgctttacaattgaagatccagcttctcaacatttctaaaccgccggtgtggcgcaaagttttggtgcacgctagtttttcattcgataaatttcacagcgtgattcaggaggcattcggctggtacgatgctcatctgtaccagttttctccgaaaggatttaattcctcaccgcaaattggtattcccgatgactctgggtgggacgatgaggaaatcatcaacagtaaaaaaattaaactctccgcgatctttactgagaaaggccagaaattcacttacatttatgattttggagatgtctggcagcataacattaccttagaggatataaacgaaggtgcagcgaagaaagccgagctgctggatggcaaaggtgcctgtcggccggaggactgtggcggtgcaggaggctatgagtggatgtgcgaagtgttgagcaatccggaaaatgaagaatatgaaagcatgcggaattggctcggaatggaagaggatgacacctgggatgcagcctattttgacaaagaagagaccgcaattgcagtgaaatccgtgtaataaaaagaggcgtgaaagcgtgaaaaacacgatggtgcttagggccattatatcaaaaaaaaagccctgcaagggtgatgcagggcttataaaacagagcttttgttttaatttcttaggaattttccagaatatacgtgaacatcaacggcgcacagatggtggcatcgctttctacaatgtatttcggagtgtcaatatccagttttccccaggtgattttctcgttgggaactgctcctgaataggaaccgtaagacgtggtggaatcggaaatctgacagaaataagaccagaaaggaacatcttcccactccagatcctgatacatcatcggaactacacagatagggaaatcgccggcaattccgccaccaatctggaagaaaccaacgccttttccgccggaattcgcgcggtaccattcggtcagataaatcatgtattctatgcccgattttacggtatgaacattgagttttcctttaatgacattcgaagtgaaaatatttcctgttgtggaatcttcccaacccggacaaacgatcggcaggttcttttccgccgctgcgacaatccaggaatccttagggtcgatttcataatactgttccagaactccggaattaaccacctgatacaagaattcgtgcgggaaatatctttcgcctttttcttccgccgcatgccaaacatcttccaggtgtttctgtaaacggcgaaacgcttcttcttcaggaatacacgtatccgtaactctgttgaaatgctggtccagcaattctctttcctgctccggagtcagatcccggtaattgggaacccttttataatgagaatgcgctacgagattcatcacatcttcctcaagattggctcctgtgcaagaaataatctgaactttgtcttggcgaatcatctctgccagaatttttcccaactcggcggtggacatggctccggccagcgtaatcatcatttttccgccatctttcaggtgcgcaacgtagcccttagaagcatctaccaaagcagctgcgttgaaatgcagatagtacttttccagaaattctgttatcggtttgttcattttttaatattttgagcaaagatactaaaatcggaaagttcctgccaacgacagagaaacccgacccagtccttcatattgtccttcagaaagttctatcgtgttaccattcagtttcatttttttcaaagttccagctgtatatcctaactgaggccccacaaaaatattcggatttatcgcatattgatatgcaatagaagcagccaatcctaaattgctgccttctatcacaacattacccgtggtgcttttataactaatcattcctaaagccaaatcgtaatataatttgtgctttgtttcactattaaaattggaataaataaatgatggaccaataaaagtaatctgatccttcgtatccatcataactacggcataagtaccatccggcatattaacggtataattcatttgggctgaagaggaaaataagttaaatttcaatcccaaccctatagaagtattaaggttgtaatacgctgcgacatcaaaattaaaaccctgactgagtttattgagatagtctttctcggcttgcgataatcctgaaggtttttcagctactctccacgcataaccgccggaaggaattatagaaaattttttttgcgcactcagaatcatcggcacaccgatcatcaaacttaagattaattttttcatgtaattttttcgcaaatttaaacttaatttctatatgaaaggtctcgcaaaactgtcaattgagtaggtctttgtgttttattggtagaaaacatctttctctatccttgtgtttaattggagtcgcaataactataaattctttgaacattctatttcagtaccggaattttctgttttctttcttttcggaatgttccttcttttgcttcattcttttttcaatctgagattttgaaggttttgtcgcttttctcggcttgggttttagcaatgatttattgacgatttccaatattttctcggtcgcagcttttttatttttcagttgagttctgctttcagaaacggtcagttgcagcgtaccttcctggttgattctgtttttcagtttgctttggatcagctttttttcttcttcattaaaaaactgactttcctccactttccacagcacggtgacggaagtttccactttgttcacgttttgtccgcccgcgcctgaggaacgggaggttttataagtgagctctgtggtgaaatttttcatcgggtacatcgcaagttgaaagatagcaaattttatcagaatcaggatttggtgagaagttgaagaagcgttctccggttcacttttccgttgggcgttcttggaatttcgtccaggaaaaaaacttctttcggtttatagaacgcttttcgatactgaatattgagaattttattttctaattcttcatttctttcaccttcaatggccagcacgagtttatggcccagaatttcatcgggaatcccaaggaaaacaacctcattttcaacatgttttttcaccacagtttccagttcttcagggaaaatttttgcacctccggaattaatgacattgtccgccctgcccaaaaacttaaactgtttttcattttttagttccaccaagtcattggttgttaaaacatcaggattcagcatcggagcatgaattttcaggcaatcgcgttcatctttcgatatttcaatgccttcaaacgtggtaaaatattcctcttcattcgggaaaatttctttcagcgcaatgtgagaaagcgtttcgctcatgccataggtttcaaaaatccttctgttgtcgtttttttcatttcctattcctgaaagttttttcttcaaggcttcggaaacagcagcaccgccgataatcagattttttattaaatgaattttgctcagcgaattttctacctgtagtggtgtcaaggcgcagaaatctactttctcctccagatctttcaaagggtgaatttcaggcgttttcacgatcagtttcagttttctttccaacgcacgaacgagcatcatttttccggaaatatattctacgggcaaacaaagcagtgcggtatcaccttcatttaatcctaagaaatcacaggtcattttcgctgaattctgcattttctctttttcgatatcaaaaattttgggtattcctgtagagccggaagtctgcaccgaaaccgttgaagcttcagaaaaccactctttcaaaaagaacaaaaccttttcttcaaaggcagttttgggttgtaatttattagtattgagatttttaaagtcaatcgtcatttcagaaaggatttttgaaacgctaaaagtaaattttttcagtcaaatcacttgtaattatagaaaaatatattaaatttgcaccacttaaatggacagacccatggtgtagcggtaacactactgattttggttcagtcatctggggttcgaatccctgtgggtctacaagttttaagataacgctctgattttcagggcgttttttgtttagcggtatccaatgtaatcaatttaattacaacagaagcccaacggattagtttttttttagtttactgactttgccgtgtatcgtaaccattatggaaattgttcgagggcaggctgattttactgcattttttttaggatttagaattcattttgtcatcacgaaaagtggttacttccttcattttatccacaaatctcaacaaattgtggataattattttgaagatcaattccttaattaacaggattttaacgtcttgcttgaaacggtggtgtaagaaagctcaaataaaattgtatttttgagcattaaaaccgaaataatggccaaagttataggaattgccaatcagaaaggcggggtgggaaagaccaccacggcagtaaatctcgctgcagcattgggagttttggagaagaaggtattgattattgatgcagatccacaagcgaatgctacctcaggattaggagttgaagaagtaaaacattctacttataatctgttggaacatagtgtggatgcaaggaactgtatccagaaaaccgcttcgccgaatttggatattattccgtctcatattgatttggtggccgcagaaatagaactggtagaccggcaaaacagggaatacatgctgaaggaagccttaaaatccatccgtaacgattatgattttatcattatcgactgtgctccgagcttagggctcataacgatcaatgctctgacggcggcagattcggtcattattccaatccaatgcgaatattttgcgctggaaggtttgggaaaactgctgaacaccgttaaaaatgttcagaatattcataataaaaatctcgatatcgaaggattgcttctcaccatgtacgacagcaggcttcggctttccaatcaggtggtggaagaagtgaacagccattttcctgaaatggttttcgaaaccatcatcagccggaatgtccgcctgagcgaagcgccgagtttcggggaaagtattctgaactacgatgccgaaagcaaaggcgcagtgcagtatctgcagttggccgaagaagtattgctgaaaaacgaaagcctcgtgaaaaactgatccgtttacaatattaatcacctcttctgttgatataaaaaatgaaagacaaaaaaagagcgatgggccgcggcctcggagcaatattaagtgcagaatccaaggccagtatcaatactgcgaccgatgaaggtgcagataaattcctgggaaatattgtggaagtggcattggacgatatttatcccaacgtttcacagcccagaacacattttgacgaaaaagcgttgaacgatctcgcacagtctataaaaaatttaggcattattcagccgataacccttcgcaaggacggcgggaaattcgaaattatttccggcgaaagacggtacagagcctccaaaattgcgggtttaaaaactgtaccagcgtatattcgtttggtcaacgatcaggaattgctggaaatggctttggtagaaaatattcagcgtgaagatctggatgccattgaagtggcacttacctatcagagacttttggaagaaattggaatgacccaggaaaacctgagccaaagagtgggaaaggaaagaagtaccattaccaattctatcaggcttttaagattgaatcctgacgtgcagaacgccatcagaagcggagagatttctgccggtcatggccgtgcgatcatcagcctggagaatgaagaattgcaggaaaaactatttcagagagtggtcaaagaaggattgaatgtccgacaggcagaacaggcggcacaacagctgaaaaatcctgtgc

SEQ ID NO: 2090 - DNA, 24455 bp, synthetic construct
  misc_feature 1..24455: note = Synthetic
  source 1..24455: mol_type = other DNA
attcgtccgtacaaggggacaaagaaagtggctgcaagaatgttgaaatttttaaaaggttcagagaatttaaaataccatgaagattgtggaagggtgcaggatccgtactccatgagatgtgttccgcaagtgcacggtgcaagtagaaatgcctacgaacacttgagagaaatggcagaaatagagctgaattcggttaccgataacccgattgtaatctccaatgaagaagcaatttccggaggtaatttccacggacaacccatggcgatgccgctggattatgcaactctggctgctgcagaattagggaatatttcggacagaagatcctatcttttgttggaaggaaaatacggtttgccaaaattattgatagaaagttccggcctcaactcgggattcatgatcccgcagtacactactgcagcattggttactgaaaacaaaaccctttgtttccctgcttctgccgactctgtaccaaccagtttgggacaagaagatcatgtgagtatgggaagtatttccggtagaaaattcaaccaagtgttggggaatttagaaaatatttttgctgttgaattgatgtttgctgctcaaggtttggagtttagaagacctttgaaatcctctaaaattgttgaagaaaatttcaaaattatccgcgaaaaagtgactaaattagaagatgaccgattgataggtaaagatattttggcaattgctgatctgatctgcgaaagaaaattgaaagttacggtctaaaaatacagacttcctaagtgaatactaagccatctcaatttatcattagaggtggcttttatctgtaaactttctaacggaattgtttattaaaaaaatcttattcttcaaagtttttcattgcccggttcaaagttctgacggtaattcctaaataagaagccatttcttcttttgaaagagaaatattttgttgggtctgcaattccatcagcttggttaaactatgttcaaccgtgtataattgctgaaatgaagctctgcttgcagtatctacaattcgttttgcaaaactatctaaaagtagctgattcaactgaatatctgctttgagaagtgttgaaaaataaaatttatcaatagcgaaataagaaatatccgtcatcgcgtcaacagtacacagacatggaatattacgaatcaattccacttctccaataatttcacctttccctaaaaattcaataatgtattctttgtcgttatcttctgtaaaataacatttggtgatgccatcaacaatcagcattacttttgcgagtgcttcattttgagaaagcaacctttctcctttcctacatttttttaaaatgatagcttctttacgattttggctttcgtaaagtgctgataaatagctaaaaaatgtttcgtttgtttttaacataaaacccttgggacaaatgtcctttttactaaatttaattttgctgaactttgcaattcacaagtacttgacaaaaatcttaacccatgataatttgtttattaaaccacatagtaacatagtctagatagcaataagactgcatagttacacttagtatccgtcaaagacggatatctattgtattttttgtcagatattaaaaacaaatttagcaaataaagaaatgaaaaaagatataaaaatcatagccttcgatgccgatgataccttatgggtaaatgaaccttactttcaagaagccgaaaaacaattctgtgctttgcttgaaaattaccatccgcaacataccatttcgcaagaactttttaaaaccgaaatgaagaatttacatctttacggttacggcattaaaggttttttgttgtgtatgatagaaacagcgaatcgagtttctaacagcaccgtttccttaaatattattgacaaaatcattgaaatcggacacgaattgctacaaaaacctattgaattgctgccaggagttaccgaaactttggaagccttgaatggtgattataaattggtagttgccaccaaaggcgatttgttagaccagaaaagaaaattgaaaaactctgggttagaacattactttcatcacatagaaattatgagtgagaaaaaagagagtgattatcaaaaactgttcaagcatttggattgtcaacccgaaaactttttaatgttgggcaattccattaaatccgacattattccggttttagaattgggtggcaatgcggctcatattccctaccatgtaacttggacgcacgaacaacacgaaatcaatttgaaacacgaaaattttatccaactgaaatcaattaatgaaattttaaattatctgaaatagcaatggaaattaatattagacaagaaacttcggccgattatccaatcgtgtttgatttgatagaacaggcgtttcgcgatgaaattttaagcgataaaaaagaacaatttttggtggaaacactcagaaaatccgatgggtttattccggaattatcgttagtcgcagaaatgaacaaccaaattgttggctatattctgcttacgaaaatcagtattgaaaccaaaccagaaagcatcacttctttagcattggcacctgtagccgttttgcccacttttcaaaagcaaggaattggaagtaaattgatagtggaagcccatcacattgctaaagacttaggctatgagtcggttgttttattgggacacgaaaattattatccaaagtttggatatcaacttttacatcatttcaatatttctcttccgtttgaagcacccaaagaaaattgtatggcgatagaatttgttcctgatgctttaaaaaacaaagcaggaaaagtgatttacccaaaagaattttttgaataaaaaaacataacaatgaaatataaaccacatagacccataggaagtattttttgcgaaaagaaatattttagcaacacaatagaagtccgtctgtgacggacactatgtatagctatgcagtcctagtgctatatgttctatattcctatgtagtttaatcaaatgattaattttgtgttacaatatatcgttttttgaatgaaaacttaatgacaaaaaaaataacattgaaatttaaaccacatagacccataggaagtattttttgcgaaaagaattattttagctacacaatagaagtccgtctttgacggacactatgtgccacttaaccgccttattgctataagttctatgttcctatgtggtttaatcaaatgattaattttgtgttacaatatatcgttttttgaatgaaaacttaatgacaaaaaaaataacattgaaatttaaaccacatagacccataggaagtattttttgcgaaaagaaatattttagcagcacaatagatgcccgtctttgacggacactatgtgccacttaaccgccttattgctataagttctatgttcctatgtggtttaatcaaatgattaattttgtgttacaatatatcgttttttgaatgaaaacttaatgacaaaaaaaataacattgaaatataaaccacatagacccataggaagtattttttgcgaaaagaaatattttagcaacacaatagaagtccgtctttgacggacactatatgccacttaaccgccttattgctatatgttctatgttcctatgtggtttaatcaaatgattaattttgtgttacaatatatcgttttttgaatgaaaacttaatgacaaaaaaaataacattgaaatttaaaccacatagacccataggaagtattttttgcgaaaagaaatattttagcagcacaatagatgtccgtctttgacggacactatgtgccacttaaccgccttattgctatatgtcctatgttcctatgtggtttaataaaatgattattcttgtgttacaattttgataatgtacttagataaaaaataagattaaaaatgaaaaaattaatagaccttgatgcttggaacagaaaagagcatttccttttcttctcaaaatttgaagaacccttttttggggtaactgtaaaagtggattgcaccactgcctatcaaaaggcaaaggaaaaaggcatttcttttttcttgtattacttatacagagccttaaaagcagccaatgaagtagaaaatttcagatacagaattattgaaaatcaaccttatgattttgcaacggtaaacgcttcgccaaccatcaaccgaccagacggaacatttggctttgcatatatggattattttgaagatgaaaatatgttttacgaaaaagcattgcaagaaattgaaaaggtaagaaattcaaacagtttattaccggctgtttccggagaaaatgtcattcatttttctgccgttccatggttggattttaccagtatttctcatgcaagaagtttttcgcatcccgattcttgtccaaaaataacttttggtaaaatgactgaaaataatggtgtgaaagaaatgtctgtttctattcatggacatcacgcactcatggacggatatcatgtaggtcagtttgttgaaaaatttcaaaacctcttaaatgccgaatgaaaaatatggaatcgataacgaacaaattgcaagagagtagggaagtgctctgttaggaatattttaataaatttgaaaagctgtcccagcacggaatttggttttagaaacccgttccattgcaaagtgcacaattgtaattaaataaaatcgtcatgaatattaagttttttttgagcttgttgtttgcatttccgttaatgatttttggtcaagaacaattagaagcgaagttggttgttgaaaaaggtaaatttatctttgataaaaaaagctataagttgttgaaaactcaggtggatgaaatttcaaaacaaaaaaaaaagaacgatagcatgatgaaaattaatccgagcatttcgtatatggttcttgattgtagggtaaccgaaattccgagattaaactctaaaacgacgcattttacagctttagttaattctaatttgaatttgaaaaatataaaacgaggtaagaatttaatgtctatcgttgttaagaaaaacggaatagcgggaagctttaaatgcattgaagcatctgatgaaaaaatttgcaatcagataaaaagaatgtttagaaaagaagaatttaaaacctggcacaacgcactattttctagtattgccgtagattatcatttaactttttccattattgttgataccgattttacgaattataatttgagaaacaagtggtcgttggataacaatattcaagattttgaaaagtagatttcatttaatgtgatctccccaacgcagcccgacttgagtggagctctttttgtggagccctgcggaacaaaaaagcgggaacggaaggcggaaaagctgccctaaaaaaaattacaatcagtctttttttatttcttgtgtacgaatggttttgaggttgaaattgatgttgagcatgatgatggcgagtaaaatgaaaacaacgcctaaccattgggtagaattgatgatctcgcccagcatgatgaaggaaataacgatggaaacaggtagctcaaaagctgaaagaatgctacctaagccgacaccaacaattggaaatcctttgttgaacatgagcggtggaatgacggtaccaaataaagcgatcgggatcccccattgatagagaatgctgaaatccaaagatcggttgctgataaaatcttcgggaacccaatggatgttgaaataatagggtaggatctgtgttgaaagggtgagcaaggcgacaacgatagcaccgccaaaaagcatgactaaacttcgttttgccggggaaagatgcaaggcgatgctgttggtagaaagcaaaacgagactgaaactgatggcggccaaaaatccgaatataacccctcggtaatccagagattgtgtgccgttcagggcgttggttgcaagtagggttccggctaaaacgataagtacagctgcagtttttttaaggttaggaagttttttttgctgtatggattcgatcacaaccccgatccacacggattgcatcagtaaaaccacgcctatggaagccgaaagaaatcgtatggaaatgtagtacaaaacactggtgagtccaaaacaaattcctgcgagaaggagttttgttaagtcgtctttttgcattttattgttgtttttactgaacaaagtcaggatggcaaggcaaattatcccaagaagatattgggcaagggtaacttcggcagttgaaaagagattttgataggcggtctttacaaatgtagccaacatcccataactagaggctccaataaggacaaaggctattccatggcttaatgatttctgtttgttttccataatttttcttaattgattgcacattagacgctatcgtttattcccaaaaaatgatttaaaaacacatggaaatcaacctttttattgaggtgaaaaagcatgattaagaaaaaggaattgaaaaaatcaaagggttcagttttcttatttaaatcaaaatttatgcaaaaaagcgataaagtttggatctaaataatcaactatttgtggtagtgggtagaaacgctcaaccgtattatgagcttatatctatatccgaaatcgagggcaaatttaggaattattatgagaaataaaaaatcgttctttgctttttacaaagaacgatttctaaaataaatgaacgattgttgtggtttttagtttttgataaactgcagttcgccagcgatgttcacggtatcgccaaccaaaacgccgcccgtttctaatgctgcattccagttgaggtcaaagtcttttctggagatttttgaagtaaaggaaaaacctgctctggtatttccccaaggatctttgttgatgcctccgaaatcgacatccaaattaatttctctggtaactccgttgatggttaattttcctgccacctcgtccgtaagagaagtactttcgaaagtaattacagggttgagttccgtattgaaaaagtcggcgtttttcaggtggttgtctctatctgcattgttggtgtcaatcgagtttacttgcacggttgattgtacttttgcttgggcaaaagtatcgtcttctgcgataatttccgcatcaaaatttctaaattctccttttacattggagatcatcatgtgttttactttaaaggtaatttcgctgtgagttgggtctaatttccaaagggtactcataatattttgttttttattgttattgatggtgcaaagatacaagcattacgatgggctgacattgatgtaggttaagaaatgattttggaattaaatttcctatttttgcgataattcaaaatttagaaatgaaaattaataaaatctctttgttaatgatggtttggggcggatttgcctttgcacagaaccaaaaatacaccatggccgaagcggtgaacggactgagatccaacttggccgttaaaaatatcgctcaaccttcttggattcccgggaaaaatacttgggtaaaagccgataaaaacgcctacatctacaccgaaatggcaacgaaaaagtcggatacattggtttcacttcaccaaatcaataagaattttaccaaagaaaaagcactgaaaagaatgcctttcgtgacattcctttccgacaattcggggtattacaaaaccgactctacctataccaaattggataaggtaaacggcgaatggaaagtgaaaacctggatggtaattcctgcaaaggctgaaaacatcactgttttagaagatgtaaatacggtggtttatactttaggcaacaacctttacgccaaccaaaacggaaaagccatcgcgataacccaggataaaaacgaaaacatcctgaacggacaagcggtacacagaaatgaattcgggattgataaaggaatttttgtttctccagatcataaaaaaattgctttctacagaatggatcaaagcatggttgccgattatcccatcatcgattggtctgtggttccggcggtgaatcacaacatcaaatatcccatggcgggaagagcttctcaccaagttacgctgggagtttatgaccttgaaaccggaaaaacacagtttataaaaaccgagggcgacaaagaacaatatctgacttccattgcgtggactccggataataagtctgtattcatcgggattttgaaccgtgatcagaacaatttggatatgaatttgtacgatgcggcatctggaaatttggtgaaaaatcttttcaacgaaaagcatccgaaatatgttcatcctacgacttccatgattgccgtacctggatcttctgatgattttatttatcaatcggaaaagtcaggctttaatcatttgtaccaattcaacctgaaaaaaggtttgaaaaaacaaatcaccacgggaaactgggcagtaacttctgtgttgggcatagacccgaaaaccaaagatattttctttgttgctaccaaagaatcgccattggaaaaacacctgtacaaggtgggttacagcaattctaaaatcactcgcttggataaagaagccggaatgcacaacggaattttgagttcaaacttcgaatacctctacgattcttttgccaatgccgatacaccgagaaaggtggacattattaatgttaaatctctggcatcagaaaatgtcttgaaggctgaaaatcctttaacaaaatacgcacaggctgaggtgaaaaatgtttcgttgaaagccgatgacggaacgccgttgtacggaaaattaattttgccaaaagattttgatccttcaaaaaaatatccggttatcgtttatctttacaacggtccgaatgtgcaaattgtgaccaattctttcccggcttctggaaatctttggtacgattacatgacgcaaaacggatacatcgtgttcaccatggacggtagaggttctttcaaccgcggtctgaatttcgaaaatgccactttcggaaaattaggaacggtagaaatggaagaccaactgaaaggtgtcgattatctgaaatctcttccgtatgtagatgccaatagaatgggcgttcacggatggagcttcggcggatttatgaccaccagtcttatgcttcgtcacccggatgttttcaaagtaggtattgcaggtggaccggtaattgactggagtatgtacgaaattatgtacaccgaaagatacatggatacaccaaaacaaaatcctgaggggtataaaaacgccaatctattggacaaagtacaaaacctaaaaggaaaacttttgatgatacacggtgcacaggacgatgttgttgtatggcaacattctgtagattttgtaaaatctgctgtggacaaaggcgtgcaaatcgactactttatgtacccgggtcatccgcacaatgtcattggcaaagaccgcgtgcatctgatgcaaaaagtgaccgattattttgatctttatctgaaaaaataagaattcctaaatactaaaaaactccctcaaagtctgtgctttgggggagttttgttgtataaaaaatgccccgaagatagtcgaggctctaaatgttttagttcacgaatttataattgttaatttgtgttccttaaattgaagattcgacgaagtcaaacattcaagatatgattaaacaaaaaaagacgagttgccccgtcttgaatgttttagctcacatacttgtttatttttaaatggtgttcgtgaaacatttagcaaaaaaaaatgccccgaagatagtcgaggctctaaatgttttcacaacggaataatccttattgtgaattgctttcaatatgacaaatgtaatatttttattttatactttttacggttaaccgtaaaaaagtataaaaattattgtctatttttaaaaaaaaataaaaacatttgataatggcaaaaaaaatactcggattagacttaggaacaaatagtattgggtgggcgtacgtaaccgaaggagaaacacaaaatgaatcagaaataaagcagataggtgttcgtgttaatccattaacagttgatgagcaaacaaactttgaaaaaggtaagtcaattacaaccaatgcagatagaacgctaaaacgcggagcaagaaggaatttagaccgttatcaattgcgtagagaaaatttgttagaagtactaaccaaagcaaatattattaatgcaactgccaaattatgtgaagatggcaaacaaaccacttttcaaacttgggaattgagagcgaaagcagcttcagaaaaaattgaactcaatgaatttgcacgagtacttttggctatcaataaaaaacgtggttataaaagtagtcgtaaagcaaagaacagtgaagaaggtcaagccattgatggaatgggagtagcaaaaaaactatatgaagaaaatcttactcctggacagttggtatatcaaaattatgaaaaaggaattaaaactattcccgatttttatcgctccgatttgcaaagtgaatttgacaaggtttggaactttcaaaaacaatttcatcctgaaattctaacagacgaattttacaaagaattgcaaggcaaaggtcaaaaagcaacttctgcattgttttggacaaaataccaattcaataccgctgacataaaagatttcgaggatagttttaaaaatcaattcgcagcaaaatttgatactagaaccttaaagaaaattcaagcttaccaatggcgaagtgaggcagtaagtacgcaattagagaaagaacaaatggcttatgtgcttactgaaataaacaataatctcaacaattcaagtggttacttgggtgctatttcagaccgaagtaaagaattatttttcaatcaagaaacggttggacaaaatcaattcaatcagttgctgaaaaacagacatacagctcttaaaaaccaagttttttaccgacaagattatttagatgagtttgaaaagatatggactacacaagcaaaatatcatgctcaactcactgataaactaaaagaagaaattcgggatattgttattttctatcaacgcaagcttaaatcacaaaaaggtttaatcagtttttgtgaatttgaaagcaaagaaatcgagaaagatggtaaaaagaaaacggttggaatgcgtgtggctccgaaatcttcgcctttgtttcaggagtttaagatttggcaaattctacataatgttttagtgaaaaaagcaggaagtaaaaagagaagcgttaaaaaagaaaatcaaccctccttatttgaagaagaaaaagaaatttttgaattagacttagctgctaaaaatcaagtttttgaagaactaaacattaaaggaggtttaaaagccaatcaaattattgaaattttaggctataaacctaaagattgggaaatgaactacgcccaattagaagggaatcgtaccaatcaagctttatacaatgcttatcttaaaattttagaaagagaaggttacaatgaagatttattaaagttatctgataaagatgaaatcaatgtcaatgagctaaaaacaccggcttctgaaataaaagcaatggtaaaagccatttttgaagtattggaaattaatacagaaattttagagtttaatgcagaattggatggtaaagattttgaaaaccaagcctcttatcaattttggcatttactttattctgcagaagatgataccaaaaaatacagccaagaagatgttttactttacggaaacgataatatcggactaaaaaaacagctctgttctaaatttggtttcaagccagaccacgcgaaaatattggctaatgtggtatttcaagatgattatggaagcctttctaccaaagccatgcgaaagatttatccgtatatcaaagaaaataaatacagcgaagcgtgtgcttatgtttctactgattatagtaaattatcccaaagagaggatgatatttacgataaattagccaagaactatcgtcactcaaaatgggttgataaaactgaaaatgaaaccagagcattaaaatccaaattggatttattgcctaaaaacagcttgcgtaatccggtagtagaaaaaattctcaatcaaatggcaaatgtggtaaacaccttgattgacaaagagaatgatcaattaaaatcggaaggcaaagaacctaatttccagtttgatgaaatacgaattgaattggctcgtgaattaaagaaaaatgctgccgaaagagctgaaatgacgaccaatatcaatacggcaaaaacagctcacgagaaaatagttaaacttttacaagcagaatttggattaaaaaatccaactcggaatgatattgttcgctataaattgtatgaagaattaaaaaacaacggctacaaagatttatacaccgatacttacatcccaagggaaattttgtttagtaaacaggtggacattgaacacattattccacaatctcgtttatttgatgatagtttctctaataaaaccgtagtatatcgaaaagataatttggataaaggaaatcaaactgctattgaatacattgaaaataaatttggtgaaactggattaatttctttccaagaaagaattgaagctcttcataagatgtggaacaaaaacaatcctgaaaatggtattacaaaagcaaaatatcaaaaattactaaaacgttcttctgaaattggcgaaggatttattgagcgagatttgcgagatagccaatacattgcaaaaaaagcaaaagaaatgttgtttggtattacccgttctgtggtttctacttcgggacaaattacagataggctgcgagaagattgggatttggtaaatattatgaaagaactcaacttgccaaaataccgagcattaggcttgaccgaaatggaagaacgaaaatatgggcaaaaggttgaagtgattaaagattggaccaagcgaaatgaccaccgccatcacgcaatggatgctttgactattgcttttaccaaaagaagttttatccaatatttgaataacttgaatgcccgaagaaatgagaaatcggatgatacgattagtaattctaaaggtagaaccagtatggatacgtctaacctaaaattatcaactcgtgatgttttaggtattgaagagaaagaaacaattattagaactgatgaccaaggcaataaaaaacgagtattcaaagaaccgattaccaatttccgccaagtagccaaagagcatttggaaaatgtaattgtatcccacaaagctaaaaataaagtagttacaaaaaacaagaataaagtaagaggttcaaataaagtgcaagaagcattaactcctcgagggcaattacacaaagaaaccgtttatggcaaataccagtattacgtacaaaaagaagaaaaagtaggtgctaaatttgataaagaaaccattgataaagtaggtaatcctttatacaaaaaacttctattgcaacgcttagaagaatacggcaacgattctaaaaaagcatttacaggaaaaaataccctagagaaaaatccaatttacttaaatgtagaaaaaacagaagtgctgcctgaaaaagtaaaattggtttggttggaagaggattattctattcgtaaagatgtaacaccagatttgaaaattgacaaagtaattgacaagggtgtgagaacagttttggaaaatcgtttgaaagaatttggaggagatgcaaaaaaagccttctctgatttagataaaaatcctatttggctcaacaaagaaaaaggaattgctattaaaagagttaccataagcggtgtaagtaatgccgaagctttgcattacaaaaaagaccattttggaaaaccaattttagatgcaaatggcaataaaattgcggttgattatgtacaaaccggcaataaccaccatgtggcggtgtacagagatgaaaaaggaaatttacaggaaagagttgtatctttgtttgaagcagtggctcgagtgaatttaggattacccattattgataaaacctacaaacaaagtgaaggttggcagtttttatttaccatgaaacaaaatgaactctttgttttccccaatgaaaaaactggttttaatcctgcagatatagatttattagatcctaaaaacaaaaagctgattagcccaaatttatttagggtgcagaaaattgcaaataaaaattatttctttagacatcatttagagactactgtagatactaacccagcattaaaagatgtaacatataagcctcagttaggattaaatgctattgaaggaataatcaaagttcgcaccaatcatttgggagatattattggggtgggagagtattaattattagagtaaaataagaaaagtaaaaaaacagtaactttaaaactaaagaaaaatagataaaaccatgtcacacaaactaaaaattacgctacaacacagcgaacctaaaattaccagaacagtaattattcctgaagatttcagttttcaccagctgcataccgttatccaatgtgtgatgaactgggataatgcccatctgtaccagttcaataccggtgcggctttcagaagcgataccattgcattggaagatgaagaagatgaagaagatgatttcggattttcatttaattctttcaaaaaaattaattccgaggaaaccaaagtgtcagactatttcaataataaccttaaaaaaatgttatacatttatgattttggagatgattggcgacatattatttctgtgcagaaaaaacctacagaagatgtgttgtttcccaaatgcgtgaaaggagcaaatgctgccccgatggaagattgcggtggtatttggagacatgagaatcttttggaaatttctcaaaaaaaaagaaaatctgccgaagaaaaagaaatgttagcatggtatggaatacctactgacaaaacttttgaagaggtttatccttttgatattgatacggttaataaaattttattgaaagttttttcttcttaatataaattccaaaataccatgatcactcgctccatctacatcggtaatccggcttatctcaaactcaaagatgaacaaatgtacattctccaccctgagactaaagaagtgaaaggcaaagtctctatagaagatctcggactgttgatgttagaccattttcagattacgctcacccatcaactcatacaatccatgatggaaaataatgtagtggtcatcagttgcaatttttatcatctgccacatggcatcatgttacccttatatggacataccgaacattctcaaaagatcaaagcacaaatagaagccagcgaacctcttaaaaagcaactttggaaacaaactgtagaatataaaattaaaaatcaaaaagaggttttacttagaagaggtaattattttgaacccatgctaaaataccttcaacaagtgaaatctggagattctaccaacatggaagggattgcagcccaacattattggaaataccttatcagcttagattttatccgagatcggtatggtgattaccccaattctttttttaattttggatactccgtccttagaagcattattgccagagccattgtggaagcgggtttacttcctgttttaggcatctttcataaaaataaatacaatccgtattgtttggcagatgatcttatggaaccctatcgtccttttgtagattttttagtgatgaattggttagagcaaaatccaatggtggacgacctgaccaaagaatttaaagcagcttgcctcaacatcgcctccctagatgtagagattgatggaaaaaaaagaccattattggttgcggtaaagacgactgcttcttcattgtacaaatgttatacaggagaaaaaagacaaatcgcttatcctgaattgaaatgaattcagaacgattaaatgcttatagaattatgtgggtaatggtcttatatgatttgccaaccgaaaccaaagtcatgcggaaagcagccaatcttttccgtaagaaactggaagatgatggttttgcactgtttcaattttccatttacatacggcattgtcccagtcgggaaaatgccgaagtacacatcaaaagagtgaaagctattttgcccaaagccggaaaagtggccattatgtgcatcaccgacaaacaatttggcgacattgaaatcttttttgcccgatccaaagaagaaccaccacccacttggcaacaattagagcttttttagaatcttaaaaatgattgttttaaagagaaacggaatcaaaattatccaactcttttcttatcaagaattcagcgaaaagaaggaaagaagccaaagcaattcataagtgtagggaattttgtagttacataccttttaagttagatgttttcttttctaattcatcttatattatttaggtaattaaaaaaatgtatattcgtaaagggaaagtgagaaggttctaatccaaccagcactcagacttcctattaaggcagagaaataaaactctgtcttttttacgaagtttaaaaatagttatacgataatgaaatactgactatggcgtccctaaacaagatagtctatgatatatagcgtattaaagaagctggccaaaaggacagcttcttcttgtaaccaagcattggaagaggaggataagtccgcccaatgtcgctgttattatacaaatatacaaaacttattgaggaccaaataggtattatttgatagttgcgaaaatgaaaataaaccatcaaagaagttcttcaaacatcatattttaaaaaaagaagctgataaaagatataaatatagtttagaattaaacagccagatgaaatttggttaaatattttggataataaaactaaaacatacatgaaaaactacgaaagaggtgtgttaaaaatagttgtaaataaagacaatgtagctgaaagtttttattttattgaaaagaatgatccatcactaaacaataaaattggccaaataagggatctgttccaaaacttgggggaaaaagaattttcttcattagttactacttgtcacatagaaaataggatatattaattagatgtataattcagcccgcggtttaaaccgcgggctatggagcaaaattgtttttgtttgggttgagaaaaagaattttatccgataagatatgttgggttaaaagaagggtattaaaatttcatattttgacagcaaaaataatttatattctccaagaatttttatttgattacttttgtttaatcccccaagttttgaccttgatcccaaataagaaaaggaatactaatgtttagaaactaaaaaacgaaccattatggttcgtttctattaatgcgctacatgttatagaccgatctgttgaggaacgccataaccagcacttcattaacattacaaatatacaaaattttttaattaccaaataacacacgaggaattttataaacaaatcgaaaaaaaagcatccgagcttaaaaattatgcgacgacaagattttcttcaaaagccagaaacattgctttgcggttcatcaacggtaattttagagctcaaggttttcaaggaaacacttttaaaagatggaaacctaagttacgagacatatcaaatttaaaaattttgaaatccttgatgcatgaattgatcttataggtagaaatctaatttcatcaaggattcagcgaaaagcgatggaaaagtttgggctgagctaaagcaattcatctaaattaggattagaaaatcaacttatttcttagaaaaaacagatgatatcattattttttttaattgaaaaaaatcaaatcaattaactgaatttcagttaattgatttgattgaggttgcgacacatcgcgaatttaaaaattttgaaagcaattcacaactagagaaaagtctagtgaaagaagggaaatgttgcgacacatcgcgaatttaaaaattttgaaagcaattcacaacaaaaaccaacaagcctactaaggcacttgagttgcgacacatcgcgaatttaaaaattttgaaagcaattcacaactggaaacacggtattaatccaaattcctctgttgcgacacatcgcgaatttaaaaattttgaaagcaattcacaactgaagcaggttattgattttcaaagtaagtgttgcgacacatcgcgaatttaaaaattttgaaagcaattcacaacgaatgaattaacatgttctaatgcttcattgttgcgacacatcgcgaatttaaaaattttgaaagcaattcacaacagcggtttaaactcgaaggagttagcaaaagttgcgacacatcgcgaatttaaaaattttgaaagcaattcacaacctgcaatgattttacagtgaagagaataaagttgcgacacatcgcgaatttaaaaattttgaaagcaattcacaacaaatattaaaaaaataaaataatggaaaatgttgcgacacatcgcgaatttaaaaattttgaaagcaattcacaactctttcttctgccggaataatattttgtaagttgcgacacatcgcgaatttaaaaattttgaaagcaattcacaactttgtgagtattcgcaccaataaagccaatgttgcgacacatcgcgaatttaaaaattttgaaagcaattcacaacttttgcttcaaaatttaccgtgtaactttggttgcgacacatcgcgaatttaaaaattttgaaagcaattcacaacaacagaggaaaaattatcagtatatgtattgttgcgacacatcgcgaatttaaaaattttgaaagcaattcacaactataacgatctgattatgaatgataaaattgttgcgacacatcgcgaatttaaaaattttgaaagcaattcacaacgacagatggagtattaaacccttatttgttgttgcgacacatcgcgaatttaaaaattttgaaagcaattcacaacattatgttagaggtgatggtaaagtattgagttgcgacacatcgcgaatttaaaaattttgaaagcaattcacaacgggagcagaaaaattcactctatatccaccgttgcgacacatcgcgaatttaaaaattttgaaagcaattcacaacatgtgatttaattaatgtaaatcttaaactgttgcgacacatcgcgaatttaaaaattttgaaagcaattcacaaccatctttgatttctctgatcagttttagaggttgcgacacatcgcgaatttaaaaattttgaaagcaattcacaactacttttccttctgctgtttttctggtaatgttgcgacacatcgcgaatttaaaaattttgaaagcaattcacaacatgagcataaacctcatatatttttgccccgttgcgacacatcgcgaatttaaaaattttgaaagcaattcacaacagtcttgaattttatttgaaatctaaataagttgcgacacatcgcgaatttaaaaattttgaaagcaattcacaacagtttggcaagactaaataaattcttgatagttgcgacacatcgcgaatttaaaaattttgaaatccttgatgcttgaattgattttataggcagaaatctaattatatcaaggattcagcgaaaagcagtgggaaagaaaaggctgagctaaagcaattcacaacttggtttgtagacggcacgccaaataagaatataacaacgcaatgagctgataagagcttttttctctcaactggagaaaaagaaccccaattggtgtttgtcggttcttttggtagaaacggcaaataaaaacttttcgtcattgtcggtaaacatcgtgtcagccatccttaaccacaacggcatctacaacgatctgaaagaccaaccaaaaatgctaagtttgtctgatgagatatagataatagttgtatattcgcaaggtcagacatacttctgtcgggtgttcctcagggatgaattgttttagaattaatattgtttttcgaataaattctattcttaatccttaacatatcgataggtattaattcgctattgtaatgcaatccaaatactaaaaaactccctcaaagtctgtgctttgggggagttttgttgttttgaatcttcaaaaaaagtaagaattttgaagaactgaatggacggtagtggttctaaaaattgtaaatccttacggttttgtttgagatttcattgatgatttcatcaaattgcgagtcataaggaaaaggtaaattggcattgtaaattttcccttcaggatctaccaacataaatcttgggataccgttgatgcccaatagttgcataatttctttgttttttagccacatttgtactgccttggatttgttgttttttacattcatcttccaattgtttttattttcatcaacacttagggagaggaagaccaaattgttgttgtagctgtactgtttggccagatattcaaattttggtttggtctctcggcacggtccacaccaagtggcccaaaaatcgatgactacatatttgcctttgtattttttcaggtcaaaggatttgcccaatgcatcttcaaaagttattgtaggcattggttttcctttttgttggttgttgatgacgaataattctttggctacaaaatctctaaatcgggtatccgaaaactcattcatcctgctttcaaaaagttgatttctcttgttttcgtcgttggtcatctcaaaataactgagcaattgggttttcaaaagtcggtctttttctttgcttttcggcatcgtgttcagcttggccatgatggtgctgtccggatttttggatccttcttttggcagcaattggttcagtttcatttttgtgaaatctttggaagccattagcatttctgttggattttttatgatttcgttcagctctttggttagtgctgtaggtgcagcattcttcttgtcattggctaaagaaatggtctggaaatcgtgcagcgcattgatcatttttgctgcatttttctgcttcatgtattcgtaaaaatctcttccaaaataaatgttttcttcggttctgtactggtctaagtgttttttgctgtcgttccattctttttctgctgcgtcatagaaatattcgggcttgtccaaatattcttctttgttgtttacaaaataactgtagaattgcccttcattcatttgctgttttaggtaattaaattcagcatttctactgccagtaatatttacttcagactgtttttcatcggcattaaattgtattttcaaatgatcccctttggacaaaattgctccaaatttattaccacccaaattgaaagtatattcgcctaaaggtaaattttcggtactttcccaaaagaattttccgtttttaataggaattttggcaacaggtaagttgagctcgttagaatacaggctgatttctttatgcttttttaccgtatttacggtgccttctatgatggtttttccgtccaacttttcagggtatatcgggcttgtgattccaaaatatattccaacagcaacagtcagtcccaccaaggtttttgcaatggtttttccatttttaaaaaaagcagcttttacaccacggttggcatagattgtatagccgataacgaaaaacaaaactgcccaaaaaatactgagatactccgtgtaattcaggaaatgactcatcatcgaagagtcttttagtttgacagctgtagccaaattgttgtacgggatatagtcgtaggtttcttgcctgatttgaccggtgatgttgatgacaaatcccataactccaataacaaaaggccagataaatcctcgaataactacagaaagcatcagttgtagcgagacaatccctaaagataaaatgatcaaacgaatgtaagtgtggatgatgaaggagaaatctatgcttaaactcaatgctttttgagggaagattagttgttgtaaagaactgattgcaacggatgatacaataaaagtagtgatgcaaatgagggttaaagtcattgcagaaagaaattttccggtataaatgctcaacttactcagtggttgagattccataaaaacccaaccgttgtttttatggtcggtttggcaaattctaatggcagcaatgatgatgaaaataaccatcatgaaacttccaaacccggaaaaaaaagtttgtatggactctgtggacacttcggaaggaagtcctgtgtattctctggcttcttcaacaaaaagagatacggtgagcagtatcagagggagcaatgctccaaggattatggataaaataagcaatcccaaacctttggttttcagccattcggatttgaaggcttttataaaataattgatgttcattttttgtgtattagttttgttttgtaatttccataaaccattcttctagacctcctacggcagatatttggtagatttctgctcctttttcaattaaggttttgttaatttttgccacatctgcagaactgttggtgttcaccaaaagctctcggttgtttttcagttcagcattttcgacatatggcaaatatttttcggcatcgttcatggagaattttgtcttttgaaattgaaacatttggttcagctcttctcggctgccttcaaatttcatttcaccatgagagatgatgcccaaatgcgtcaccatcttgtcgatttcttgtaaaagatgactcgaaataaatatggtagtgcctttttcacggtttagttttaccaaaagttcacggatttccatcattccgttgggatcaaggccgtttacaggttcgtccaaaatcagtaattcaggatcagaaatcaacgctaagccaatggccaatctctgtttcattcccaaagaatattttttcattttgatgtctttggcttcggaaagtcctatgagttctaatgtttctgtgattttagattcactcagatttcggatttcacaaacaattttcagattgtcataacccgaaagatgatcgtaaaaagcagggtagtcgatcaatgaaccgatattttttaatccttccgggaaaaatgaggataccgaatttccaaaaagttttatgctgtcgtttgcctcgttttccagtcccataatcagcttcatggtggtggattttcctgcgccattggctcccaaaaaaccgtaaatagaaccttttggaactgagaggttaatgttcttcagaatctgctttttagcgtcaaatccaaaattaagattcgagatttctatgatgtttttcatgaataattttaaaatattagtccgtatattaatctaattgttacaatttgttgtgttttttttaataaattattattttgaactaatcgtataaaagggtagtaaatattttataatttccttaaatttgcaatcttataaaaatcaacatttaacaaatggtttcgggcaaccgacaacagctaaaataaattatgacttcacaagaaattcgccaaaaatttttagattatttccaaagcaaaggtcacctcattgttccttcggcacccatcgtcctgaaagacgatccaaccctgatgttttccaactccggaatgacgcagttcaaagattatttcttgggctacaaagagcctaaagcacctaggattgcagatactcaaaaatgtcttagggtttccggtaaacacaacgatttggacgatgtgggcagagatacctaccaccacaccatgttcgagatgcttggaaactggtcttttggtgattattttaaaaaagaagccattggttttgcttgggaattgctaaccgaagtctataaaatcccgaaagaaaatctctatgtaaccatcttcgaaggcgatgataaagaaaacctagaaagagaccaagatgcctacaacttctggaaagaacatattgccgaagatagaatcatcaacggaaacaagaaagataatttctgggaaatgggcgaatccggaccttgtggaccttgctcagaaatccatgttgaccttagatccgaagaggaaaaaaccaaagtttcaggcttgtctttggttaataacgaccatcctcaagtggtggaaatctggaacaatgtattcatggaattcaaccgtaaagccgacggaactttagaaaaacttcctgctcagcatgtggataccggaatgggcttcgagagattgtgcatggctttgcaaggcaaaacttccaactacgataccgatgtttttacaccgcttatcgctaaagttgaaggcttgaccggaaaaaaatacgag

SEQ ID NO: 2091 - DNA, 24449 bp, synthetic construct
  misc_feature 1..24449: note = Synthetic
  source 1..24449: mol_type = other DNA
cgaaggagccgaacagtatggagcattaccttttattacaggcacactgttaaccacgctattggctcttcttttttgtattcctttttcactacccgtagccttctttgtcggagaatatttcaagggttcgcgagttgcatccatattgagtaccgtaactgatttgctggcaggcattccatctattatatatggtctatggggcttctacaccttgcgtcccgtcatcataaccctcaatatttctccgcaaggctccgggattcttaccgcctctttggtgttggccattatgattgttccttatgctgcatcactcagcgctgaatttattaaaatggtaccgaacgatttgaaagaaagtgcatatagtcttggtgctacccgtgccgaggtggttcgcaagataatatttcccgtagcaggttcgggaatattttcatcgtatatattagccatcggacgtgcattgggcgaaacaatgactgtaacaatgctgattggtaacaccaataatattcctacttctattacctccacaggtaattctatggcttcaattattgcgaatcaatttggagaggctgacggcttacgactttcatccttgattgccatcggtcttatcctgtttcttatcacggcggtaatcaacatgataggtaaaatgatgattaaacgcgcaagaatctcttaatatggcaaatcaaaaaataaaacatcgtttagcaaaagacaagttgatgctgtggacgatatgcattttcgccacacttacggctgtgcctctgtttgctatactgggagaagtcctgttgcgcggttatagtcaactgtcgtggtctttctttacagaacctaccccaacagcctacaaggcaatgaaagccatagaggcaggtgaaccaatacccggaggtattgccaatggtattgtcggtacaatgataatccttagtatggctgtcgttgtagctgtccctgtcggtattctatgcggcacattcctggcagaaaacagaaaaaagcgttttgcaaagattgtcagttacctgacagacctcgtgcaaggcatcccatcagtaattatcggtatcatcacctacatctggatagttgttccgatgaaaggttattcggcaattgctggcagtgtggcactctgcatcatgatgttaccactcattattcgttcaacggaagaaactttgaaaatccttcctgcttcactgaaggaagcaggtttggcacttggaggcaataaggcacgtgtgatgatgaaagttcagcttcctgcagcattcggcggtatatttacaggcgtactgctcgccatttcaagggttattggcgagactgcaccgcttatgtttaccgctttgggctgttctttcatccgttggtctatcaataagcctatatcggcagtaccgctactcatttgggaatttttcaacgatccccatcttcaagagttgatttggggtgcatcgcttttccttttaatatttgttctcacgttgaatcttacagctaaatatcttgcaaagaaatggaatcaataatacctatacttgaatttaaaaagacttgcgtatcctataccaagcagacgatggcagtaaaatatgtatcggctgctattgagcggaataccatcacagccattatgggaccttcgggttgtggaaaatctaccttgcttcgtgcggtgaaccttatgcacaatctctactcgaatatccgtgttgatggtgaaattttgcttaatggggagaatatcctattaatggaaccgattgatgtacgtcgtcgtgttggtatggtttttcaacgccctgcaccctttcctacaatgagcatttatgacaatgtcttggcgggatttgctttgaacggtatccacttgtcaaaatccaagaaagatgaaatagtagaaagcaatttgaaaaatgtggtgctatgggacgaagtaaaagatgtgttgaataaaaaaggcaccttcctttcgggtggtcagcaacagcgattatgtattgcccgtgcgttggctatgaagcccgatattttgctgatggatgaaccgacttccgcacttgaccctattgcaaccaaacgtattgaagaattacttctggaactccaaaagaaggtcacaattctggttgttactcacaatatgggacaagcaaagcgcatttcttcccgctcaatgtttatgtatttaggtgaacttgtggaatacggggacactgaaacaatgttctccaatcctgaacatgaacgaacaaaggcatacctgataggtaagataggataagtaccccactatcccctatcctaatccaacgtttttcgcacttcagtttcctcaaaactttcgatgatgtcacctactttgatatcgttgaagtttttaatattcaatccacattcaaagttagttcccacttctttcacatcttctttaaatcgtttcaaggattctagctcacccgtatagattacgatcccgtcacgaatgacatgtactttattatttcttttaacctttccttcccgcacgatacatccggcaattgtaccgactttagtgattttgaaaatttcacgtacttcgatggtagcagtaacctcttctttaatttccggagaaagcataccctccatcgctgatttgatttcttctattgcatcgtaaatcactgagtacaagcgaatatcgatttcttcctgttcagccatctttcgtgccgatgcagtaggacgcacctggaaaccacagatgatggcattggatgcggcagctaataagatatctgaatcagacacagctccaacagctttgtgaatcacattcacctgaatattttctgttgacagattttgcagggaatcggcaagagcctctacagagccatccacatctcccttaacaatgatgttcaattctttaaaatcacctaatgcgatgcgacgacctaactcatccaaagtaaagtgtttcctggtccgaatatcctgttcacgctgcaattgctcgcgtttattggcaatttctctcgcttcatgctcagtaggaatcacattgaaattatcgcctgcctgcggtgcaccattcaaaccaaggatcaatgcgggttctgcgggtcttgcttcttcaatgcgctgattacgctcattaaacatagctttgattcgtccataataagtaccggctaaaacaatatcacccattttaagagtaccgttttctaccaatacagtggcaacataaccccttcctctatccaaagaagattctatgattgaccccacggcacgtcgggaaggattggcttttaattcaagcaattcagcttcaagcaacactttttcaagcaattctgccataccgatacctttctttgcagaaatatcctgcgattgatatttgcctccccactcttctaccaaataattcatattagccaaggcttctttgattttatcaggatttgcactcggcttatcaatcttattaatggcaaaaacaataggaacaccggcagcagaagcatggttgatcgcctcaacagtttgcggcatcacactgtcatcagctgcaacaataataatggcaatgtcggtcactttggcacctctcgcgcgcatagctgtaaaagcctcatgaccgggagtatccaggaaagtaatgcgttgcccgttatctaattttacattgtaggctccaatatgttgtgtaattcctccggcttcaccggcaattacgttcgttttacgtatgtagtcaagcaaagaagttttaccatggtcaacgtgccccatcacagttacaataggtgctcgttgttccaaatcctcctcccgatccggctcatcatctccaattgcctccaccacatctgcactgatgaactctgtcgtaaacccaaattcatcagcaacgatattgatggtttcagcatccaggcgttgattgatggacaccatcacacctatgctcatacaagtagcaataacctgattgacagaaacatccatcatcacagccaattcgctcacggttacgaactccgtaagttttaatatcttttcctgttgacgttcttgaatttccaattcagtctgacgtgcagacgcactatctcttttctctctacggtacttagctcccttgctgcttctttttctacccgaagctgccattctggcaagtgtttccttgatctgacgttctacttcctcctggtcaacagcagttttcaaaggctttcttaatttgtctttatccactttaggagtaccgcctcgtgagtcggatcttctctgttgttcttccggaaaatattcaacatcaatcttttgagtagaaaatctttctcgtttctttctctttttgctgtcctcacgtttatccaaaaaggctttcttgttttcaagagctaatctggacttttcttctctctctctctttttctgctctcgtgttttggctttaggacgagttgtttgattgatggcatccaaatccaactcacctttaatttttatattgatgtcgggagtgggaatggaaacagaaaacaatttctcttcttcggattcttctgtgtcttctacttccaatttttcctcttttacgtcttcaacctgttctaccggctcaactgccaccgcagatttcggtttagatttgggtttcggtttagccggaacagcaactgcatcttcttcaacatcctttttttgttcttcctttatttgagcagcagatactgtttctttcacagaagccttcttaacttccttaacttctttaacttccttagctttcttaacttcttccttcttagctttcggatcctccaattcaatcgtaccaacatgttttagtttgaacaagcgatccgttggggtttcagcagtaaatatttcttccggtttttcttcaggtgcttgatctccatacccttccaaagcgacagtcgccgctttttccttttgaagacgctcctgagtcatacgctctgcctctaatttcaatgccatatctttattgaactctttggccaacagcaaatacaaatcatccgacaacctgtaattagggtcagcatcgattttattacctttcttggccaaaaaatctacaacggtagagataccgatattcaattctttgcaagctttaattagtctaataggcatattatatatagtatattatattttaacgtttgacaaatagaaactttctcggctatttagctgttactctttttgattgtcttcttgattatctttttcttgaattttctcctgaacttcttcctgttcttctgtttgaatttctttttgctcctcagtttgctcttcctcttgaatttcttctacactttcctcttctgaatcagtatcctggcttccctcttgaactccttcctgagtttcttcctgataatattcctcatcttcaaattcagcccgcaatattgccaaggcttcatctatggtttcttcctcaagatcagttcttctgattaaatcctgacgtggcacggccaacacacttttagcagtgtcgtatccgatatttttaaacacatcgataacccactgttcaatttcatcattgaactcatccaagtagatatcttctgtttcttcctcttcatcaagttcacggtacacatccaatgtatatccggtgagcatgcttgcaagtttaatattcaagccacctttcccgatagccaaagaaacttcttccggtctcatgtaaatttcggctctttgttctgcctcattgagacggatggaggatattcttgccggactcaaagaacgctgaatgaataaactgatgttattcgtataattaacaacatcaatattttcattgcgtaattccctaacaatcccgtggatacgcgatcctttaacgcccacgcaagctcctaccggatcaaccctatcatcataagattcaacagctactttagctctttctcccggcatacgggcaatttttttgatggttatcaaaccttcattgatttccgggacttcaagttcaaataatctttctaaaaagaccggtgagaccctggaaagtatgattttcggattgttgtttttattctcaaccatggctaccactgcacgcacggtatctcccttgcgataaaagtcggttggtatctgttccgattttggcaaatacaactcattgccttcttcgtccaacaacaacatttcttttttccaaatctgatatagttcggcatttacaatctgtccgactttttcgctgtattttgtaaaaacattttccttttgtaattctaatatttttgaagacaaggtctgtctgagattcaaaattgccctgcgaccaaaactcataaaatcaagtgcatccgtcacttcttcacccacttcaaagtcctcatccactttttgagcttcggacaatttgatttgtgtattttcatcttcaaactcatcatcttctaccacaatgcggttgcgatatatctcaaagtcacctttatctggattgataattacatcaaaattatcatcactgccgaacattttggagataacgcttctgaaggattcttccatcacagctatcagcgtcatcctatcaataccttttaattctttaaattctgaaaaagtatctatcaaattaatagtttcttttttgcccatgtttttatttgaatctaataatcagttttgttgttttaatatctttaaaagttaaatatacatcctcatgaacagtggttttacgttttgcaccttcgggttttatcatttgcgtggtcgtcaactgaataccttcatcggtaacagacttcaatactccactgagttttctaccttgaacagtaaccacatccacctctttactcacatgtttcaaatactgttgatgaattttgaaaggagaaccaataccggcagagctaacttccaactcatagtcttcctcatccctgtctaagtttgaatgaataaatcttgttaaatcagcacaatcatcaatactgactccctcaaaggaatcaatttcaattttgatgcgattgtcaggagcaatattcaggtccacaagaaacaactctttctcatgcgtatactctctaaccaactgatttacaaaatctttatctatcattattttgtttcttccaataacaaaggggacattcagtcccctccacacttcattaatcggttgcaaagataatattttttatattaaaaacaaattgtttgttttttatctttcaacgtattgcttctgataataagactgatattgaccggaagtaacatgatccatccattcttgattatccaaataccacgttactgttttttccagcccttcctcaaactgcaaagagggattccatcctaactcttccgacaatttggtgggatcaatggcatagcgcaaatcatgtcctgccctgtctttcacaaaagtaatcagctttgcggactctccgggctgacggcctaattttttgtccatgattttacacaacatacggatcaaatctatattcgtccattcattgtgaccaccaatattataggtttcaccattctttccattatgataaatcacatctatcgcctgtgcgtgatcgtttacccataaccagtcgcgcacattttcacctttcccatagatagggatgggcttgttatttttaatattatgaatagccagcggaattaacttctccggaaactgatgcgaaccataattatttgaacagttggaaatcacaatgggcaatccgtatgtgtggtaataggcacgcacaaaatgatcggaagaggctttggcagccgagtacggacttctgggatcataggcggtttcttcagtaaagaatccggtatcgcccaaagaaccatatacttcatcagtggacacatgataaaacagtttccccttcatattgtctttccaggcatttttggcagcattcagcaaatttgtcgtgccaaaaacattcgttctcacaaaagcaaagggatcggtaattgacctgtctacgtgcgattcagccgccagatgaatgactccgtcaaattgatatttggcaaacaactcaggaaccaatacttcatctgtaatatcacctttgacaaaagtataattaggcaatttttcaatatcccgcaagttttccaaattgcctgcatacgtcagaacatccaaatttacaatgtgatattcaggatatttagtcacaaaaagtcgcaccacgtgcgaaccgataaagccggcacctccggtaatcaataatgttttcaatgtcgaatgatttatagttgatactgatataattaacgtattacattagattatattacccgtacgaataatctttgcaaaattagttaaatatttctgaatataaaaagcttcttcaggaaacaatgaagcatgaccttattttcaaaaaaatcaagtacatttgcaagaaacgaaaaaagatatgcaacctttagcggaacgtatgcgcccccagacattggatggatttgtcggtcagaaacatttggtcggtgaaggagccattttgcgccaaatgatagagtccggacatattgcatcttttatcatgtggggaccgccgggcgtaggaaaaacgactttagcaaagattattgccaagcaattggatcatcctttttacgttttgagtgccgttacctccggtgtaaaagatgtcagagaagtcatagaaaaggcaaaatccaaccgcttattcactcaaggaaaaagaccgatattgttcatagatgaaatacatcgtttcagtaaatcgcaacaggactctctgttgggagcggttgagaacggtaccattaccttgatcggcgccaccaccgaaaatccgtcttttgaagttatcactcccctactctcccgctgtcaggtatatatactgaagccattggatgatgaagacttattggaactgctgcaccgcgttatcaaaacagatgaacggttaaaaaacttagatattcaagttgatgaaactgaagccattttacgttttgcaggaggtgatgcccgcaaattattaaacatcattgagcttgtcagctcttccaatcaggacgaaaccatccatctgaccaatgccgttgtcacagagaaattgcaacaaaatcccatggcttacgacaaggatggagaaatacattacgacatcatttccgcttatatcaagtccatccgcggcagcgaccccgacgccgccatctattggctggcacgcatgattgccggcggcgaagaccccaaattcatagcacgcagattggtcattgccgcagccgaagatataggattagccaaccccaatgccttgctgttagccaatgcttgtttcgatgccctgcagaaaatcggttggcccgaaggcaggatcatcttagcagaaaccaccatctatttagccgcatccccaaaaagcaattcagcctacctggccatcgacgatgccctggctttggtagaagagaccggtaacctgcctgtacccctacatttacgaaatgcccccaccaaattgatgaaagacttgaactacggtgctgattacaaatactcccacgattaccccaaccatttcgtcaaacagcaatttatgcccgataaattgatcgatcaccgcatctggaaagtgcaggaaaacacggccgaaaagaaattgggagattggttgaaggggttgtgggggaaaaagtaatgccccgcagataggcgaggcgctaaatgttttcacaacggaataatccttattgtgaattgcttcaaaaattgtgaggcaaatataggtatgtttgtttaaatctccaaatatttggggaaataaaataaaacatttaatttcaaagcctgaaatttaacatcaaaaaacaaactgattaacatcaaaatatcatgaagagaatattaggattggatttaggaattaccagcattggttttgcgtatgtgacagaaggaaaaacaccggaagaatcatctatcgttcaaataggagtcagggtaaaccctttgactgtagatgaacaaactaattttgaaaaaggcaaacctattacaacaaatgcggaaagaacacaaaaacgtggagctagaagaaatttagatcgataccagctccgaagaagtaatttgattgaaaccctcacagatgccaaaatcatttctaccgaaacccctttgacagaaataggcaaggatagtaccttcgatacttggaggcttcgttctaaagctgctacggataaaattgaaaaagaagaatttgcacgcgtactgctagcaatcaataaaaagcggggttataaaagcagtcgaaaagccaaaaataaagatgaagatgaaggacagataatagacgggatggaagttgcaaaacgtctttatgatgaaaacatcactccgggacaactagttttccagatgcttcaaaaggggaaaaaatacattcctgatttttatcgttctgatttacaagctgagtttaacaatatttggaaatttcaaaaacaatttcaccccgatattctcaccgacgaattttacgaagaacttcaagggaagggtcaaagagcaacatcagctttattttggtctaaataccaatttaacacagctgatatcaaagatattgaagacagcttaaaaactgtagatactatcaaactaaacaatagagaaaagaaaagattgcaagcctacaaatggcgaaatgacgctatttcaacacaattaggtaaggaagaattagcctatgttattacagaaataaataataatctcaaaaactcaagtggttatttgggtgctatctctgatcggagtaaagaactatatttcaacaaagaaacagtagggcaaaatcaatataagcagcttttaaaaaatcgtcacacctctttgaaaaatcaggttttttacagacaagattatttggatgaatttgaagctatttggacagaacaagcaaaacaccatcccgaactaacgcaagaactaaaagctgaaattcgtgatattatcatattttatcaacgaaagctcaaatctcaaaagggattaatttcattttgtgaatttgaagtgaaagaaattgaagttaatggtaaaaagaaaactattggcttacgtgttgttcctaagtcatcgccgttattccaagagttcaaaatctggcaaaatctacataatgtagttgttagaaaaaaaggaaccaaaaagagactgacaaaggaccctaatcaggcactactttttggagatgaaaaagaaatattcatccttgatcaagacgcaaaacaatacctttttaatgaactgaatataaagggaaatctttctgcaagctctaccattgaattattgggttataaaccggcggactgggaaattaattactcagaattagaaggaaatagaaccaataaagcactttacgaagcctttttaaaaataattgaatcagaaggctatgatgtaaaagaactactgaaagttaaatcaaacagggatgagattgaactaaacgacattaaagtttcagctgacgaaattaagtccatggtcaaagaaatattcaagtccttaaatatcaacacaaaaatattagattttaacgctgaattggatggaaaggaatttgaaaaacaagcttcatatcaattgtggcatttgttgtactcctacgagggagatgattctgccagtggcaatgaaaagttgtatcagttattagaggcaaagtttggatttaaacgtgaacatgcacaaatacttgcaaacatcgctttacaagaagactacggaaatctttctactaaagcaatgagggctatttacccttatatcatagaaaatcaatacagcacagcttgtgaatttgccggttatcgccactccaaacactcattgacaaaagaggagatagaaaaacgtgaattgaaaagtaagttagagttattgcctaaaaatagcttgagaaatcctgtggtagaaaagattcttaatcaacttgtcaatgtagttaacactattgtagacaaagaaaatgataaattagagtcggagggaaaaccacgtgattttcactttgatgaaatcaggattgagttagcacgtgaattaaagaaaaatgcacaagagcgggcagaaatgaccacaaacatcaatgcggcgaaaataattcatgaaaaaattgctaaacttctacaatcagaatttaacattcaaaatcccacccgaaacgacatcatccgttatcgtctttatgaagaattaaaaaacaacggctacaaagatttatatactgacacatatatcccaagagaaagattatttagcaaagacattgatgttgaacacatcataccacaagctaaagtttttgataacagttattccaacaaaaccttagtttaccgagatatcaatcttaaaaaaagcaatcaaacagcatatgattttattgctactgagtttggagaagaagggttaaaaaggttcgaacaacgtatttctaatttatttgaattcggcaaaaaaaataaagatgaaggaatttcaaaagcaaaatatcataaattattgaaaacagagtctcaaattggtgatggttttattgaaagagacttgagagacagccaatatattgctaaaaaagccaaagaattattgtttcagattacaccatcagtattaacaactaccggtagtattactgatagattgcgtgaagattgggatttaataaacatcatgaaagaactaaatcttcccaaatatagggcattaggtcttactgaaatggaagaacgaaaatacggacaacaagttgaagttattaaagattggactaaacgcaacgatcacagacaccatgctatggacgcactaacaattgcttttacaaaacgtagttacattcagtacttaaacaacttaaatgctcgcagtaaggacagttcatggcaaaacataagcaataaagacgatagttattcaattgagacgtcggacttaaaaatctcgacaagagatgtaatggggattgaagctaatgagcttcatcgcgataaagacggtaaacttcgctttaatctacccattccaaacttccgtcaagaagctaaagaacatttggaaaacatcatcatttcacataaagcaaaaaacaaagtaattaccaaaaacaaaaacaagattaatacaaaaaatggtaaactgactaagattgaacttacaccaagaggacaacttcacaaagaaaccgtgtatggacaatatcaattttatcaaactaaggaagaaaaaatagggacaaagtttgatgaagctaccatcatgaaagtcagcaaatcagaatatcgcaatgctttacttaagcgactttatgaaaacgaaaacgatcctaaaaaagcctttggaggaaaaaattcactttcgaaaaagccaatatatttagatgaagcagaaactgtgaaagtgcctgagaaggttcaattggtatggttagaaaaagattactctatcagaaaggatgtaaatccggacaattttaaagatgagaaatcaattaataaagtagttgacgtaggtattagaaacatcctattgcacagactacgcgaatacggtaatgatgctaacaaggcattttctgatttggataaaaatcctatttggctcaataaagaaaaaggtatctctattaaacgcgttaccatcagcggtgtaaacaatgctgttccgcttcaccataaaaaagaccatttaggcgatataatcttagatactgacgaaaagcctataccggttgattttgtcagtaccggaaacaatcaccatgtcgctatttatcaagatgagaaaggcaatttacaagaaaaagttgtttcattttatgaagcggtaattcgagctaatttaggactacctatcattttcaataatccgatggaaataatcgatttggttctggaacgaaatattactgatgaaatcattttaaacgcacttcctgaaaaagaatggaaatttttatttacgatgaagcaaaatgaattatttgtatttcctaatgaacaaactgaattcaatcccaaagaaatcgatttaatggacccaaagaataaaaagttaattagtccgaatttgtttagggtgcagaagttaggatctcttttatcaggtttttggtttagacatcatctcgaaacaacggtagatagcaaccaaacactgaaaggaattacctacatagtcattcaaagtgcaaataatctaaaagaaattgtaaaagtccgcaccaatcatttaggtgatattgtgagtgtaggagaatattagttagcatgatcaaacgtaccttatacttcggcaatccggcttacctttccttgaaacaagaacagttggttattcatttacctgaagtggtaaagaacaaagatttacccgaaaactttaaaaaagaagctaaagctactattcctatcgaagatatcggtgtggtcattctggatcatcaacaaattaccatcacccatggactgacagaaaaattattggaaaacaactgtgccttgattacctgtgacagcaatcatatgccccatggattattactacctttagaggggaataccacacaaactgaacgttttaaaaatcaaattgaagcttcacttccactcaaaaagcaattatggcagcaaacggtacaagctaaaattgaaaatcaagcatatgttttagaacagcagaccggtgctattgtcaaaaacatgaaagtgtgggcaaacaatgtacgtagcggagatccggacaactatgaagcccgagcagcggtttattactgggcaaatctatttccccaaatcgatggcttttccagatttagagaaggtattcctcccaacaatttattaaattatggctatgccattttacgagcggttattgctcgctctttggttgggagcggtttacttcccactttgggaatttaccaccgtaataaatacaatgcttattgcttggcagatgatattatggaaccatatcgtccttttgtggataaattagtttgtgaaatagttacttccggagcagatatcaatattttgagtaaagatattaaagcacaattattacaaattcctgtattagacgtgattatcaacaaccaacgtagtccgctaatgattgctgccggtcagacaacagcctcattggctcaatgttttaatggagaactgaggaaaataaaatatccttcattggagtaaaagcatagaatgtggaacggttaagcgaatacagaattatgtgggtacttgtgtttttcgacttgccaacagaaacaaaaaaagatcgtaaaatttacgctgactttcggaagaaattaattcaggatggttttaccatgtttcaattttccatttatttacggcattgtgccagtcgcgaaaatgcagaagtacacatcaaaagggtcaaaaagatactacctcccaatggaaatataggcatattatgcattactgataaacagttcggtaatatgaagttatttacaggcacaaaggaaacagaagtcaaaaccccctaccaacaattagagttattttaaatagaaaatcccatcaattggatgggattttcggtttctgaacaagcatttttttaattctgaatctcaacacaagtctttgatatccaccttgatacttagatcctgttgttcagaatatcaaagatacaattttttgaaagcaatttacaactgatttcacccgctgacattgagcggagtgttgttcagaatatcaaagatacaattttttgaaagcaattcacaacaattgtatctttgctcccctgcttttttggttgttcagaatatcaaagatacaattttttgaaagcaattcacaaccaaacctgatctggattattgaatttaaaagttgttcagaatatcaaagatacaattttttgaaagcaattcacaacctctaacgccttgcacattcaaaaagtattgttgttcagaatatcaaagatacaattttttgaaagcaattcacaactcatccttcatctcttcctgcacgtacgtagttgttcagaatatcaaagatacaattttttgaaagcaattcacaacgattatctcccctgctctctcgcctgatttgttgttcagaatatcaaagatacaattttttgaaagcaattcacaacaccgacttaagcagcgaagttttggcgtctgttgttcagaatatcaaagatacaattttttgaaagcaattcacaacgcattaatgtcaggtgtcatgcaggctgcggttgttcagaatatcaaagatacaattttttgaaagcaattcacaacttaccgcttcgtgcctattatttaatatgggttgttcagaatatcaaagatacaattttttgaaagcaattcacaaccaggattatttagtaaaaacaagaaaaaaagttgttcagaatatcaaagatacaattttttgaaagcaattcacaacatcgaagctggtaagtcgttggtttccagcgttgttcagaatatcaaagatacaattttttgaaagcaattcacaacaaggtaattaagatcatcatgcaattgctcgttgttcagaatatcaaagatacaattttttgaaagcaattcacaactccgaagcgcctctacgtcgtctgttttagttgttcagaatatcaaagatacaattttttgaaagcaattcacaaccagagatatgataatcaaacattttttgttgttgttcagaatatcaaagatacaattttttgaaagcaattcacaactcagatttttcaaataaattttcggcttcagttgttcagaatatcaaagatacaattttttgaaagcaattcacaacgctgtgagtttttttacttgtgttatttttgttgttcagaatatcaaagatacaattttttgaaagcaattcacaacttcattctgcaagctgacagcattagtgaagttgttcagaatatcaaagatacaattttttgaaagcaattcacaacgagcttcacgcatatgcaatctgcagttaatgttgttcagaatatcaaagatacaattttttgaaagcaattcacaacaataaaggaacggtgtacaaatctaaaatagttgttcagaatatcaaagatacaattttttgaaagcaattcacaacacgcctgaacaagacctttacagggttgaggttgttcagaatatcaaagatacaattttttgaaagcaattcacaacttgagcgttcaggcgatgcagataatcttagttgttcagaatatcaaagatacaattttttgaaagcaattcacaacagggctgtttttttgggcaaattagaaaatgttgttcagaatatcaaagatacaattttttgaaagcaattcacaacattatagcttttctttcttgttgccatagtgttgttcagaatatcaaagatacaattttttgaaagcaattcacaacttactatatttgcatcgtgttactactgaagttgttcagaatatcaaagatacaattttttgaaagcaattcacaacttttcaggcatatcagccgaccattcattagttgttcagaatatcaaagatacaattttttgaaagcaattcacaacatttgttctccgatacttgtaattcttgagttgttcagaatatcaaagatacaattttttgaaagcaattcacaacttaaggataattatgaagttcacaaacagggttgttcagaatatcaaagatacaattttttgaaagcaattcacaactgtttaggataaagataaagacggcaatcagttgaacgtaccaaagccgggcgacgattatatagtcgatgccgtgcggtatgtgatattaaatgaggtgatagggcgtaacaaaaataaagtagatataacaggaatattttatcaaagattttcagcggaaagccttatttcatcagcaattgtaagaagtgcatttttgagctcttttctttctttatccgtaagttcattgggtttaccgttattgagattaccacgcagtttattatgtagccaagagcgggatttaccaaagaaacgttgagccaaataagatacggaaagaaaagcaggaacagcacctaatttgtcagccgtactttcgggcggaaactcaaagaatgtttcaaaacgaatatcctcgtctatagcattccaatgcacaccgttacgcataaaacgatagtcgttgcgctcctcgtccgtagcacgtgccaaacgtggagagcaggataacggtaaacgtccaatcttacccgactcggtgtgaagatgggcgtattgattgtcaaaagtgattttaattgcttgcatattgattaatctttaagttcattccaacggtcgataattacttcacgattttctataatagcttggcgtactttctttaattcagatgcggttaaaccgttattttcacgtagctctatttcaggcacaacattaaaaacagcatcacccgatgagccttcaacatggatgtggataagttcgtggtctaacaaaaaaaagaaaaatcgaaaaccgtaactaaaaaataaagtaggcataatgataaactttttaacatcgcaaaaataataaacatttgtatattacgcaaatattttcaataaaataatgacactcgaaaaaatcaataaattagaaatagccgaaaggatagaggcattaaagaaacgcattgccacgctacccaacactggagaattactatctggttgggacgctgacaagcacgatgtaatgcttgagagcaagcgaccaaaagttgttcagaatatcaaagataaattttttaaaagtaattcatatcaccatcatccgaacgcttttttatctgtttgcctattatttcttatttctcttttcgattgttttttgcgttgtttttaggttttccaggtaagctttttccacaggtgacagtgttttcacttggtatttccggtattcagcttttgctttatttatcgccttttggtgacttatggttccggcattttgcaataggctttcgcccgtggcagaaagtacgttatcaagctgtgtgacgtagtctctcatatacatcggttttcgtttcattgcttgtatctctgcgaaatcgaagtaccctgacactaaactattcaagatttttagttcatcttcgcttaagtaatttttggcaatgacaatatctttcattgtaggttgttcgccgggaaatacggttaatcccataaacggtttttcgctatcggcacggttgtatataatttcggaagccgtatgtccatgcgtagcgtaatgcagtttgttttgcacaaccttaaaaaactcaatggatatttccgactttgggtcgtaatctacacttgtagcgtataagtcaagaacttgcctgtacattactttttcggatgaacgtatgtcccggatgcggtcgagcaattcatgccaatagttaccacctccaagatttttcaaccgttcatcatccattgtaaaacctttgacaatgtactctttcagcctttcagtagcccatattctgaacttcgtagctatgcgagattttatacggtaacccaaggagataatcatatcaagattataaaaaggcatttctctactaacttgtcgtttaccttcggtttgaacttgtcggaatttccgacaggttgaactttcatctaattcttgttcctcataaatatgtttgatgtgttcaacaatgtttgttcttgacgactgataaagctctgccatttgttgttgcgtaagccacacattttcattttcaagacgaacttcaatttttgcattgccgtcttcggtattgtaaactattatattgcctttatcttggttcataaaaaaatcaaatcccctaaatccctaaaggaaactcttttgggtagtaaaaacgataaaaagttatttcatttaaaaagcacaaatttagaaaataaaattggaaattactgctgctctttttgtccttttgtttgcgatgctgtttttctttattatgttttggttacgagatacgaattcgccacatttttaaaaaaaaatagccgtcttgttttgagacagcctcctttttctagtttattcttttatttcttaggcatatacatcgtaccaatgattttgtttactatgttcattggaacaaggttgttgagaaatacaaggaactgataccggagtccaacagtaatcattaccggcattctctttttacgtgaaagcttgtaaagagcctttgctacagtctttgcagacatgccgttttgctcgtctctttccataaccgcaatacttctgctgatgagtccgtcatattcatcatcacctacgaagttctttgcacgctgtgctgtaaagtcagtcttaacgtcaccgagacgtacgcatgaaacatccacaccaaacatcttaagctcgttcttaagagctgctgcaagggcctcaatagctgcctttgtagctgaatagaacgcctgaaacggaattgcaaaaagtgccgccgcagatgaaatgaatatgatctttccttttgattccttaagttttggaagagctgcttttgttacagtcatgtgagcaaatacgttgagttcgaactgatttctcatttctgaaagttctgtaaattcagttgcgcctgaaattccatatcccgcattattgagtaaaacatcaattttcggaatttgctcgaacgcttcttttacctgctgttcgtctgtaatgtcgcacttaatgttgattacctttttaaggtcacaaggtctacgacttaagcagtacacttggtagcttttttttacaaaaagcttcgcagttgctagtccgattcctgatgaagcaccggtaattactacatttttcataattctttctcctatattttagcaaggtccgcccttgcatcattccccgagttaagatatttcaattatacttctcatttatattgtcaaaaattgattttgcacttggagtaaagctttcaaaaaagaacaatcccttacactaacccaaattttaaatttaacgctcgggatatgcgtatcaggctggatagttgcatatctgtttcgcccctttcaatacgggatatataggtgcgttttaatccggtacgttccgagagttcctgttgtgttatcttcatttctatacgtttttcacgcagtatttccccataataccaagccattgcttttgcattaaattccgagcgggtatcgcttcctgtaacgccatattttttatcaaattccttatttacacttatcagtttgcgtttattagtattcataatcgtaattgtatggcataatcaaacttactccttgttctatcgtctaattcgctcaaaaatgtttcaaactcgagtgttttaaatatctctcgcataacagaattatttgacgccacaaatgtaactaattagttacaaacatacaattattttgagtgtaaatttgtatataattgccaaaatttttagataaaaggtaaaaatgttatcgaaaacccttttaaacttccttgcttttcgatagaacacataagttgttcggaatgtcaaagatataattttttgaaagcaatttacaacaaccgtttatgagtatgtggattttgtaaaaaatacttatcaaaatattttgtattaaagtattcactatatttgtatctctccattttttaatgaacttatttaatttttagcattatgaaaaaagtattatttattgcagttttagtgtttttagcaacaaacttaaaagcacaaaccaacgattcaattcagtcaaatgaatccaagtaccaatactgtgaaatagtaggtagtacatctagtattttatctaccaaagtcagaattcaggtagattacggacaggaagtatcattttggaatcagtattccaaacgtgttataaaagaagaggacggcaaagcaattaaattcaactccatgatagatgcactcaactatatggggacacaggggtgggagtttgtacaagcttacgccgttaccatgggtaatacaaatgtgtatcattttcttatgaaaagaaaattggaataacaaattaagatcgtatttcatttttattgaataccaaatcaaactctaggtgaatcctatttatttctttcgtaaactcaaaaaacacaatgtctgcgttgttcagaatgtcaaagatacaatttttgaaagcaattcataactaacagcaagccgatgacgtaatttaatatatccctcttttccttatatacctcagcaaccacgttgggatagcggcaataattgcgataaagatgcgatttccccaccacggaatgtagagcacttttttgcggaacatctttttcaatgcacgttttgcaagtttttcgggtgtgatgatgtatccgatttttgtacctattttcttgcttttactacttagctgatagaggtcggttgccactgcgcccggacatacggtggtaaccccaacacctttaccaatgagttcaatgtgtagtgagcgcgaaaagtttttcagaaaacgtttactcgaaccgtaaagagccaatcgttgaacaggcatatgtgccgtgattgatgagcaatttaaaataaaaccacgtccgcgttcgcacatttcttttccaaaatagtagcacaacattactggagttgtgatgtgcaagtgggtttgaagtatgttaaaagcttcagatgtttcaataaaatcgctgtttttatatatgcccgcgttgtttaccaacacttcaacgttgaaactgttttgtttacaccattcgtataggtgttttgccgcatcatgttgcccaaggtcaataacaagcgttgaaacctttattaaactgttgtaattgatagaaattgattttcccacctcgtgaattgcttcctcgttgctcactaaaatcaggttataaccgcgttttgccaactctattgcgtagtgaacaccaattccggaactcgcccccgttacaagtgcataagattcagataacatattgtgcgtctgttttattccacaaagttgttcggaatgtcaaagatacgatttatttcgaaaaaacacttatcaaaacttatccccatcattgcaatgcaaactatccaagatgaaatgctaaagttaaactgacttaagaaagagtaatttatgtaaaacataagttacatactcgttaaattattattaaatttgcatgaaattttttgagtgtttcatattgctcaactgctgttttgctttcgatatttgctgaacttgtcgaagcacgggatcaatcaatcaatcaatcaatcaatcaatcataaaaaacaataatgccattacttgagctaaaagaacttgaaagcttaagtcctttgtttaaaggaaattgcggaaacacgtttgggaaatttcttatgcgtatccttgcaatagataaggttaatgatctttatgataggaatttcgcacttaaaggtccggacttcacaagagcggttctcaacgatatagatatggattatcaggtacttaatccagaagttctggaaagacttccggaaggtgcttttatcaccataagcaatcacccctatggaagtctcgatggagtaatattgattgaccttttcggccgtataagaccagattttaaaattaccataaatgatgttctgtcacgggtaaaaacattggaagaaaattttatatgtgtaacccctataggtaacgaaattcggactcccacaaaagacacgctgcgaggcattaaagaaggcatcagacatcttaataacgggcatccactcggactttttccttccggtgcagtttcagacttgagtctaagggatagatgcatcagagaccgtcagtggcaagaaccggtcataaggataataaagagagctaatctaccgatagtgccggtgcattttttagatagaaactcaaatttctattattctttagggcttattgactggaaaatacgattacttcgacttccttctgaagttttcaataagagaggtaaaactgcgagggtggccttaggagaaattatcacacctgaagagcaaaagaattataaagataaagacataaatgaaaatttagtgactttttaagaaataaggtttataatcaacattagataatcagatatggcaaatagtaaga

SEQ ID NO: 2092 - DNA, 24416 bp, synthetic construct
  variation 18560..18625: note = n is a, c, g, or t
  source 1..24416: mol_type = other DNA
  misc_feature 1..24416: note = Synthetic
  variation 2941..3014: note = n is a, c, g, or t
acacagacatgcgtcgtaatcgcctaccgatacgacccgtaccgtctcggacgctccggcgggcagacggtccatgtcgaaccgctcccgtgcctcgttctgtgtgatgaaggcataactgacgggtaactcctgccggatgaccttgtttacctcttcctcgatggcgcggatctctgcccccgtcggctcatgatcgattctgaagtcctgcttcgatttcttacgctcgatatgggccgagtggcttctaccacacccgaacaggcggatcatcgcctggttcaggatatgctccgtggtgtgcgaaggcgggtattcctgtttgttgtgctcgttcagaataggggtttgctctttttccattgttttttttctttgaggattccgcagaagatatcattgacatagacacctgcttgtttcaggttctacccgaacggatactaagatagagatataatttcatgtggtatatcatttcgggtatagattaaatatttgtttctgataggatacctgaaacggtatggtgtggttgcggaaaaacaatggtctttctctgcctcagatacttcaattcgcttgtctgaaatgacttaatccaatcgtaatatacagataaccagtcgagtatgcgttcttaacaggaatgcgtatgatagtctcccgtctctgtcttgcggttcttctcgtttgttttgtcttatagttctaaataacaggatgttatatcacacctttattgtccgatagacgacttgctttgacgtttcctgttactcgtatgtatttttgtctgaatcagtttatctacacatgctacgtccctgctatcatatctataatgttcactattcgcacggtgtttttgccttaaatgtctctcaataggcgtttgaaaccttctgaagtggcctcttctcgacgtgttttgaatatctctgtttgatctttgttctcctttgattatacgtgcgaagcatgaaaaatggaaagcaataagtacccaattcgcaagtcggttttcaatgcgaatggcacgctctcgcacagcatgctacgcaaggggaatgggacgttaaagggaagggtaggggacgggtcagtatcggatgccgtgacgcctgtcccaggcacggaagagtccggcgaggatggtccccgagatggaatgccacgcacacgagatggcacagggaagtgccgccagcgggtcgaagaagcgaccggcaagtaccgtcgcgagacccgcgttctgcatgccgacctcaatggagatagttcgctttcgggcggtgttgaagtggaacagacggcctgccagataccccgtgaggtatcctaacgtgttgtgacacaatacgacggcgaagataaacaggaactgctgcataccgccgtcgaggatgcggtcgtgagctccggcgattacgccgcctacgatcagcgacagacagatgacgctgaatcccggcatgagcgattgcgctgtcttgaaactgctccggtgcgagtagaagaagttgagggctgttcctaatcctactggtatgatggtgacaatcaggatgttcagaaacataccaacggtgtctatctcgacaatctgtcccgccgttacctgcatcagcagcggggtcatcacgggtgccagcaacgtcgaggcacaggtcatgcccaccgagaacgcaacgtctcccttacacaggaatgacatgatgttcgaggagactccgcccggacaacaaccgacgagcaacagaccgatggcaagctccgccggcagatggaaaagacgtaccagtacgtatgcgatggtgggcatcagcaggaactgcgcacacgcaccgatgaagatgtctataggacggcgaaacaggatgcgaaagtcctcggtcgagagtgtcagacccatcgagagcatgatcagacccagtatcaccgtggcagtgttacccttgacccatgcaaacgacgacggaaagagaaaggtgaagagtgccgtcgcgatgacgacgtaggaggagtagttggcaaggatgcggctgatgcgcgatagaatctgaatcatgtttgaaggtgttgtctaataaggttatttttttcaaaaggtcccattgcaagggactttatgtttacgtttttgtcagtgacgtaggctatgtgaaaatcacttatccatttagtccgggatagaagtgacgggcaaaatgccagatgacaatgcctgccgtgaccgacacgttcagcgaatgtttcgtgccgtactgcggcaactccagacacccgtccgatgcgtcaatgacttcctgctgaacccccttgacttcgtgaccgaatacgacagcgtatttcttctctttctccggacagaagtctggcaacgaaagggactgctctgcctgctccaccgcaagcacggtatagccctgctctttgagtgcttggattgccgctttcgtgtctccgaaatagcggctcgctaccgacagctcagctcccaatgccgtcttgtgaatctcacgtaggatgctttccccggctcgcgtctcgaaaaaggaatgagtgccgtccgttgccgactcctgtttcactccgtctttcggtgcacacgtgatgccacacagccatacctcacccacacggtacgcatcggcggttcgcaataccgaaccgacgttgtacagacttcgcacgttgtccaggaccaccgtcagaggcatcggctcggctttccgatactccggcaaatcaagacgatgcagttcttctactttgagtttgcgatgcatcatggcgaaaaaacaaaaatttttatgcaaagatattgcattttcgaaaatatgattacctttgcaccgcaaatcggaagggagagtgctccctgcagactctgcaaagtaaccaagattcttcaatagctcagttggttagagcnnnnnnnnnnnnnnnnnnnnnnnnnnnnnnnnnnnnnnnnnnnnnnnnnnnnnnnnnnnnnnnnnnnnnnnnnnggtcgtaggttcaagtcctacttgaagagcgaggggagagaagtggaagagtctatttttgattcttccgcttttttgcttactttaggaggaaaggtaagcaaaaagtccgagcaagttttcttgcccgggctttctttttttacgcacaccttgaactgcttctctcttcgttgtcactttatatcataccttgtccccattctcttccatccgtcctccctccctccctccatccatccatttctcctccattctccccacgctccaaaaaagattgtacaaagacgaaaaaaccttatcttcgtgctcgcatacaattaagtttttttacgtcacgtccccgtccctccgactccattatggcaggggctctcgtccgtgaactcccaaaataaataagcatcgtcagatgaaagcagaaccacaacagaatcagacagccaagaaggatgttgcagagaaactcgggggcgagaacggctgcatcgaggtgtggggagcacgggtccataacctgaagaatgtggacgtgaagattccgcgagacaaactgacggtcataacaggcctcagcggcagtggaaagtcttcccttgcgttcgatacgctcttcgccgagggacagcggcgctatatcgagacattctccgcctatgcgcgcaattttctcggtaacctcgaacggcccgacgtggataagattaccggtctcagccccgtcatctccatcgaacagaaaaccaccaataagaaccctcgatcgacagtaggcaccacaaccgagatctacgactatctccgtctgctctatgcacgcgccggcgaggcctattcctacgtcacgggcgaacggatggtgaaatacaccgatgacgagatcctcgatctcatctaccgcgactacgaaggcgaacgagtctatctgctcgctccgatggttaagggacgaaagggacactataaggaactcttcgaacaggtgatacgacggggctatctctacgtgcgtgttgatggcgaactgcaggaactcaaacgaggcatgaggctcgatcgctacagaaaccacgatatcgaggtggtcgtcgataaactcgtggtcgagaaacagggcgatacgcgacggctgaaacagtctatcgctaccgccatgaaactcggagagggcatcatcatgctgatgcgtaaggacagtagcgacgtgcgctacttcagccgacacctcatgtgccctacctccggcatttcctattccgaccccgctccctataatttcagtttcaactcacccaaaggtgcatgcccgcgatgcaagggactcggcgtcgttcaggatgtggacccggatctcatgatgccgaaccgcaatctttccattgccgaagggggcatcctgccgctcggcaaggcgaagaagtcattggtattctggcagatcgaggcgataggtgagaagtatggattcacgctcaagacaccgatccgtgagatccccgacgaagcgataggcgagattctctacgggacgaccgaccgactccatatcaagaacgctgctctcggatcgggcagcaattatttctcttcctacgacggtgtagtcaagtacgtgcgtatgcaacaggacgccacggcatccgctacggaacagaaatgggcaagccagttcgtcaaggagggcgtctgtcccgagtgcgacggacagcggctcaacaaggaggctcttcactaccgcatctgggataagaatatctccgatttggcaaagatggatatcgccgaactcaaggaatgggtggatgcagtggaggaccacatgacggaacgacagttgtcaatcgcacgcgagatactcaaggagatacgcacccgactgaagttcctgctcgatgtcggactggactacctctcgctggaccgtgccacggcaagtctcagcggcggcgagagccagcgcatccgtctggcaacacagattggttcccaactggtcaatgtgctctacatcctcgacgaacccagcatcggactccaccagcgcgacaacgagcgcctcatcaggtcgctgcagcgactccgcgacatgggtaatacggtcatcgtcgtggagcatgaccaggatatgatgctgaatgccgactatgtcgtggacatgggaccgaaggcaggacgcaatggtggcaaggtgatcttctccggaacgccgaaggagatgctcaaggccgatacactgacgtcctcttatctcaatggaaagatgaagattgagattccggaatctctgcgatccggcaacggacaggttctgcgactcaaaggagcacggggcaataacctgaagaacgtgacggtggagttcccgctcggtacgttcatttgtgtgaccggggtgagtggaagtggcaagtcatcactcatcaatgataccctgcagccgatccttagccagaagttctaccatagcctccaggacccgctcccgtacgacgatatcgaaggactcgagtatatcgataaggtggtgcaggtggaccagagcccgatcggacgtactccacgcagcaaccccgcaacctataccggactcttcagcgacatacgcaacctcttcgtctcaacccccgaggcgaaaatacgtggctacaaacccggacggttctctttcaacacgagcggcggacggtgcgaggcatgcggtggcaatggctataagaccatcgagatgaacttcctgcccgatgtctatatcccgtgcgaggaatgccacggacgacgatacaaccgcgagacgctcgaggtgaagtacaagggcaagtcgattgccgacgtgctcgatatgacaatcaaccaggcggtcgagttcttcgagaacgttcccgtcatcctgcgtaaactcaaggttcttcaggatgtcggactcggctatatcaaggtcggacagtccagcacgacgctcagcggtggcgagagccagcgggtgaaactcgcaaccgaactctctaagaaggataccggacgaacgctcttcatcttggacgagccgaccaccggactccatttcgaggatatccgcatcctgcttgaggtactcaaccgtctcgtcgaacggggcaatacggtgattgtcatcgaacacaacctcgacgtgatcaagtccgccgactatgtcattgagatgggaccggaaggaggcaagaacggtggacaactgctcttcgagggtacaccgcaacaactctccctctccaagaagggatataccggcgcctatctcaaaccgtatttcaaggcttgaaatcaccactttatttctaaaacaaatgttaaaattaacaccttagaatgttaatttaacacttggcgaatgccctttgtacaaagggtaaacggacgcattcgaaatgttaaaataaaattttttatttgtatttcagcaatttataccgttaaaaatcgttatctttatgcgctccatggtcgtggaggaacgtgacgaagaaaaagaaaacgaattttaaaaaatgagaaaaaggctgatacgtaccatagccatcgtcatgacgctggcgtttgtaggcctgctcgccttgcagattacgtacgtcttcgacacgtccgaaagtattgaacgtgagttcaatgagaatgtgggacgtagccttttccacgtcgcacggacactggaggaatccgaggtgcaacactatctcgacgttacggcggacgagtatagtgaacgcaaggcaagaaaagcaaaacagatgcaacaggaagcctcgcgcgcaccgctgccggtcgaggtgatctcatcgggcgataccatcgacctcagcaagacgatctttgcaccgcgtctcgaactgcaggaaggcgaaagcccgttccagaaaacctcccagcagttgtacgatgaatacaaggaacgcttctaccagtccaagacactcctggaccaggtggcgctgcgatggatgaaggaggtgtccggactgccgattgccgaacggatcgacttccgacaactcaaccagcagatgaaacggtcttttgagcacaacggcatcaactacccattctcctatgccgtgaccgataaggcaggcaaggtctattacgcccattcgacctccgactccgatacggtggacttccacgccctggaggaggagtctcgcctgcgtatctattcacagcaactcttcctgagcgaacaggcggagaacccctacttcatcaaggtctgcttccataccaagcgcagcttcctctcccaggcaatgcgtatcctcctgccttccatcgtgctgacggtcatcctgctgggcgtgttcatctacacactcgtgctcgtcttccgccagagcaatatcgaagccatgaagacggacttcatcaataatatgacgcacgaactcaagacaccgctctcctccttgctgctcgccagtcagatgctcaacgacaagaccatcaagcgcacaccggagatgaccgaacgcatctcggatacgatccacaaggaggcgacacgcatgaagacaatggtcgagaaggtgctacagacaacccttttcgaacgcgaactgcaacggatgcacttcgacgaggtggacggcaacgaggtggtcgagaacgccgtctccaacttctctctccaagtcgccaaggcaggcggacgtatcgaggatgactacgaggcaatggagttctggatcgaggcggatagcatgcacctgaccaatgtcatcatcaacctgatggagaacgcgctcaagtaccggcgtgacaacgtcgagtttgtcctcaaggtgcgtacttggaacgagaatgaccagttctgcatctctgtcgaggacaacggtatcggcattaggaaggaacacctcaaacacgtgttcgataagtattatcgtgtgccgacaggcaatatccacaacgtcaagggattcggcttgggactggcgtatgtcaacggcatggtcaaggcacacaacggaaagataaaggcagaaagcgactacggcaagggaaccaggtttaccatctcactgccgtatatgaaacaggacgaagataaataaggccttttttttgataggtcaaggcagggtcgaacgggttcgaactctgacagggcaaaaaaaagtgctattgaaaacagaatataaactaaaaaacgattgagatatggaacagccgacaaatattcttctatgtgaagatgacgagaacctgggcatgctcctccaggagtatctacagggcaagggactgcgtgtggaccttcggaccgacggcgaggcaggactcggagcattctccaaggataagtacgacctctgcatcctcgatgtcatgatgccgaagatggacggcttcacgcttgcaaaacgcatacgggagatcgaccccgatatgcctatcatcttcctcaccgccaagtccatgaaggacgatatcctcgaggggttcaagataggtgcggacgactacatctccaaaccgttctctatggacgaactgctcttccgaatggaggctatcctccgccgtgtgcggggcaagaagaacaaggacgtcgtggtgtaccacctcggcaagttcgtgttcaatacccagacccagacgctctccatcggagataagaagaagcacctgaccaccaaggagaacggactcctccaactcttggcggctaatgtcaacaatatcctcgaacgtgaatatgccctcaaggcagtatgggactacgacaaccgtaactccaaccagtactataaggcgcgctcgatggacgtgtacatcaccaaactgcgcaaactcctgagcgacgacccgacagtccagatcgtcaatatccatggctatggctataagcttgtggcaccggtagaggaaaacaaggagtagaaccttctgaacctcggtgtcaaccgacgcgttctggtctatgtacggcgtcaggcctgctgatgcaactgtaagtgtgtcatgaacagggctaaaaaagcctgttgtaaaaaaataaaacgtaaaaaaaaagaatgatggaacaaacgacaaagatcctcctctgcgaggacgatgagaatttgggaatgcttctgcgtgaatacctgcagagcaaaggagtggcagtcgaactgcgtgccgacggcgaggcagggctggcttcgtttacgaaagaagcgaagttcgacctctgtgtccttgatgtgatgatgccgaagatggacggattcaccctggcgaagcatatccgcgaacaggacccgactatgccgattatcttcctcaccgccaagtccatgaaggaggatatcctcgaaggattccgactcggtgcggacgactatatctccaaacctttctctatggaggaactgctcttccgtatggaggcaatcctgcgacgcgtgcggggcaagaagaacaaggatgccgtcatctatcacctcggcaagttcatgttcaatacgcagaaacagacactccactacgacggtgtcgagacgcacctgaccaccaaggagaacggactgctcgccctcctcgcttccaatgccaataacgtggtcgaacgggactataccctgaagaccatctgggataaggacgacgtgcagcatgcacgctcaatggacgtgtacatcaccaaactgcgcaaactgctccgccccgacccttccgtccagatcatgaatatccacggctacggctacaaactcgttgtgccgaacgaggaggagcaacagtaggtatataaaaaaattgtccaccgttgtaggacgatggaccaacctaatgttttcacaacggaataatccttattgtgaatagcttcaaaattgtattacaaaagtacggttatttttctaactgacaaatttcaataccaaaatattgtagatatcagtgaaatatcgtacttttgagatacgcatgatctcaaattaataatcgtttaaaacattatttataacatgaagaaaatccttggactcgacttgggtacgaacagcattggctgggcagtggtgaatgaggcagaacatgtcgatgaacagtcgtcgattgtgaaaataggagtaagggtaaaccctctgacagctgacgaactttcgaagtttgaggaagggaaaagtattacgacaaatgcctatagaacgctaaaacgaggaatgcgacgcaatttacaacgttacaaactccgtcgtgaacatctgctggcattgttgaaggaaaagggttttatatcagaagagacaattctgtcggaaagtggaaaccggacgacgtttgagacttatcgtttgcgggcaaaggcagcaacagaagaaatttcgctcgaggagtttgctcgggtacttctgatgatcaataagaagcgcggatataaaagcaatagaaaggcaaagaatacagaagagggccagctgatcaatggaatggaaattgccaaaaggctataccaggaaaatttgacacctggccagctttgttggcagttgctgcaggatggaaagaaatccttgcctgatttctatggttctgatcttcagagtgaatttgataaagtgtttgagttccaacggcaatattatagtttcttgaccgatgagttgaaaaaggagttgtctgggaaaaacgataaagcggtatgggctatttgcgcaccatcgaaagagaaggagtcttctgacgagaagtttgtttggaagtgggtggagactgtaacggaatgggatgaagagacatctgccaatcagactgttgagaaggtaaaaacactggaaggactgaaacgagaggggaatacagcggagaggaagagagaaaactatgagtggagaagccgtgcattggaggaacaattatctccagaacaacttattgtggtctttcaggagataaataaacagatcaataatgccagtggttatttgggaaacattagtgaccgaagcaaggaactctattttacgaaacagacggttggacaatggaaaatgaagaagttggatgaggacccaaaccatagtcttaaaaataaagttttttaccgccaggactacctcgacgaatttgaaaaaatatgggagacccaagcgaaataccatagcgaactgactcctgaactgaaaaaagaagttcgtgatattgtgattttctaccagcgtccgctcaagtcacaaaaaggattgatatcaatctgtgaactggaagggaaacagatggagttcgaaaaggaagggaaaaacaaacttgttaccataggaccgaaagtctgcccgaagtcatcaccgctctttcaggagttcaagatatggcaacgattgaatgatgttcaggttgtaaatgcagaaggagagagacggtttttgaatcagaatgaaaagaatgtgcttttcgaagaactcaactacagagaaaagttgtcgaaaacagagacgcttaaacttttgtttgataaaaaacacaaggaatacgacctgaactttgaaggattggatggcaacaggactcagtcagagttgttcaaaacctatcagaaaattatcgagatgactggacatggagaatatgatttctccaaaatgtcagctaaggcgaaagtggaattggtgacggagatttttgaagggttaggatttaataccgagattctgacatttgattcttcaatcaaggacaagaaagaattcgaacagcaaccattctatcaattatggcatttgctctattcgttcgagggagataagtctgttcttgggaatgagaaattgatagaaaaaatatcagagatgtatggctttgacaaagagtctgcgacggttctggcaggggtgattttccaaccggactatggcagtatcagcgcgaaggcaatacgaaaaattcttccggatatgatgaggggggataattatagtacggcatgtgaaaaagctggatataatcattctaagcggtcactgaccaaagaggaacttgagaaaaaagtatggaaggataagctggatcttttgccaagaaacagtcttcgtaatccggtggtggaaaaaattctgaatcagatgatcaacgttgttaatgcggtcgttgatgcgtacgggaaaccagatgaaattaggattgagttggcacgcgagttgaagaaatcggctaaagaacgtgatgaactgacaaaggcaattaacaatacgaaaaaacagcacgatgtttatacgaagaagttgcaggaggagttcggactgacccatgttagccgcaacgatattatacgatataaactttacgaggagcttcggtcaaatggatatcggactctgtattccaatacatacattccacgggaagaattgttcagcaaaaaatttgatattgaacatattattcctcaggcaaagttgttcgatgattcgttttccaataagaccatagaagcaagagatgtcaatatcaaaaaaagtaatatgacggcatgggactatgtcgttttgacaaataatgaaggatatgcgaataatgaatacaagaatagagttgagaaactgtttgccgataagataattagtaagtccaaacgtgacaaactgctgatgagggaggtggacattccgagcgatttcataaatcgtgacttgcgggattctcagtacatagcaaagaaggcgagggagatactggaaggaatggtgaaattcgttgtcccgacaacaggaagcataacagatcgtctgcgtgaagattggcagttggtggatgtgatgcgtgaacttaattgggacaagtacgaccgcttaggcatgacgtattacgaacaggaccgtgacggacgacagattccgaagattaaggattggacaaaacgaaacgatcatcgtcaccatgcaatggatgctttgacgattgcttttacaaaacggagtttcatccagtatttgaacaatttgaatgcgcgcgtccaaaagggagttgatgagtggatagatttggatactgttgaactgtccaaattggataaagaacagcgcacctctgttgtatatgcaattgagaagaaagagctctatcgtgatagtcatggcaagttgcgtttcaatccgcctaatttgaccaataaccgagatatagaacaacaactgtctcaattccgtagggaagcaaggcgacaactggaaaatgtgctcgtctctattaaggcgaagaacaaggtcgttacccgcaatgtaaataaagcaaagaataagtctggggaatacaaaatgcaactgacccctcggggaaaattgcatttggagactgtgttcggaagccagaatagatatgttacgaaagaagaaaaagtgaatgcgtctttcgatgccgaaaagattaagacggtagccgtaaagcgctatagggaggcgcttgtcgcccgactggcacagtatggtggcgatgcaaagaaagcatttactggaaagaatacgctggataagaatccggtgtgggttaatgcacagcaaagtgagaaagtacccgaaaaagttaaaacagtagaatttgagaagatttacaccatcagagaggaagtaacgccggatctgaagattgacaaggtggtggacgctcatattaagaaaattctgcagaataggcttgcggaatacggtggcgacgcaaagaaggcattctctaatcttgaagaaaatccgatatggcttaacaaagaaagaggaatttctatcaagagagtaactattgaacggatgggtaattatattgctttacatgacaaaagggataagaatggaaacttgactctggatgagaacggaaagaagttgcctgttgattttgtaagtacagggaacaaccatcatgtagcaatctaccgtaagccagtgttggataagaatggactgcctgttttgaacgagaacaacgaagtggagtacgagttggatgaaaagattgtctctttctatgaggcggcatcacgggcaatgcttggcttacctgttgtggataaggaatatagaaagtcagaagggtggcaattccttttcactatgaagcagaatgagtatttcgttttccctcgctatgagtcctatattgacagcgaaggaaaggaagcgcaacgtatgatcttcaacccgacggaatacgatgaggcttggtataagaacccggaaaattatgctttgataagtccgaatctgttcagagtgcagaaattctcatataaaaattatgtatttcgacatcacttggaaacaaccattgatttgagtgaatacaatctgcgaggaactacatgggtagactttagaagttcgaaatggttagataagatccttaaggttcgtgtaaatcatattggtcagattgtatcagttggagaatattaaaagaaggcaaggagaagataatcaagtctcttctatgccattcattctacctgatattgtaaggctcaagtatttaagcattgtcatgccaaagaaaacctctctggcggagtttcaagtttgaatccagaaaccagaacgatatgattaagaaaaccctctacttcggcaatcctgcctatctctcgttgagtgatggacagatggtgatccgcatcccggaggtggagaatgccgacgtgccggacctcatgaagaaggaaactacggtcacccgacccatcgaggacatcggtgtggtggtcatcgacaaccgacgtatcacgttgaccagtggtttgatggatgctctgttgcagaacaacgtcgccgtcatcatgtgcgatgagcggcgcatgccgtcgggactcttcctgcctctggaggggcatacgctgcagagcgaacgcttccgctcccaactcgaggcgtcgctgccgctgcgtaagcagttgtggcaacagacggtctccgccaagattgccaatcagcatgcaaatatggcatacgcccgccccgatctccaggagaaggacttccggtgtctgaaggtgtgggctggcgaggtgaagagtggcgaccccgacaatctcgaggggcgtgcggcggcgttctattggaagaacctcttcgcctccctccctgattttgtgcgtagccgggagggggaaatgccgaatgcgctactcaactacggctatgccatcctgcgggcgattatcgcccgttcgcttgtcggcagtggactgctgcctacctttggcattcaccaccacaaccgctacaatgcctattgtcttgccgacgatgtcatggagccttaccgcccctatgtggaccgtctggtggtggatctgctgcccgaactgggtacggcttccgaactgacgcgtgaggtaaaggcggaaatgctcgccattcccacgttggacgtcaccatctccgaccatcagcgaccactgatgattgctgcttccgagacaacgtcatcgctcgccaggtgcttcgctggcgaagctcgtcgggtggcatatccggaaatgtagggattctttcgtctgcgtatgcttacgcgcctgagtcaatatcgcattatgtgggtaatggtattcttcgacctgccgaccaacacgaaacgccagcggaaggcggcgaccgattttcgcgatggtctgatcaaggatggattcaccatgttccagttctctatctatatccgccactgtgccagcatggagaatgccgaggttcatcgccgcagggtgaagaccttgctgcctaaggaaggacgggtcagcatgatgtgtatcaccgaccgtcagttcgggttgattgacatcttcgagggacggtctgtgtcgtcgcgccctgtggaaggccagcagttggaacttttttaggattcgaaaaactcacaaaaaaatcccgattctcaaattcgagagtcgggatttttattctttgacatgtcttttaagtagttatcttttaacttattacacacatcgagttgtgtgagatatgtcaaagatacaatttcgagagctattcacaacttcgtggttttaggtgggatttacttgtaagttgtgtgagatatgtcaaagatacaatttcgagagctattcacaacacgaagtctcatagtaaatcagttaatcagttgtgtgagatatgtcaaagatacaatttcgagagctattcacaaccatctaccacgccttccgcaagcgtactgagttgtgtgagatatgtcaaagatacaatttcgagagctattcacaactccaatgccgtattttggtgaacctgctttgttgtgtgagatatgtcaaagatacaatttcgagagctattcacaacctttatggctttcctcaccgccgctctcacgttgtgtgagatatgtcaaagatacaatttcgagagctattcacaacctttcatccttaaatggtgcatcagaagaagttgtgtgagatatgtcaaagatacaatttcgagagctattcacaacctcgtcgtagccggcagtcagcaccgcccggttgtgtgagatatgtcaaagatacaatttcgagagctattcacaacaattgtctttagtgacttttgttcagcgtcgttgtgtgagatatgtcaaagatacaatttcgagagctattcacaacctttcagcccttgcaagcgagccgacacggttgtgtgagatatgtcaaagatacaatttcgagagctattcacaactaattaagattttcgacaacggcggataagttgtgtgagatatgtcaaagatacaatttcgagagctattcacaacaagagccgaccttataggcaaacatcgccagttgtgtgagatatgtcaaagatacaatttcgagagctattcacaacaacgaaggtcatacacgtccgttccgttgcgttgtgtgagatatgtcaaagatacaatttcgagagctattcacaacaccaaatcgcatagtaaatcagttaatcaagttgtgtgagatatgtcaaagatacaatttcgagagctattcacaacgtcggcgatgaaggtagagaggggttcattgttgtgtgagatatgtcaaagatacaatttcgagagctattcacaacaggacggacacaccatcttattgccaccatgttgtgtgagatatgtcaaagatacaatttcgagagctattcacaacaccaaatcgcatagtaaatcagttaatcaagttgtgtgagatatgtcaaagatacaatttcgagagctattcacaactgaatcggcatagacggtttcgccgacggtgttgtgtgagatatgtcaaagatacaatttcgagagctattcacaactaacgcacagattctcgctcacggcgaacggttgtgtgagatatgtcaaagatacaatttcgagagctattcacaaccatgataagcagcgaatcgctcaccttgaggttgtgtgagatatgtcaaagatacaatttcgagagctattcacaactatagttccgcttccccaataataggaaaagttgtgtgagatatgtcaaagatacaatttcgagagctattcacaactcggttagatttacattagttttcataatgttgtgtgagatatgtcaaagatacaatttcgagagctattcacaaccacgctgtcgatgatctctttgattcttgcgttgtgtaagatatgtcaaagatacaattttaagggctgttcacaaccttttggagtgtgttccccaaaaagtgccggaatcctcgattcctgacgagctttctaataattaaggaaatttttctttaattgatgtgcacgatttgagatattctttctatttttgcaaactgaccgataaggggcatgtcgctgcgtgttgtgtacaaacgcaggtccatgcacggatcgaacgaaataaagtaactttaaaatcaataaatttcatacacaaaaaaacatggcaaagtttgacaagtcagtgttggagaagtacggaattaccggtacaaccgaggttctctacaatccttcctatgaagtgctgttcaatgaagagaccaaagagggtctcacgggttttgacaaaggtcaggaaactgaactcggtgcaatcaacgtgatgacgggtgtttacaccggacgttcgcctaaggataagttcatcgtggacgatgagaactcccacgataccgtttggtggacttctgaggagtataagaacgacaaccaccgtgcaagcaaagaagcatgggctgccgtaaaggaaatcgctaagaaggaactttctaacaagaaactctatgtcgtggacggtttctgcggtactcacaaagatacacgcatgaaggtgcgcttcatcatggaagtggcatggcaggctcattttgtaacgaatatgttcatccgccctcagaacgaggcggagttcgaccaggaaccggacttcatcgtttacaacgcttcgaagggtaaggtcgagaactacaaggaactcggactcaactccgaaacggccgttgtcttcaacgtaacaagcaaggaacaggtgattatcaatacctggtacggcggcgaaatgaagannnnnnnnnnnnnnnnnnnnnnnnnnnnnnnnnnnnnnnnnnnnnnnnnnnnnnnnnnnnnnnnnnatgttctccatgatgaactacttcctccctctcaagggcatggctgctatgcactgctccgctaataccgatatgaacggcgagaataccgctatcttcttcggcctctccggaaccggtaagacaaccctctctaccgacccgaaacgtaaactcatcggcgacgacgagcacggatgggacgacgagggagtattcaacttcgaaggcggctgctatgcgaaggtgatcaacctcgacaaggaaagcgaaccggatatctacaacgcaatccgccgcgatgccctcctcgagaatgtaacggtggacgagaacggaaagatcgatttcgctgataagagcgtgaccgagaacacccgcgtgtcttacccaatctaccatatcaagaatatccagcgcccgctctcccagggacctgcagcaaaacaggtgatcttcctcagtgccgacgcattcggcgtgctgcctccagtgtctatcctcgacccagagcagacgaagtactactttctgagcggatttacagcgaaactcgcgggtaccgaacgtggcatcaccgaaccaactccgactttctcggcttgcttcggacaggcattcctcgaactccacccaaccaagtacgcagaggaactcgttaagaagatgcagaagagcggtgctaaggcttatctcgtaaatacaggttggaacggtaccggcaagcgtatctccatcaaggatacgcgcggtatcatcgacgctatcctcgaccactctatcgactcggctccgaccaagaccatcccttacttcaacttcgtagttcctactcagctgaacggcgtagatccgaagatcctcgatcctcgcgatacctatgctgacgcatctcagtgggaagagaaggcaaaggatctggctggccgctttatcaataacttcaagaagtacgagaacaacgaagccggcaaggctctcgttgctgcaggtccaaaactctaagactgcaacaaaaaacgtcgtcggcagatactgaaaaatcagaacccaaccgacacgttcagtcagaatacggcacgaccgctgtctccccgttctgcgggaggacagcggtctgctttttcttcccccatccctgactggataacccgaataaggtctgtaaggaccggaattttgcggataagggagttttacttatctttggagaaattagccgggggatgagttgcgccctgctcttattgaaagaccataatcaaaaatagaaaaacacatacaagactatgaagaacgctatcctcgccgtgctggcaacaacactgatgacaggatcggcttgcgcaagcaaggacatcaagattacggacaacccgtggaaggacgttaagaaggtggagaaacgcatcaaggctccgaagttcaaacagaagtgctacgacatcacgctgtacggagctgtggctggacaggaaaactataagaaccaggctatcaacgaggctatcaacgtcgcacaccgcaacggcggaggtatcgtcatcgttccgaaaggtactttctatacaggaccaatcaccctcaaaagcaacgtatgcctccatctgcaggaaggtgcagtactgaagttctcaacgaatccgacggactatgaaccgatggtacagactcgctgggaaggatgggactgctacaactatcacccgctcatctatgccaatggtgaaacaaacatcggtctcaccggaaagggtatcatcgacggacaggcaaccgacgataactggtggccttggaaaggaaagaaggaacacggatggaaagaaggtgtgatctgccaggaatggaacgggacaaaggagaacggcggacgtaaccgactcgctcgcatggaagaggagaacgtgccgatgcagcaacgcgtgatgacctatgccgaccgtctgcgaccttcgttcgtcgagtttatcaactgtaagaatatcctgctcgaaggattcaccctgcaacgctccccattctggtgcctccacccaatgctgagcgagaacgtgaccgtacgcaacgtgacggtaagcagccacggaccgaacaacgacggttgtgaccctgagtcttgcgacggcgtactcatcgatggatgtacgttcaatacgggcgatgactgcatcgctatcaagagtggaaagaataacgatggacgacgctggggcaaaccgtcacagaatatcatcgtgcgtaactgcaagatgatcgacggacacggtggcgtagtgctcggaagtgagatatccggcaacgtgaagaacgtttgggcagagaattgcgaaatggatagcccgaacctcgaccgtgtaatacgcatcaagtccaacccgatacgcggcggcgaactggagaatttcttcatccgcaatatcaaggtgggagtctgcaaggaggcggtgttccgcgtcgaaatgaagtacgaaaacgtgacggaaggaccgaacatgcctctcgtgaagaatttcttgatggagaacgtgacaagccagaagagtaagtacggcgtctggatcgacggacttaccaatacaccgcagaaacaggtgaccggcgtgacactgcgcaactgctcgttcgataacgtgaaaatccctcacaagatagcaggagccgagaacgtcaagtttgagaatgtgaagatcaatggcgaggacgtcaaactggagtgacctctgggaatcgaaaatattccccataatcaaatggggagtactcatcatagcgtatggagcattgctctatacgcttcttgcttttcgtgaccgaggtgtcggattcgacgagtggtgcgaccatctgcgcaacggacagtggcgctggggagtcggaatgctgctccttataccgatgaactgggcactcgaggcactgaaatggcagagactgactcgacaactggaatacctcggctttgggattgcactgaaagccgtcctgcgtggttgtaccgtcgcattctttactcccaaccgcatcggtgaatatcccggacgatgcgtcttcctctccgagggaaaccgcgctcgaggcatctcgctgggcgtggtaggagctatgagccagacaggcgtggtgatgatgggtggcatcccggcatcactggtctatctcgccgattccgcctcgacatacgcgttgggcatcgccttgctcgtcctctgcttgacaacctatttcctgctccctcaactgggcactcgactccaacggatgcgaccggtgagaaggtgggagaagtacctcgctccggtgagccggatggaacgatgccaactgacggaagtgctactgatttcgatggctcgttatgtcgtgttctgcacacagttctacctcctgctgcgattctttggcgtgaacctgaatggggtagagggagcaatgggtattgcaacaaattatttatttgttacctttacaccttcaatgctgttgtccgaaggggcagtgagagcctcaatgggcgtagccgtgtttaccctcctgcgaccagttacggaggatgccgtggcggtgatgtgcgcatcggtctctgtctggctgcttaattacgtgcttccaatgctggtcggctcctacttctggctgaggaaacactgaacgaatcaaacaagttaaaatcatggaaacgaatatggattttgattttgatgcaatacgaccttatcgggataacgaacttcatgaacagattcagttcctgctgaacgaaccgaatttcgcaacattactgccttcgttctttcccggatgggatgtcgaggaattgaaacaatttctgctaagcctgaagacaatagcggagtttcaggagaaaatcattcatacctacctgaaccacataacagcacagacaaccgacggagttatactgaacggactggagaatctgaaccctcaaaaaggatatgtcgtcatctccaaccatcgcgatattatcctcgactctgctttcctcaactctaatctggtcgggacaggaatccctatgaccgaaatagccataggagataatctcttgatctacgactggatccgacgtctggtccgcatcaaccgcagttttatcgttgagagaaacctgccgatacgacagcaattggagagctccatgcgactgtcggcctatatacgtgatacggtcgctcgacgcaaccagagcgtttggattgctcagcgtgaaggacgcgccaaggattcaaacgaccgcacacaggtggctctgctgaagatgttcaatatgtcaggcaatgactccctgatagagaatttcaaacaactgaatctctgtccgacagcaatcagctatgaatacgacccatgcgactacctcaaagcgaaggagttccaacagaaacgcgacgatgccgcatacaaaaagagtcaggcagacgatctgctcaatatgaaaacgggtgtcatgggacgaaagggacgcgtgcggttctatttcgttggaaatataaacgaggaaatcgacaggattgcttccgctatctccgtcaagaacgaacagctgacggcaattgccgaacttatcgataagcatatccatcttaactataccatctatccaaataataaggtggcttacgacgaactgctcggagtggaccgattcgcaagtgaatactccgccgacgaacgcaaggcattcgaccaatatattcagggacaactccagaaaatcgacctgcccaacaaggacgaggagttcctgcggacgaagatgttggagatgtatgccaatccgcttatcaatcacctcaaggctcaagaaaaagaatgaacgcagattttaatcaggaacagaaagaagccctggatgaggtcacctggagactgactgaccccgatggacttaaaatggtgggataccaggtggaggcagacagccgtatgccgtcgatcgtatcactgcgcgaggtggtgaatctctcacgatccgtccttttcccaggctatttcgacgagactccgctacgctcctataacgtgaagtaccatgtcggagtcagcctcgaaaaactgcaccgactgctcaatgaccagatctatgcgggcttgtgcttcgcaggcgatgtcgaaatgctgggtgagtcagctcaccagcgcagtgcggcaatcgcgacggagtttatacgacggctgccggacctgcgcgaggtgctgacaacagacgttatcgctgcctataacggcgacccggctgctaaaagctacggcgagatcatcttctgctacccggctctgaaggcaatgctgaactaccgcatcgctcacgaactgctcgaattgggcgttccactgatcccgcgtttcattacggaaatggcacactccgaaacaggaatcgatatccacccgggtgcaaaaatcggcgagtatttcacgatcgaccacggaacaggtgtcgtaatcggtgaaacggccgttatcggaaataacgtgaagctatatcagggtgtgacgctcggcgcaaagagctttccgctcgacgtggacggaaacccgattaagggaattctgcgacacccgattctggaggatgatgtagtggtctattccaatgcctctatccttggacgtgtgaccataggacgcggttcggtcatcggaggcaatgtatggatcgccaacgatgtgccggcagggtccaaggtgtttttcaaaggcgaagggacgtcttcgcagttctgagaaaaaaagacgatatcattattcaatcagacaatacatgagtgagaagtttcccattatg

SEQ ID NO: 2093 - DNA, 24413 bp, synthetic construct
  source 1..24413: mol_type = other DNA
  misc_feature 1..24413: note = Synthetic
ttcgcagatcgccctcctcaagtggcttttgcttgttgaacagtggtacaataaggttggagtaaaacatggacatgaaaatgctgaaaagagtaattaagccccaagccaatatccaaaaccaatggccggtagattgaaatataaaaacaatcaacgctaatagacccccaccaatgataattccaataatccaccctttgattttatccaaaacaaaagttttcaaagtggttttgttgaacccaaatttactttcaatcacaaaagtgtgatagactgaaaatggtgtagaaataatatctgaaacaaaagcaattatcccgaaaaagtaaagcgattgccatatctcattatcgctccattgtcttactacatgatcgagccatccaaatccactaaaaaacagtaccgcaagtaaaattataaatgagacactgccggataaaatgctgaatttattatttaatctcaggtattgttgcgaacggatgtactctttttcgtcatagatacctttcacttcctcaggcagtacttcgctgaaacgagtagagttgaggtaagcaagtagctgttcaataataaaatcaaagactataaaaacaattattactaaaaaaagtgtttcaaccacagtttagaagtgtttgttatttatggaaggtgaaatattgggttttgtgattaaagagttagtgaaaaattaataggtttgaaattaaatcttatcgtttcttacctcatttcagatcaataattgagttcgcattaaaactaaaataagatattaatatgatccgcttctttttctaataaaccattcagctgttagcagggctactataaaaataaaaatgccgaatatattaactaatccactaaattttttttcggtatatactactgttcgtacatcatcacgtgcttttatcattttggtaaatgtggagagttgttcgggataaatcaattcgccctgatattttgaggttaaccggtaaagcaggttgtgatcggctactgtgtttatcgcttcgatgttgacaggcgaaacggtgaactcgccttggctacggtatagcttttcgcctactctcactgttgcctcataagtataatcttcaatcggaaggataccagcatttaattgatatgcattggaggtttttccgaacaggaaattgtatgtgtcgccaacgctattttttaagatgatctctacatccggagtattaataagctcgtaactctggttgtaaacttcggcgtcaaggtggatggcttcattttccataaaaatattttgacctgttactttgaaaaagcttttatcagcctttactgcaaggtactgtattattttcgacaaaagttcattaaaagcgttgtggtttccatatttttgaaaattgataagccgccatcgccagattccttcccctgcaataacccctgttttgttatccaaagtctggttgaaaacaattaaagggtagccggttacaagcgatccgatttgttgattgaagagagtatttgccgagacctgtgtttttatctcaccgaatggcgctatcagcggtggaaacatctctattgctttgagtacatcatcactaatggtaaacagcgaaaactccttgttaagcgagggcagtgattcgttgaatagttccttttgcgcctgtatttctattcccgccccggatttgttgaattgtacgaggttggattgagaaccgaggataaaaagtaatggcactgcctgtttgttggcttcagtgatgatcctgctaatgtcatcccgcccgccgggcagttgatgtaatatgatcaggttatattcaccgatgtttcctgaaaactggttagacaaagagtgtgttacctcgtaagcccagttgctttcaatagcctctttcagcgctgcaatgtcggggtgcggcgattgagagagaatgatgattttttgttttgtgtccaacacctcaataaaaatatcctgactgttattttgtaagcttatctctccttcgatgggcctcacacttatacgataacgttgcaatcctgccttctcggcatttagggtgatgtgaacagtctcgttgaaatggttagagttgaagtttatgttttttgaaaaaagtattgctccaccataacttacagtgagtatgctattttcttcattacacaggttagccccaacaattgcctcgatcgggaactcattacctttaaaagcaatacggttataatttatctttcgtataaagatatcttttctaacgcttgtatcgcctaaagctaccgcgaagattggaaatttcaacttttcagcgctatacaccggattgatgcctctattatacaggccgtcagtggccaataacatacctccaacattacgattggaatatcgtgtgtttatctcctcaaaaagttcggagatatcagtttgttgatccgtataatcgaaagtcagttcttcactcactttatggccaaaattgtaagttcttacagtgtactctttttgaagttcatccactaactttaggaattcctttgggtagtcgttacggtaaaaggctgaatctttacctataattagtgattcggagttgtcctgtgcaaggatgagtattggtttttcgaaattacggaaatgacttttgagcattggcgagagtaagagaaaggcgattacggctactgctataaacctaaaagctgataaaatgccgagtgtcaatgcgttaaattcttcttttttatttttataatacaataacgcactgtacgccaatcctgccagtaagcagaaaatgattaaccacgccggagattcggtagcaatgttcaccaatttgatctttaaaaatatgatttaaaccttttacatgtgcattccgccgtccacactgatcacctgaccagtaacgtatgacgatagctccgatgcaaggaaaattgcaatgtttgccacatcatcaggcttacccgatcggcgcagaggtattcctttaatccagttttcgcgtacctcatccgatagcttgttggtcatggcagtttcgataaagcctggcgcaatggcattgcaacggacaccacgagagcctaactcctgtgctatggatttggtaaatccaataaggccggccttggaagcgctgtagttggattgtccggcattacctgaaagccccactactgagctcatgttgataattgagccattacgctgttttaacataacccgttgaacagctttagtcatgttaaaaattgatttcaggtttaccttgattacaaggtcccagtcttgttccgacatgcgtaacaaaagattatcacgtgttattccggcattatttaccagaatatcaatctgaccaaaatcttttacaacttcgttgataagggactcggaagcttcgttagagctagcatccgaggcgtaagcttttcctttaacgccataactctcaatttctttaaccacatctattgcatcttcatcaaccattaggtcggagatggcaacatcggcgccttgttttgcataagcaatcgctatggctctgccaataccgcgtgaaccaccggttatcaaagcttttttattttctaataacttcatttttgtgtgtgttaattagtgattattatattttaattttaatgtaggtttaaatcagtaaatgctttgcccgactgcataagatcaacagcaacattcaattcgtcatcaagctcgtttatcagcctgaaataggcattcgtgtcccacaaattacgggcaatcaaagccttgatctgaattttgaggtcgttatcgggatagtagtatttttcggtctctttacgttcaacgtttttctcttttgccagatcgaggaaatccgcgtacatttcatctgttacaataaatttttccttaaaactttcaacattcggatactcttttaatactctctttctgtttttttcaaggtagtttaggttatatgtattaaaaataccttttcgcaccaagtcggagtagaaatctgaaaatctggtcgagtcaatgggagtgaagatgtcgggtattattccacctcctccataaacaactctgccgttcgaagtaaaatacttcaacgaatcggctaactctattgagttggaatctactaattcgccactttcaagtcgttttgtcaggtctttgtaatactcttctgtttctccatgctcgtatggcttctgtatgcatcggcctgatggagtatagtatcgcgctgttgtcagcctaatcattgctccatcgggtaggttgaagggacgttgtactaaccctttaccaaatgagcgccggccaacaaccaatcctctgtcccagtcttgaacagcgcctgaaacaatttcgcttgctgaggccgagctttcgttgataagtactataagctttcctctcagaaaatcgccggagccggtggagaaaaactcttgctttggcgaacgaagcccttcggtgtaaacgatcatttttttatccgacagaaattggtcggccagatcaacagcaatgttaagatacccacctgtgtttcctcttaaatcaagtataagatctttcatcccttgagccctaagtcttgaaagagattcattaaactcttgcactgacgattttgcaaaacgcgttagcttaatatagccgatttcgggagctgccatgtaggtggcatcaatactattgataggtatcttgtctcttacaatggtaaaatcaattaactcatctttgccacttcttaaaatagaaacatcaacagaggtgccttttttacccctaagaagtttcataacatactcattattaatcttcttaccgaatgcgtcttcaccgttgatttttattatcttatcaccggccagaataccgagtttgtccgaaggccctccaggaacaggggcaatgacaaggatagtatcgttgaataattgaaaggtaactcctataccatcaaattccgcttccaacggctcgtttaatcgtttgacatcttctgccttaatgtatgctgaatgaggatcaagctccttaagcatggcaataatggctttttctacaagatcgggagagtcaatactgtcaacatatccaaattcaatgagttgtaacgtggtggaaaatttctgggtagttttacgggctttgtcagcttgtgaaaatacaaaagtgttgaaacacagaaaaataataagaaaagcaaatttcagcttattatcaatgtgatgtaaatgaaaaccaattttcataaataattatgattttaaacgttcatctaatgttaaacgtccaaacgaaagcaaaatgaaaatatttttgcttagcaggacaatagctcctacgtcaaggaagatttgatagaataacagcgttgatattgaaatgtttaccgccttattttgagataattggttgatttaggatttttacttgtagatttgttacgagaaatttttttaaaaacttacctgtatgaccacaactttacttattgccataatttttttgaacatcctaattgttgttttattctttgttttcaggcctaagaaaaacgatgactttttaaaacttatctttaaagttggtgagcttcaaactgagttgcaaaagcttgaaaatggtttgaaagaggatttcaggatcaatcgggaggagagcggcaggcttaacaaagaaaaccgtgaggaattgggtgctaaatttttggagttttccaaccagttgatttcacagttagataaaaactttacacaggttcaggaaagaatgaaggaggtagctgatcgaactaaggcggacaatttgcagatgcgagaggaggttaggaaggagatcagggagtttcaggatgcttttgataaaaatgttaaatcgttcaacgaattgcaacgcgagaaattcgggcagcttaccgaggagttaagacagaagtttaataatttggaagagaagctgaaagagaggttgaggttagttgaaaatcagcagaaagagttagttgaaacgactgagaaaaagttagagcaaatgcgcaacactgtagatgagaagctgcagaagacattgaacgagcgtcttagccagtcgtttgaaactgtcgggaagcagttgcaggctgtacaggaggggttgggcgagatgaaaaatcttgcccaagatgttggcgggcttaaaaaggtacttagcaatgtgaagatacgtggaggaataggagaggtgcagctttcgatgctcctggaacagatgcttgcccccgaacagtatgatgccaacgtggtaaccaaaaagggaagcagtgaacgtgttgagtttgccatcaggctgcccggtaaagaagagaatcaaaatgtagtctatctccccattgatgctaaatttcctaaagagacctacgaacatcttattgatgccttcgaaaccggagatccggcaacaattgaaattgcaaaccggaatatggaaaatgtaatcaaaaaaatggctaaagatattcgcgacaagtatatagacccgccaaatacaaccgattttgctattatgttcctccccttcgaagccatttatgccgaggtaattaggcgttctgcactttttgatcaactgcaccacgagtttaaaatcattgtaaccggcccgacaacccttgccgctatactgaacagcttgcagatgggttttcgcacgctagtcatccaaaaacgtagcagcgaagtgtggaatattctttcagcagtaaaaactgaatttgcaaaatttggcggcatgctcgatagagctcataaacaaataactacagcagggcaaaccatagagcagctcaaaggaacgcgtacaaatgcaataaaccgcaaattaagagatgtgatggcattgccaaatgatgaatctgcagaggtttttcccgaactcgaaagcgctgatattgatgatgagtttgagatagaaggataacagacttgatgaataatagggtaaacctcgttttaatgtttatattttgcaattctcatttcgttggattataaatatccaatcgtttaactattgtcaaatttttaatctgggtttgtctatttttgtaaaaaataattatagtgatattcccaccaaattttgaagagaaaatcggtttcgatcatatccggcagatgcttgttgatatgtgtgtaagcagtatggggaaggagtatgtggaaaaaatgaggttcgaaacggtctttaaccggatagagcgaaaagtgagtcaggtattcgaattcttggaaatcctgaagtacgaacaaccctttcccgctcaaaattatttcaatttaatacctgaattacaacgtataaggctgtcgggaacctatattttgcaggaacagctgttcgacctgaaaagctccctcgaatcgctcaacgaggtaattgtgtatctgcaaaagcttgacagcgccaaatatacattactctcggagctggttgaggataaaagggttgatagggttattctgaacgaaatatacagtatcattgacgaaaaggggaatgttaaagatactgcatccgagactttgagagatataaggcaacgacttattaagctttccggcgaaattgaaaaggcagtgcgccaggttttagtaactgcgaaaaagagtggctggcttaacccgaacgatgaaataacaatccgcaatgggaggatggttatccctgtgcctgccgccaataagcgaaagataagaggttttgtacatgatgagtcggcaaccggacaaacagtatatattgagcctgccgaagcccttgatgcaaataatgaaatactcgaacttcggaacgctgaaaagcgagagatcattcgtattttaacctcttttactgataatctgcgtccaaaaatcgaagagcttattgaagggtatcggtttttaggattgattgacttcatccgtgctaaagcgcttctggccggcaaaatcaatggtacgaagccatttatgagcaatgaaccgttgattgactggcgaaaagcattacatccgttgttatttctcgttcaccagaaacagaaaaaacatgtcgaaccgcttgatatattgttgaataaagagaataggattttaataatttccggacctaatgcaggtggtaagtcggtgtgcctgaaaacgaccggattgattcaatatatgctgcaatgcggcctgctcgtccctatggatgataattccaaaacgggtgtttttaaagatatttttatagatatcggcgatgagcagtctatcgaagacgacctgagcacctatacctcacatttgcgcaatatgaaacatcttgcgcttaaggcgaacaagaacagcctcttcctgattgatgagtttggtagcggcacagagccacaacttggaggcgccatcgctgaagctatcctcgagcatctgaataacaaaggtgcatttggagttattactacccattatgccaatttaaaacatctggcaggtaaaacgcccggacttatcaatggcgctatgctgtttgatacaagagagatgaggccgctataccgcttacaaattggaaacccaggcagctcatttgcttttgaaattgcaaaaaaaacaggattcccctggtttatccttcgaaatgccgaacgtaaaatcggtaagacgcaaataaagttcgaacagcaactgcaacaactcgaactcgaaaaaaaagaactgacacaaaaacaacagagcttaaatgaagctgaaaagcaaatgaatgaggcaaagtcgaaatatgatgagcttaccgccaaacttattgagacaaaagaaaagacgctgagcgatgcccgttctgaggcgcaaaggataattgctgatagcaataagttggtggagaataccattagggagataaaagaggcgcaggctgcaaaggagagaacaaaaaagataagagaaaagcttaaggttgagtccgaacggattttagctgagccgcagaagaagtcagaggcgaaacctgttgagcaaactaaggccgtaattgcccgatcgaaaaaagagaaaagcgctaaagaggatacgaaaattttagtaggaaaccgtgtgcgtatcttgccacagcaaactgttggcgaggtgatagaaataacaggaggcgaagcgatagtgagttttggcagtataatgatgcgtgcgaagctcgaaaaattagtaaatgtgggagaggaggagttttatcaacaggttatgataaaaaagagaggcggggagaatatttttaatgaacttaatacacgaatggcaaacttcagcgtaactctcgatgtgagaggaatgcgcgctgaagaagctgcaacggctgtaattcaatacatggatgaagcacttttgctcaacataaaagaggtaaagattatccatggaaaaggtgatggcattttaaggaaagtggtaagagataacttacgctcgattgacgaagtgattcatatagaagacgaacatattgaaaggggaggaagtggagccaccgtagtcaggctaaaatgaccgctgagcagtacaaaccttgaatgatctatcgaaatcctattttgtgttgaatcattgctgatcatcctaaagtagttcctaaagatccaatttttatttcaactaatgtctgttctaatgctgtaatcgtaagcatcccgattatatttcttggaagatgtgcaataagcagaatggaaaaaaaacgacccatgctaaggcacgggccgctttaaatgttctcacaacggattcatccttattgtgatttgcatcaaaaatttcagcggcaaatatacatgtttttattaaaagttaactttttcaaattatttttaataattatctccgtaaacatattacttttatacccttataacatacaacttacaaacatcacttaactatgaaaaagattttaggcttggatttaggcacaaactcaattgggtgggcattggtaaacgaagctgaaaatgaaaatgagaaatcatcaattataatgctcggtgttagggtaaatcctttgacggttgacgagcagaagaattttgaaaaaggtaaaagcattacaaccaatgccgaccgcacaatgaagcgcggtaagcgtcgcaatcttcagcgatacaaacttcgacgtgaaaacctaattgaaattttaaaagaaaatggttttattacagacgaacccattttgtcggaaaacggcaattacacaacctttgaaacctatcgtttaagagcaaaagcagttacggaagaaattacattagaacaatttgcccgtgtacttctaatgattaacaaaaaacgaggttataaaagcaaccgtaaagcaaaaggagccgaagaagaaggcgtactgattgatggaatggaggtagccaaactactatacgaaaaagatcttacgccgggacaatattgcctgcaacttatggagcaagggaaaaaacaattacccgagttttatcgctctgatttacaagaagaatttaatagaatttgggcaaaacaacaagaattttattctgaaatcttaacagataaactgaaagaaaatttacgcgaaaagagtgaaaaagcaacttggactatttgcaaagaaccatttaatattgtgggcataccaagaacaaccaaaggtgaagaattaaaaaaagaaaattttgcgtggcggacaaaagctctttctgaaaaattggatttggaaagtttagcggttgttctacaaaaaattaacggacaaatcaacaattcaagcggctatcttggtgcaatttccgatagaagcaaagagttgtacttcaacaaacaaaccgttggacaatatcaaatggccgtattggctcaaaacccaaacgcaagccttaagaatatggtgttttaccggcaggactatttggatgaattcaatatcatttgggaaaaacaggccgagtttcacaaaaaagaactgaccgaagaattgaaaaaggaaatccgcgatgtaattattttttaccaacgccgactgaaaagccaaaaaggtttaatcggtttttgtgaatttgaaagcaggcaaattgaggttgaaattgacggcaaaaagaaaataaaaactgttggaagtcgtgtcattccccgttcatcgcctttgtttcaagaatttaagatttggcaaacattgaataatttagaagtttcaggcaaaggcagaaaatcaaaaaagaaaaaagagcatagcctttctctttttacaaaccaagaggacccattgctaatttatggaaaacgtgaactttatcaggaagaaaaagaattgcttgctactgaattgtctattaaagaaaaacttaccaaatcggacatcttaaagttgctgtttgacaatccgcaagaattggatttgaattttaaagaagttcaaggcaatttaacacaagcaaaactttttgctgcctacagagatattattgaacaaacgggacatatactcgatttgaaaaaatcagcctctgaaattttggaaaatgtagaacaaattttttccggtttaggatacaataccgacattatacgatttaattccgatacagataatttggataatgacccaatgtataaactttggcatttgctatattcctttgagggggacaattctaaaacaggaaatgaaaatctgattaataaaataacaaacctctacggatttgaaaaggaatatgctgctattctagcaaatataacttttcaggacgattatggttctttgtcggcaaaagctattcgcaagattttcccatatctaaaagagggtaataaatacgatatttcatgtgaatatgcaggctacagacattccgcaagttcattgaccaaagaagaattagaaaataagatatacaaagaccgtcttgaaattcttcccaaaaactctttacgcaatcctgtggttgagaaaatacttaatcaaatggttcatgtggttaatgcaattattgcagaccctcaattaggaaaacctgatgaaatccgcattgaactggctcgtgaattgaaaaaaaatgcaaaagaacgtcaagagttaacaaagtcaattgaagaatctacccgtatgcacaaacaatatagggaaattttatcaaaaccacccttcaatcttacttatattagcagaaatgacattatccgttataaactttacgaagaattgaaagacaacggatatcacacactatattctaacacatatatttcgcctacaacattgtttagtggagattttgatgttgaacatattattccgcaatcgcgactttttgatgatagcttttccaacaaaacattagaactccgcagtataaatattgagaaaggaaatgctacggcgtgcgattttgtaaaagaaaaatacggagaaacaaacaatgagaatagtatggaaaactatttaaatcgtattgaaaaactttataaaaccggagtactgtcacgtgccaaatacaacaaactaaaaatgcaggaaaaagatattccgagcggttttatcgaacgtgatattcgtaacacacaatatattgcaaaatatgcaaaaacaatgctaagtgatttggtaaaagttgttgtttccacaacaggtgctattaccgatcgattgcgcgaagactggcaattaatagatgttatgaaagaattaaactgggaaaaatacaaaaacctcggtttgactacagaatttaccaatgaagaaggatatcgaataagacaaataaatgattggacaaaacgcaatgaccatcgtcaccatgcgatggatgctttgactgtggcttttaccaaacgtcaatttattcaatatctcaataatcttaatgcacgcagaacagatgaaaaccaaagtatatccaacacagaagaagaagaatacgataattttgcaattacaacagaagacgtgctactgaacacaagagatgttttgggtattgaaaagaattatttgtatagagaccatagaaataaattgcgtttttatccgccaataccgttgaacgattttcgtgccgaagccaagcaccatttggaaaacaccttgatttcgataaaagcaaaaaataaagttacgacacagaatatcaactttacgaaaagaaaaggaggcgtaaacaaaaaaacacaacaaacgccacgtggacaactgcatttggaaacagtatatggtagtcaaaaacagtatgttgtaaaagaagaaagcgtaaatgcaaaatttgatgctgaaaaaatagcaacagtaagcaaacctgcttatcgcgaggcgttgttacgtcgtttgcaagaatttgacaacgaccctaaaaaggcatttaccggaaagaacagtttgacgaaaaatcctatatggctcaacaaactccaaaccgcgcaagtaccggaaaaagtaaaaaccattagttttgaaactgcttataccattcgcaaagaaatatcacctgatttgaaattagataaagtaatagatttaggtattcgtaggattttggaaaaccgattgaaagaatttagaaatgatgctaaaaaagcgttctctaacttagacgaaaaccccattcggcccaacaaggagaaaggaattgctattaaacgtgtaactatttcgggaattagtaatgctgaagctctgcacgacaaacgagacaaagaaggaaatttgattttggacaaaaatggcaaaccacaacctgttgattttgtaaataccggaaacaaccaccatgttgcagtatatcgaaaacctgttttggataaaaactggaatcatgccgaagatgaaaatggcaacaaaaagtatgaattagaagaaaatgttgtttcgttctacgaagcggtgagcagaaaaaatttgggtttaccggttattgacaaaacctataaggcaagtgaaggctggcaatttctttttagtatgaaacaaaacgaatactttgttttcccaagaactgaaaaggtggaaaaaatagacgaagaaacaggcgagattaccgaagaagaaatagttgttttcgacccgaacgatatagatttactcaatcccgataattacaaattgattagtcctaatttgtttagggtacagaagttttcaaagttaatttatggaaattcagtagttagagaatatgttttcagacaccatttagaaacaagcattaaaaatacgagtagtgttttgaaaggaattacttggattgattttagaagttcaaaagggcttgacaaaattgtcaaagtccgtgtaaaccatatcggaaaaattgtttcggtaggagaatattaaaatttttatactcatcggatgctactcatcggatgactttaagtcatccgatgagttacgaggcaggatacctcaaagtcatccgatgagtaaacaaaacaaactatgcaattcgaagaaggacatatttatcatatctacaatcaagggaacaaccgtcaaaagattttctttgaacgggagaattatctcttttttctaaagaagatgggcgagcatttgttacctcattgcaatattttagcgtggtgtcttatgcctaatcattttcattggatggtggaagtaacgaagcgggatatagtagttgctcacggggtgtctcaaagtaaccttgcgagtggtaatcatccggcaaaaagcctcgaaaaactccgctctatcaacgacagtattggaattttgctcagatcatacacccgtgccataaacaaagcgcataagaaaagcggctcgcttttcagaccaaaaaccaaagccgaatgcctcacttgcattgacggaattacaccagcattcttcaatacaaaatacggaaccattataaatataaaagaccccgaaaaagagtatttacaacagtgtttcaactacatacatgaaaatccggtgaaagccggaatggtgaaaaatgctacagaatgggagttttcttcttgtttggattattacggaaaacgaaatggtaaactgattaatagagaaagagcaaaaaaaatcctctacaactcatcggatgactttaagtcatccgatgagtaacaacgggaattataaagtcatccgatgagtgactatgcgcagggcgggattccccaaagtcatccgatgagtatcatccgataagtgggaaagtatgctgaaattaaccgattaatcaataaataacgctatgataaaaagaactctttattttggcaatccggcttatctttcattaaaaaatgaacaattggttattcaattgccggaagttgaacaacagagcttgcaactcatcggatgactcaagctacaactcatcggatgactttaagtcatccgatgagtgactatgcgcagggcgggattccccaaagtcatccgatgagtatcaaccgataagtgggaaagtatgctgaaattaaccgattaatcaataaataacgctatgatcaaaagaactctttattttggaaatccggtttatctttcattaaaaaatgaacaattggttattcaattgccggaagttgaacaacagagcttgaaactcatcggatgactttaagtcatccgatgagtaacacacaaaccgaaagatacagaaagctcaactgttaagcattccggttttagacgtaaaaattgatggaagccgaagccccttaatgattgctgccggtataaccactgcttcgctgtataaatgtttctcaggagaaagcagaagaattaaatatccttattttgttgactaatgcaacgtttaagcgaataccggattatgtggtattagtattcttcgacctgccgaccgagacaaaaaaagatcgaaaagcacatgcactttttcgaaaacgattaatcggaaatggatttaccatgtttcagttttcaatttacctaaggcattgcccgagtcgtgaaaatgcggaggtgcatattaaaagagtaaaaaatatgttatccgaaaaagggcatgtaggtattctttgcataaccgataaacaattcggaaatatggaactgtttaaaggtaagaaaccggataaaccacaaatggcatcccaacagcttgaacttttttaaaataataaatcccgtctaaaagggcaggatttattattgttgaacaactttttttatttctaagatgccttgcaacaacctattaatgtgtgcattatacacatcctgttgttcacgacatcaaagatcgaaaattttgaaagcaaatcacaacttaattcatttgctttcatggtctaaaaatgttgttcacgacatcaaagatcgaaaattttgaaagcaaatcacaacagatttcgaccgagaaatatttgaggatggttgttcacgacatcaaagatcgaaaattttgaaagcaaatcacaacaaaatttacaagttttgaccaatttcagcagttgttcacgacatcaaagatcgaaaattttgaaagcaaatcacaacagatttcgaccgagaaatatttgaggatggttgttcacgacatcaaagatcgaaaattttgaaagcaaatcacaactacctaagaaactacaaaaataaaaatggcgttgttcacgacatcaaagatcgaaaattttgaaagcaaatcacaacagatcatccaaacgtttagacattacttcagttgttcacgacatcaaagatcgaaaattttgaaagcaaatcacaacatacctgtaaggcttttagctaaaatttcggttgttcacgacatcaaagatcgaaaattttgaaagcaaatcacaactccataagccacaacctattgtgcgtgtacgttgttcacgacatcaaagatcgaaaattttgaaagcaaatcacaaccgccaattctatgtccaacaattcttgcgagttgttcacgacatcaaagatcgaaaattttgaaagcaaatcggaattagcaattagcaattagcaattagcaattagcaattagcaattgagttgttcggggtggcaaagatagaaaaaatttgacaagtaagaacaccatacacacattatgaaccaattactttttattctttatggcttgaaggttttagaattattatccagtaaattccgaaacttttactcccatgtcgaagcagtctatatgcagccaagaaacgtttttctctattctgacgttgtaaggtaataagtgttgtttttttctaatcagatttcttgctttagccgctgtcatacctgtattaacgctgaagacagaatcaccgccttcaccaagacaatgcgctgacaaatagatttgattatttaaagttttactctttacaagcggacaaatattacaccttaatcccctttgagtaatatttccgccaaatacataatcatttattatcataggaacatccagaacctctgtacgtaaaataagtagggtgtgtaaatattcagtgcttaggaatcgccatgataattcaccaaacttgttaaaagtatgtgggcaaactaattcttcaatcctgaagtacattcttatgttttctattatttcattccttgtcattttttaaattgtttttagcgcctggggcatgatttgtatctatacaattttaatcacattaactattttttcttattactgatggcttgcagtattccattttctctctgtttactgccactgctggagccgaaaaagaaggtagtaactgtgctcacaattcctataaaaatatctatcgtcatatagtttgtttaggacatcaaagatagaaaattttgattattgacgtaaataaattgcttaaagatggaataaatgaaagcttcccgaagttataaataatatctttgaaagtaaagttattaatcgcagaattggtattgataaaatagaaaagcctaaatctaaaacgagttatgaaaactttaaagctaattaattgttaaaatcatactaacctttttactgttaataagatggatgaagagacttcaaaaaaacatctgtggatgaaatcaggactttttcgttatatcccttttgccaatgttgttgggatcatgttagggggtatcggtggatatatttactatttaaaggtagtatgcgttacaggtggctgccctctcacttcaaatcctattatcacaatagtttggggggggagctttaggctatcttttttctgatctcttcagaaaacgcaagtcaaaaaaggagtaatcctttagaacgcaaagagcctttattcactgatcatctcccgttgtttcttacttaacttgtttacaaccaaatcataggagtgatcaatcatctccatgattagtctattgcttatacttccgttaagtgttactgtgttccaatgtgttttgttcatgtggtatccaggagaaattgctacatattgttcacgtagctccacagcccattcggggttgcacttcaggttgatggttggtgttattgcatcgagcggcaaaaatgcgaatatttttccggctaccttaaaagttaaagtaacgtcatcaaaaggagtgctttcagttacacctttcttaaccagacaatagtctctaatatcttcaatgttcattattcgttccttaggttccgatcactcttttgttagtatggctgcaaaccctccgcctgcggctaaatggattttcatttttgtgttgttgttcactttttttacttcgtaacgatagtcttctgcatggcggtcggcgttaataccgtcgctcattatttccatgttgtacttgccatcgggcaaaaagtcgagaaccatatctaagtcacgagaaaaatggtttgtcatagccgcgatgtaccagttgttaccacttcgtcttgctgacaggataaattcagaaaccgaagcatcgagaataattgtttgatcccatatagttggaattttggaaaggaaagccggtatctccggctcgttaagatactccgaaggagagtcgcagagcatctgaagcgggctttcgtaaattatatacatggcaagttggtggcaacgcgtaccaaggctcatagggcgttcgaagcttggggcaaaattttttctgttggcgttacgcatggcgcccggggtataatccatcgggcctgcaaccatacgagtgaagggcaaggtgaggttatgttccggcgtaatctgagcgctccatttatgattttcgttgcccttgactccttcaaatgttagcacatttggataggtgcgttgcaaaccgtttggcttgaaacagccatgaaaatctactatgagtctattctttgctgcaacttttgcaatctcctcaaatatgtttaccatttgctggtcggcgcgttgcataaagtcaacctttatccctgcgacaccccacgttgcatacgtattgaggatttcttccaaattgcttagtagcggcttccaaagtacccaaaggataacgcctacaccttttgatttcccgtaatcaatgatttcatggagatttatatcggggttagaggtgagaatttcagtggttgattggctccatccttcatccagaataatgtattcaaggttatatttcgaggcaaaatcaatataatatttataggtgggtgtgtttagccccgatttgaaatccacttttcgcaggttgttggcgttgtaccagtcccaagctactttgccgggcttaatccaatcggtttcgtcaatagcttgtggtgatgacagttgataaaccaattgattagatactaacttacgatcgtcattggtgattgtaaagatgcgccaggggagactgcgtttaccattggtctttgcgatataatcagcctcttttaatatgatttcgttcctgtcgggcgagtgctttgggttggcttcgctttgtaaaatgtattttggaaatattgcatttaattgataatttccgttggtagccagaaacaatgcaggataatcatgctgatcggcttcggatatccatattctgaccttctccggcgtgcttgccagtaaaggaagcgcgtgaaattgaccggatggaattgtatccagacgctggtaagtaaatagctgctcgaaatgggataagaatgaactctcagccgaaaaccagcagtgcgtttgtgcgggaaattcaatgctcagaatctcatttttaatttctacgtcatctttaaaatcggttgaaaaccgataagctaatccatcatcgtaaaccctgaaaacaagatggttgccattgctaagatagagtgtcagctcattgtaataatcctcaatttccgccgatttcaccggaaccgttacccgtaaagttttcttatgttgctggatagtatggtttacaaccgttgtggtttcatcaaagagttttccttgattcgtctctaagtttatattaacatttggtatggttgtatgcccgttgtatgtaaccgaccagcttatgtttttatcagtgttagcggttaacgtcaatgagccgtcaggcgataaaaccttgaacggttgggcacaaagtgagatgctgaaaataaaaaaaaatgaaagcagaggtagatgtttcatcaaatgataaattaagattgaacgacaaagataacagaactgccttttcctgctctaaatttgaagatacggagcaggttgttgcaaaataagggttaatacagccatttgacaagctttgtgtttcgattttcactacatttaagccatttaattcggcttatttaaaatcaataaaaatttaatactcttgtaattatagatgtttttcctgttatttttgttgataataagtttgtgatttataatatcaaaaagatgaaaaaaatcctgctttttcttattcctcctcctcaatggcgaatggcagctactattgttttggggatcatagtcggtcttgctttttttatttttcatattagtaaagcaacttcatatctatccgacaaacccgaaacctgtattaactgccatgtgatgtatcctcagtacgcttcttggaaaaatagtagtcatcatgcagtaactaattgtaccgattgccatgtgcctaaccataatatttttctaaaatattattttaaagcgagcgatggggctcgacatgccacaatttttacggcgcgtgctgagccacaggtgattagtataaaacaggctggagctaatgcggtgcagcaaaattgtaagcgttgccacatggatttggttgaaatgacatccttggttgagcatacctataaatcggcacatgcaggtgatggaaagctgtgttgggattgtcatcgtgaagtgcctcacggatcggtacgtagcctttcatcagctcccttttcgttagtgccaaggttgccttccattactcctgattggctatcagcttctttaaaacagaataataaatagtaaataaaatttatatcaatgacaaaagaaacatcatctcaaaagaaaccttgggtaaattgggcaatattccttgttaccgtagttattgtttttcttatagggctttttgcctcatcaattattgaacgtcgtagcgaatcgcagctctatttccagatggtaagcgaaatccctgattgggagccacgcaacgaagtgtggggtcagaattttccccgcgaatatgagtcctatgttatgacttccgacacaagttttaagagtaaacatttcggatccgttacaatagattaccttgataaatatcctgaattagtagttatgtgggctggatatgcatttgcgagagattataaacagggcagagggcattattatgctattgatgatataaggcttacattgcggacgatacagccacagccgggaacatgctgggcatgtaaaagcactgatgtgcctcgtgtgatgaatgaaatcggcattgctgagttttataaaaaaccttggatagaattaggggcgcagatagtgaatcatatcggttgtcaggactgccatgatccaaaaacgatgaatctacgcatcacccgccctgggttgatagaagcttttgagaggcaagggagaaacataaacgatgccacacatcaggagatgcgctcgttagtttgtgcacagtgccacgtggagtattatttcaaaggagaaggaaggtaccttacttttccttgggataaaggctatggcgctgatgaaatggaggcttattttgacgaaaatgcatttgccgattgggaacatgctttaagtaaagccccaatgctgaaagctcagcatcctgattacgagctttatatgaccggcgttcatgccgatcgaggcgtttcatgtgccgactgccatatgccgtatcagcgtgagggaggtttgaaatttacaaatcatcatatgggaagcccgttgaataatatttccggatcgtgccaagtatgtcaccgtgagagtgaagagaagttacggcaaaatgtatatgatcgtcaggataaagttgccgagctgcgccgtgttgtcgagaaaaacttggcaagagtccatattgaagctaaaacagcatgggatgccggcgccacaaatgaagagatgactccagtgctgcaattaatacgtcaggcacaatggcgctgggattgggtggcagcagcaaatggaatgggaatccactcaccggtggaggcattacgggtgttaggcgtttcaattcaaaaatcgcaagaagcgagagtgttacttgcagaaatcctgacaaaacacaatatcccaattcctattacattgcccgatattagcacaaaagataaagcccagcaatatatcaatctgccaatggatgatctaaggatagaaaagaaaaagtttttcgaagaagtggtgcctgaatggataaaagaggcaaacgaacgcgaaagtaaatttcaagagaaaagaataaaaatatcggaaagttaaacccggactgatcattagaaaactcttttaggctgatttttttttgacgttaccgttaaaaaaaagaagataattttaacccgcgaaaagtttttgataaaaccaaatgcaggtatggcgtcctgcatatcatcacgatcgggagcaaagtcaacgtagtcggttatacgcttatgtttcgtttgtggcaaactatcccagatacgtgaataaaggatttttttcagctaatgtcatagagcggctgagcatcgttcgggctgcatctattttttacttatttgtttataaactttctgaataagatcaaaatcgaagggcatagtattaaatattaatgttgcgctgtaaaaaggttcataattaatgatttaaagggtgtaaaaaaatgttaaaccgattattaatgcctgataagtcattctgtttctattgatttatctgcaaaaaagattttacacattctttttttggtttatttttgtccgaaaaactgaatatttatcaataaacaccaaataaaattcaaatgaaaagagcttatatttatgttatcgcagcgtttatgattgcatttcaaggttgtcagcagccggtaagcgtaaaatatccggaaactaaaaaggttgatgtaaaagacgattatcacggaactatcattgaggatccttaccgctggcttgaggatgataaatccgaagagaccgccaaatgggttgaggaacagaacaaagttacctttggatacctcgaacagatcccttttagagaaaaaattaaaaatcggcttacggagctatgggactatcccaaatatagcgtaacatttaaaaaaggagatcgctatttttattttaaaaatgaagggatgcaaaatcaaagtgtgttgtacgttcaggaaagcctggatgccgagccaagattgttgcttgacccaaatactctttctgaggatggtaccgtagcgctgtcgaattatagtgtgtcaaaagatggaaaatatttagcctacggaatttcgagaggaggatcggactggaatgagatttttgtaatggagattgaaagtgaaaaaaaacttgatgatcaccttaaatggatcaaattttcgggtatctcgtggaagggtgacggtttttattatagccgttacgacgagcctacaggtagcgagctgtcgtcgaaaaatgagtttcacaaagttttttaccatgaaataaatactccgcaggatcaggatattttggtttttgaaaataaagatttccctttacgcaattttggcgcaggagttactgacgatgaaaacttcctgatcatttacgaatccgaaagtacatctggcaattctttgtatg

SEQ ID NO: 2094 - DNA, 24383 bp, synthetic construct
  misc_feature 1..24383: note = Synthetic
  source 1..24383: mol_type = other DNA
cctttcctgaaatttcgcccgcaattttttcaacacccttcctttcagaattcgaaagtgcaaccagtatatcgccgtttggagctacatagatatttcgcggacttttcataccgtcggcaaattttgtaaccgtaaaaccctccggagcaaccggtgttttacccgatggccagccaatgactttgctgaattttgtatgagatttcgtggtatcgggatccggcagattaacatcctggttcgagctcgtttttaccgttcccccggtccctttacctttctttttttcctgctgattacaggcgagcaagccggccgttaatatcccaaagagtgcaagttgcgatatttttttcataagcttagtttaacgaacaacaccgcgaaacagactgtgtttgtaaaaaatcaatcacaaaaaaagagcccgaaggctcttttaagtttaaggtttgatttagaaattttattacaactcttcgtcgtgctgggttaaatccaaaccggcagcttcttcttcaggagaaacccgaagcggactgataagatctgttactttaagaagtataaatgatccgacaaatgcaaataacgatacgccaaccagcgcagcaagatgcacaaggaataaatgggtttcgccataatacaatccttccgaagccgcactatttacgtttttagttgcaaaaataccggttagaagcatccctaccatacctccaacgccatgacaaggaaatacatccagggtatcgtctacgttagtacgtgaacgccagatcactaccaggttactaactactgcagcgataatacccactgccaaagagtgaggtactgttatgaaacctgcagcaggcgtaactgcaaccaagccaactacagctccgacacaggcgccaatcgctgatggttttttaccacgtaacatatcaaagaatatccatgaaatcgctgcagcagccgacgctgttgttgttgtagctaaagccgtagcagccaacgcgtttgctccgcctgccgaaccagcattaaatccgaaccagccaaaccaaagcaagcctgttccaagaataacgtagcttacacgcgctggtgtgtgctgaggatcggtacgtttcttcagatacaatgctgaagcaagcgccgcccatccagccgacatgtgaacgactgttcctcctgcaaaatccaaaacacctgctttaaacattaaaccatcgggatgccaggtagcgtgtgctaacggggcataaatgcagatcatgaataatgttataaaaatcaggtatgaattaaaacggatacgctcagcaaaagccccagtaatcaaagccggcgtaattacagcgaatttcagctggaacatcgcaaacaaaaccaatggtacggttggcattaacgaccaggttgcattaccgagcatgcccttcatcatgaaaaaggttgaaggatcacctattattccgcctttatcttcaccaaaagcaaggctgaagccaaacactatccatagaatagtgataagtcccatacagacaaaactttgaagcatcgtagagattacattcttctttcgtaccataccaccgtaaaagaaggcaagaccaggcgtcattaagagaaccaaagctgttgacaccaaaagccaggccgtgtcgccggtgtctatagtaacatctttaactgtaactacctctaccgaagggtacatgaaggcgagaatcagcactacaattagcagcgcaaagggtaacacttttttcattgtttgtttagtttagatttgattattaagcattaattttccagtttctattacttttccgaaattcagcatgatttaacgcaaaacgtttgtgaactcaagcgaaatacacctaaatatcacccaaaatcaattttcaatccttataaactagtgaatttggaagcatggactaaatatgcatgttattttgagtaattcataatttttttgcaataaattttaattttatcataaatcaaaaaggtaaaatgtgaatttttcatacaatttgacaaattaagataaaatactatcacaatacaagcatttactgcagaatcctaataaataagatcggttcatcattacattttaaagcaaggtcactcgtaagtgcattgataccttaatcgtttacgtgatgtttacttactaaattatttgttggtttttcagaacagctaaatcagcttggttagagacatcgggagatacttgttttcttgataaaatcatccaatgcggggcgatcgttacaccacagccattatgattcgtcgcttttctaaatctggaaaaagacaaagcatagccgtcaccaggatcaagggattgtcatgtggatggactaaatcctggatccttccgaacccgtgcctctgccgggaattatacattgtagatacagcaacccgcttaagaccgtcgctaattctcatacaattaatttaaatatttccgttcttcaattcccttaccgcataatcggctgccctggcagttaaagccatataagttaatgatgggttttggcaggcgcttgaagtcatgcaagccccatccgttacaaaaacgttgggtgcgttccaaacctggttatgagcattcaacactgatgtcctgggatctttacccatccgggcggttcccatttcgtgaattgccaaaccaggggcttgctcggtgttaaattgggtgacatttttgaatccggctttttcgagcatctcggcgccggtttccaaaatatccttagtcatcctgatttcgttatccccgtatttacaatcgatgtttaacagtggaatgccccatttgtctttattatttgcatccaggctcactttgttattcacgtcagggagacattctcccatcccgttcatattcatttgccagaggcccggttcggttaaactttctttgaaatcttttccaataccaacaccatcaggcacgtcaccctgtgatctcgatccacttccggcgaaagcatagccacgcaaaaaattttctttacctgaatcgtttaaattcctgaaacgtggcaggtaaacacctgttggccggcgtccgtaataatacgaatctttaaaacccggatgttcgccatacagccgtccgcggtaattgtgatccatcaggtaatgccccaatgcaccgctgtcgtttcctaacccgttaggaaaacgagaagacgtagaattcaaaagtatcaacgtggaattgatggtgctggcgttaacaaaaatgatttttgcaaagtattccgttgcgtgaaatgtattggtatcgatcacacgcacgcccgttgccctttgacttttctcatcataaataatagaatggaccactgaaaaaggccgcaaagtaaaattacctgtcgctgcagcggcgggaagtgttgcagaattactgctgaagtatccaccaaatggacaaccgcggtaacacaaattccggtactgacacggcccgcggccattgatgcctttcgaaagattggccgtacgcgatatgatcaggttcctgccgggataatttttctcaatgctgcttttgaaatgtttttctaaaatattcatttccattggcggcaaaaattcgccatcaggcacctggggcaggccatcacggttaccacttatgccggcaaatttttccgcatagctataccaaggcgctatatctttataacggattggccagtcgacaccaacaccatccttggcgttcgcttcaaaatccaggtcgctccagcgctgggtccatcgcgcccaaagcaacgacttaccgccaacctggtaaccacgtatccagtcgaacggcttggtttgcaagtatggatgctcatcgtcttttacgaaaaagtgctgtgtttcttcattgaaagcataacagcgggaagcgatcggattcttttggtgaatatttaaggccagttcgccccgatgtttaaattcccagggcggcatggtcgcggtaggataatcttttatatgctccacatcgcgcccacgttccaggaccagggttttcaagcccttttcacacagttccttagccgcccatccgcctgaaataccagaaccgattacaatagcatcgtaactatgttcatctttacctttgctgtttatgttcacggatgccggtgctttattgtctgccatgttatagggttagttgttaaatattggcggcgatggttttgcgacttatttctcctgaaactttgtccttcaggataagaactttggctcctgaaggcaaaatttcgtccttgatcaaatagtgatggtcatcaaagctggtcagcaacgtagcctgagttatttcctcttctccacgccaaacatccagctgaattttttcccagcgcccggatttagccgatgcgtaagccgcatcaattacggcgtttacgatgtatccgtcgtaaaaattttcctggggttggcggccctgttcaatcgcatcaaacatatccgtaaacatattggtatatcccagttcgtgtacttcatcgcctaccgggaaaagccagccgttgctggtttctgctttttcggccacgtagccgcctttccctgaactgaacatttcgaaacctgtccgcaaaaagttgtttatccaaatggagccttctgttccctgcacttcatcgcgcagatccattccacccctgaaacaccagctaacctcaaactgtcctatcgccccgttttcgtacttcaccaggccgatggcgttatcttccgcttcaatcggatgtacctgcgttgccgcccagcacattacctcaaccggttttacatttttacctatatagttccttgcaatctcaatacaatgacaacctaaatcgacaatagcgccgcctccagagagttccttattccagaaccagttgctgtggggacccgggtgtgcttcccgtgatttcgcccataaaattcttcccaggctgccgttcttaatactttgcagcgattttaaaaatttgggtgagtaacaaagatcttcgaggtagccacccatgattcccgcttcatcaaccagttgcagcatttgttttgcttctgcggcggtacggcccagcggcttggtacacagaatatgtttttgagctttcgcacaagcctgtacggcctgcaaatggagatcgttagacagagcgatgattaccacgtcaacgtcaggatgacttaaggcttcttccaggtttgtgctgtagtgaggtatgttataatccgatgcgaatgttttggcacgctcttcggttctggaatatactaacattactgtgtctttccggcgctggccgagcaaagaatctgcataaaaccgggcaataaaacccgatccaagtatggctattttcattggttataattggtttaaaagtcgattgcgctcattacgcccaaccgaaagtatttttaacatattgaagactgtttttccaatcttctttaatcggattaacaggcggtgagtcaaatgcaagctcaacggccgctctgcctttgtagttttgttcgtttaatgctttggcaatcgccttaaaatcgatggttccagtccccactgtttctgtccacttgccatcagcagtttgatcacggatgtgcatataaactatctgcttgccgtatgtgtttataaattcgaccggatcaactccacccctaaccagccagtttaaatcagggcctagtttaatatccgggatacgggccaaagttcccttcagatcgtgcatgccgttcaccacttcgtaagtgtgattatggagattcagaataactccatgatcctcgcaaatttttatcaactttagaagcaggtcggcctgagcatctaactctttttcggtttttaagcgttgagcatcgcctaccgatacaccaaaagtgcttccctttaattggtgtaaacgatcaacaacaagcgctacatcatccaaaatttccgaatgtttcgagctgttccacatcgctccgttataagaggtaccggtaacaggaactttatatttctcagccagttcacttaaacgacttacggcgtcatcgtggcgcaaatttacctccatcaactccaacccgtccaaacctgcatattgaaagtcagagaaggcctgctcaattacaggtgttgaatcccattcaggtggaaacttacttgcatacacccagatgtgcccgctgatctttactttcctagatttggacagaaaatttgcagctttgacaatttcattacttaataaaacattacccgcaataaaacccgtggtagttataaaacgtctgcgattcataactggttaactattttcgttattaacttcctgctcccagccagtttctttcaaagccggatcattttcctttttaagaaaatcggcatttgataacgattcagattcccattccagaatggcttcatcaggaacaacattaacaggtgtgtgccatgaagttgaagtttcgttgtacgcaaggtttgattgcaggctatagcaggaaataatggaccatctcggatgatctgaaagattagcctcagaacgatgcagcaggttgctatgaaaaaatagcgcgtcgcccggctccagttcagaataaaccagctccatagttttcaatgcattatcgaccatttgcatatccgcaccaacctgttcgccgctgaaaccatggtttacccggccgattttatgtgaatttttaataacctgcaaacatccgttttccttataagcaggggttaaggcaatcatgacacttaaaagctcatcgggaaacatgaactgatttttataccagtaaccataatcctggtgccattcccaagcgccgccaactttgggttctttctgcatcaacttggaatgaaagtgacacacctttgctttatcgccaagtaattgctgcaccgaattaaccattttttcacttcgagtcagataaccgaaaacatcgtttcccggagtaaaccataacgatagctttgtttttttaccgctctgatcgttaagatccagcgcattatttttcatggcactatcatctaaagctgtagcgtacaacttatcaatttcttgcgcactgcaaaagttttttacgactacataaccttgctgatgatacagttcgacctgatctgcagataatttaaagcctgacatataattggtttttgttagaactaaggtaatatgtcaggcaggttttaaactacttgttaactggcaggaactgatacttttctaacattattttaaacaaacagccgtaaaccgtatcattgtgcaatgaagccggtgttagaatatctgccacgaagttcggacgaatcttttgtaacccggtttttcgattatcactattatccaacgccctggcatttccatcccgaatatgaattggtgcttgttaccgagagttcaggaaaacgttttatcggcgatcagatcagtgatttcagagaaggtgatttggcattaatcggaccttttcttccccatctgtataggaacgatccggaatattatgagccgggatcaaaattacgggcgaaatccatcgttgttcattttaaggaatcttctttcggaaatgactttattaaccttccggaagcaaaaaaaataaatcaacttttattaagctcgggacaaggctttgatatttacggcgaaacaaatcggattatcagcgaaaaaatgtttgaactaacaagtatagctggtttttcacgctggctgaaactgcttgaaattttaaatattctggcagacagtaaagaattacgatctgtttcaaataaccccgtcgttggaaaaaatcaattagagtccgtccgtatgaacaaagtaattgatcacgtaattaataattttcataaggagatcactatttctgaggtagcggatatagccagtatggcagataattcattttccaggtatttcagtcagcgcacccgtaaaacatttaccagttttgtaaacgaggtcagattaaaccacgcttcaaagctattgatcgaaacacaaaaaagcataattgatataagcctcgaatgcggcttcactaatttgtcaaatttcaaccggcagtttaaagcgcattatcattcaagcccgttaaatttcaggaagcattaccacggataatcagatatagcaagttgaataacagcattgcttatgctagcatgcagatacgattgccgttgtagcactgttcggagtcgaagtgatttaaagtgacctgaaacaggcagtaccgaaaggcttaataaacaaaaagcacctgccggtggggcaggtgctttacgataactgtatggtgatttattagattactttaacattgatcgcattaagacccttacggccttcttctacattatagcttacctgatcgttgtcacggatctcatcgataagtcctgtagcatgaacgaatatttcgctcgcattgtcattttgtgaaatgaatccaaaacctttttggctgttgaaaaatttcactgttccttctttttgcattatatattttttaatgagcgggcaaggtcggtataataatcggctaatgagcacgattgcgaaatagtttaagcaataggtaaattaaatgacattcgttaggataccaaattcaacagaggctctgaaaattcaacaaataatagcgaatccaatctcgaacgaaatgtgtaatcaattcctgatttatttagatttagcgattgcagattaaacctgaatttagtcgtgacctggaacagaatctgggtgtccattcaacaacactggctgttttctcttcttcaaaatcggcaaagaaagcgatcagcccgatcctgtagccatccacgaatttacgcttgaatctgggcgtacttagttccagcattaccttaatagatccgttttcgataaaagtatttttatgatttgccgttatcagccggctaagcggataaccttgtgtatctcaaaacgccggaagccctgcaggttcggagcttcgttatttttatagtgagcccggaataccgacagcatgcgctgccacaataaaccgccgccaaagtcgtggcgaacctggccgatttccattttcaacaaggccgccgctttgttggctttaactaggtttgcagcgcttgccttaaaggcatcattgatctcaacagccttttaagttccccttggtttacgggtatgggtcccgtaagaacgactgtcgacaataatatcacctgttgccgttcgtgctgctttttttcttgccatttacagaataatgcgtattttagatcatccgactaaaaatagcaatttcctgctgtttcaaaactcaagatattttaaattacagcgacattacagcgaccttgtagcgtactttgagcgaccttatagcgatacttattgtgtcctcaaagtgtcttcattcggtcgacatcgtgctatctatgggctggaaggtacttttgccgaacaaggtccctcgcaggtagcatgaagaagcctcgtagaaaagggaccgaaattagactcttaggagattttgcagaaaaacacctgtataaaaaggggtgttttacacggagtaaaaagggtgtttttaaacataaacttaattctaaattttacatctttaaaaactaccaattacagcactggctggtgaaaaatgtgcttcgaggacggtcaaagatttacctgaaaagtatgcaccatcaggagtatcatttgtaaaattgattgcaacgcagatatggaaaaaataaaaatgccccgcagataggcgaggcgctaaatgttttcacaacggaataatccttattgtgatttgctttcaaaacaaacataggtatttatttaagatacctccaaataaatgatattaattctgaaacaataaaaaaggcaatcaaatgttaaaaaacattcttggattagatctcggcacaacgtcgattggctttgcccacgtaatagaaaacgaaaaagacatatcgcaatcggaaattaggcaaattggggtacgaatcattcaatatgacaacttcgttaaaattgataaatcaggaaaggttagtgagtctaaaaaccctgaacaagattttgcatcgggtaaaggcctatcgccgaatgctggtagaaccttgaaacgcggtgccagacgaacattagatcgatatcaggatagaagaagcaatttaatcaacaccctgttcaatgctaacattattacacacgaaaccaaactggcagaagatgggaaaaacaccacgcattctacttttgcactgagagccaaagcagttgtttcaaaaattgagaaagatgaattagcaagggtatttttagctattaataaaaaacgtggttataaaagcagtcgcaaagcgaagaatgaagacgaaggccaagcaattgacggaatggctattgcaaagaggttatacgaggacggtttgactgcggggcaattagtactgaacctattaagagaaggtaaaaagaccattccagatttttaccgctctgatttactggcagaatttgataaagtatggagttatcaaaatcaattttatccggaaatacttacaaacgaatttaaaaaagaattagaaggcaaaggtcagagagcaactgcgggtttgttttggatttgctatcaattcaatacagctgaaaataaggctaaatcgagggaagaaaagaaattacaagcctaccaattgagaagcgacgctgtttccaggcagttagaaaaagaagaagttgcttatgtgatagcggaaatcaacaacaatcttaataattcaagcggttatttaggtgcaatatcagacagaagcaaggaactttattttaagcaagaaaccgttggacaatatttatatcgtcaattacaaaaaaatccacataccaaacttaaaaatcaggtcttctaccgtcaagattatttggacgaatttgaagctatttggaaagaacaagctaagcatcacccagagttaacagcagaattgaaaaccgaggttcgtgatatcactattttctatcaacgcaaattaaaatctcagaagggattaattagtttttgtgagtttgaaagcaaagaaatagcaattgaccgaaatgggcaacagattaagcaaaccgtagggttaaaagtcatacctaaatcttctcatcttttccaggaatttaagattttgcaacgtttaaatgacgtattgattcgtaaaaaaggaagcaaaaaaagagttgctaaaaataccgatgcacaaggtgaattattccagtcagaagaagaaatcttcgttttagaccacgataccaaacaagatttatttatcgagttaaacctaaaaggaaatctgccttcatcgaaaataattgagttgcttggctacaaacctgctgattgggaaatgaatttttctcaattggagggaaacaagaccaaccaatcgttatataatgcctacctaaaaatcattgaaaatgaaggctacgacttgaaagaattgttgaaaattaaaatcaacagggatgagatagaattaaacgaccttgacactccggctacagaaataaaaaaaatggtttccgatatttttgacagtttaggaattgatacatctatactggaatttgatgcagaactggaaggtaaacttttcgaacaacaaccgtcttataaattgtggcatttgttatatgcttatgaaggcgataattcgtcaagcggtaatgaaaaactttacaaattgctggagaaaaagttcggctttaatcgtgaacaatccaaagttttggccagtgttacctttttggatgactatggaagtttaagcactaaagcaatccgtaaaatttatccattcattaaagaaaataattacagcacggcttgcgaattagcgggttacaggcattcagcatcttctttgactaaagaggaaattgctaagagacctttgaaagataggttggaactgttaaagaagaacagtttgcgcaatcctgtagtagaaaaaatattaaatcaggttgtgaacgtgataaatgctttaatagtcaagaacagtgaaagggatgaaaacggaactgttatcaaagcttttcattttgacgagattcgcatagaattggctcgtgatttaaagagaaatgcagaggaacgacgtgaaatgacagcaaatatcaattccgctaaaatttctcacgataaaatattcaaactattgcaaaacgaatttgggattaagaacccaacccgaagtgacatcattcgttttaaactatttgatgagttgaagaacaacggatacaaggatttgtacacaaatacttatatacccagagagattttatttagtaagcaaattgatatagatcacatcatcccgcaagccaagctgtttgacgatagcttttctaataaaacggtaatttatagaagagataatttagataaaggaaacaaaactgctttcgattacatcctttcaaaatatggagagctagcctcaatcgaatatcagcaaagaatcgccaacctttttgagcaacggaataaaagcaaagacgatgcaagttccggtatcaacaaagccaaatatcagaaacttttaaagagagaaattgaaattggcgatggttttattgaaagagacttacgcaacagccaatacatagcaaaaaagacccgaaatatgctttttgagatatccagagtggtgacgcccacaacaggcagtattactgatcgattgcgtgaagattgggatttgatcaacattatgcaagaactcaatttcgataaattcaaaaagttaggccttactgaaatggtagagaaaaaagacggcacgtttaaagaacgtattgtagattggactaaaagaaatgatcacaggcaccatgcaatggatgccttaacggttgccttcacgaaacataatcacatccagtacctaaattatctaaatgcccgaaaagatgaaactcataagttgcacaacaatatcataggtattgaaacattagaaaccgactggaaatatgatgatcaaggtaataaaaaacgagtttttaaatctccgcttatcaattttagagaacaagccaaagatcatctagaaaacgtattggtatcacacaaacctaaaaacaaagtaaccagcaaaaacaagaaccaaattgcaggcaaggacaatcctcaaattgtcttgacccccagaggacagctacataaagaaaccgtttacggcaagtataagtactacgtttcaaaggaagagagaattggtggcaatttcgatttagcaaccattgaaaaggtaagcaatcccgcttataaaaaactgcttttccaacgattagcagaaaatggtaatgaccctaaaaaagcgtttaccggcaaaaacgccattggtaaaaatccaatttatttagatgccacgcaattggaacaagttccagaaaagatcaaattagtttggttagaggaagactactctgtaagaaaggatgtaactccagaaaatttcaaagatgaaaaggctatatcgaaaatattggaccagggaataaaggaaattttactggacagactgcgcacaaacaagggagattcaaaaaaagcattttcagatttagataaaaacccagtttggctaaacgaaaaggaaggaattgccataaaacgggttaaaataagtggtgtcaaaaatgccgagccactgcatcacaaaaaagatcatttgggtaactcgatgttagataaggaaggcaaagaaattcccgttgattttgtgagcacaggcaataatcatcatgtagcaatttacagagatgacaagggaaatttacaagacaatgtagtgtctttttttgaagcggttcagttggtaagtactggagagccagtgatcgacaaaagttacaatcgaggactaggatggcagttcctgtttacaatgaaacagaatgaattttttgtatttccgaacgacaagactggctttaaccctaaagagatcgatctgttaaaccctaaaaatgcaaaagttattagcccacatttgtttagaacacaaaaactttctaaagtaacctatggaaattcagcggtaagagactatgttttcaggcatcacctcgaaacctctgtcgaagaaaaaaatgaacttaatggaattgcctataaacaattaaaaagtttagcatatctagaaggcgctgttaaagtccgcctcaatcacttaggtgaagttgtcaaagttggagaatattagttcaaattgaagttataattatttaatcggtgaatcacttagcatgattaaaaagacactccacttttccaatccggcttatcttaatttgaaaggaaagcaattgcaaattgacctgcctcatttgcgagtgctcggcgaggatgattcgaaaaaaagtgtagctatcgaagacatcggcatcgtagtgcttgaccatcaacagattaccatcactcagggttgccttgcagctttgctggaaaataatgcggcgatcattacctgcgaccgctcccacatgccaaccgggatgatgcttcccattgacggacatgacacgcaaagcgaacggttccgctaccagatcgacgcgtcccttccactcaagaaaaacctttggcagcagaccattcaagccaagatcctcaaccaggcggcagtgctggccttacgtggaatcgaccacgagaatctgctgcgatgggcaagagaagtgcgaagcggcgatccggacaactatgaaggccgcgcagcagcttattactggaaaaatgttttcccaaagaaggtcgacttctttcgtggaagagacggcgatccacctaataatctcttaaattatggctacgctattttacgcgctattgtagcccgtgccttggtatgttcgggcctccttcctaccctcggcatccatcataggaataaatacaatgcctactgcctcgccgatgacatcatggaaccttacaggccttatgtcgaccagatcgtcctccgggtcattgatgcgggtgaaaattttcttgaattgagcaccgggattaagtctcagttgctgggaattgccaccgttgatgtccattttgaaaagggccgcagtccactgatggtgggcctgcagacaacgaccgcctcactcgctaaatgttacgaaggccagcataggaagataagttaccctttcattcgaaatcttcaggcaaagagccgttcatacaaggagcgagaattggagccatttatggctgctgaggatgagacggagtacctggcggacgatgatgaactcccattctgacgatgcgcttaaatgaatacaggattttgtggatactagtatttttcgacctgccgaccgaaaccaaaaaggaccggaagctgtacactaaattccggaaggacctgatggaagacggctttgcgatgttccagttctccatctacctgcggcattgcagcagccgggagaatgccgatgttcatatcaagcgtgtaaagaaagcgcttccgcctaaaggtcacgtaggcatcctgacagtgacggataagcaattcggcatgattgaacttttttatggcaaggatgagaaaaaattacccgatacgccgcaacaactggaacttttctaaaacgcattacaatctgaaatttaaaatcgccattcagaattacatccggccgttcatacgaccggatttttaaattctgtttttttcttcaaacaactgatattcaaatccttaaaccagggtatgctgtggtaaatatcagttgttcaaagaatgaaagcaaatcacaactacttgattcttgcaatactgcggaattttgctgtggtaaatatcagttgttcaaagaatgaaagcaaatcacaacgacgccgtttttctgaaagccagtgaataggctgtggtaaatatcagttgttcaaagaatgaaagcaaatcacaacatagacgaaaaagcggtactcaacctggtagctgtggtaaatatcagttgttcaaagaatgaaagcaaatcacaacaaatctgttatgctttcgtagctgttcatcgctgtggtaaatatcagttgttcaaagaatgaaagcaaatcacaaccattttagttatctttgccatttcttaaatgctgtggtaaatatcagttgttcaaagaatgaaagcaaatcacaacttaccaagcgaaatacaaatccaggcagaagctgtggtaaatatcagttgttcaaagaatgaaagcaaatcacaacattaccacctaactcaaaagggattcggcggctgtggtaaatatcagttgttcaaagaatgaaagcaaatcacaactaaagggcgagctttgccgacaacttctttgctgtggtaaatatcagttgttcaaagaatgaaagcaaatcacaactccgcgcggtaagttctgaaactggactaagctgtggtaaatatcagttgttcaaagaatgaaagcaaatcacaacagcaacgcgattaagctaaaacaagatttagctgtggtaaatatcagttgttcaaagaatgaaagcaaatcacaacaactttttatatcgtatgatttgatgaaaggctgtggtaaatatcagttgttcaaagaatgaaagcaaatcacaaccggcaaactttataaatggaaccatttcatgctgtggtaaatatcagttgttcaaagaatgaaagcaaatcacaacttgctaacggtatgcttgcaaaaacaaagagctgtggtaaatatcagttgttcaaagaatgaaagcaaatcacaactttccctagcggttacacgttagcatcagggctgtggtaaatatcagttgttcaaagaatgaaagcaaatcacaactccgatttcgtggcatcgtagtactgaactgctgtggtaaatatcagttgttcaaagaatgaaagcaaatcacaacactataatgaaacctacaaagggtcgcaaagctgtggtaaatatcagttgttcaaagaatgaaagcaaatcacaactccgacaggtacactgcaagaacaagttctgctgtggtaaatatcagttgttcaaagaatgaaagcaaatcacaactgcattgactattgaatccggagatctgcagctgtggtaaatatcagttgttcaaagaatgaaagcaaatcacaacttaaagaacgttgggataaaaagaaaacagctgtggtaaatatcagttgttcaaagaatgaaagcaaatcacaaccagatttgctgcttttgctcatcgatcgggctgtggtaaatatcagttgttcaaagaatgaaagcaaatcacaactccgggactaatggcagtcggaggaagattgctgtggtaaatatcagttgttcaaagaatgaaagcaaatcacaacaagctgcatattcagctacctaaacataaggctgtggtaaatatcagttgttcaaagaatgaaagcaaatcacaactactgttcaatatttcccctacgcgcaaagctgtggtaaatatcagttgttcaaagaatgaaagcaaatcacaactataaagaaaggctaattattgccggggctgctgtggtaaatatcagttgttcaaagaatgaaagcaaatcacaacagcagctaacctctactaaaaagtctgtacgctgtggtaaatatcagttgttcaaagaatgaaagcaaatcacaacgaaaacgccgagcaatatcaaaaattgttggctgtggtaaatatcagttgttcaaagaatgaaagcaaatcacaacacgtccatagattctaccgcggctggacgcgctgtggtaaatatcagttgttcaaagaatgaaagcaaatcacaaccctgcatgggtagctatgcacatggaaaatgctgtggtaaatatcagttgttcaaagaatgaaagcaaatcacaacagcttcttatgcaggatgctcacccaggcagctgtggtaaatatcagttgttcaaagaatgaaagcaaatcacaaccgcaagcctaccagaaaggaaaagattgaggctgtggtaaatatcagttgttcaaagaatgaaagcaaatcacaaccgcaagcctaccagaaaggaaaagattgaggctgtggtaaatatcagttgttcaacgaatgaaagcaaatcacaacaatgattcatgtatggagaactattcagcgctgtggtaaatatcagttgttcaaagaatgaaagcaaatcacaactgggaaaaccgctgtgctgaaagtgtcttagttatggtaagcagttttgaaaagacggtattccgcctagacgcacctttcatctcctcaccatattcactacttttgagctactgatgctacccatttttgaaaaatacatcaaagcccaatccacctccttcacggacgaggaaatccggcgaataggtgctgctgctattcaaagaaaagttcgaaagaaagagcttcttcttaacgcgggcgaggtatgccgttacaagatgtttattaccaaaggatttttacgcacttaccgcatcggatcggacggaagcgagcacctcatgcagttttcgccggaattaacctggacaaccgacggagaaagttacgctaaccgcaatccgtctgattacaacatcgatgcattagaggacagccagctattgttatggagcaaagacagttttgacgcactgcttaccctgattccggcactcaaagctttttccgatcagcttatctctaacaacctgcattccagccgaaaccgcatttacaaagccataagttctaccccggaagaaaaatacgaggattttatcagaacctatcccggtattctcctgcgcgtacctctgcgcatggtggcttcttacctgggtatgtcggttaaaacactcagccgcatccggcaggcgcagcttcaacactaaattgaaatcgggacaaatgtcctctttcgaagcaccgctctttcgcaactttgttaagtaaattaaggatgctgttgaatccccgtgtgctatgcatacatgcttcgcagcacctggcaacaaattaagaaagaagaatatgcgaatatttgtaacgggagccacgggtttcgtcggctcagccattgtaaaggaacttttagatgccggccacaaagtgcttagccttgcccgatcagcttcatcggccgatcagctaatcgcaataggtgccgaggtgcaccgcggttcactcgatgatctcgaaagcctgaagagaggcgcagagctggcggatggcgtgatccacacagcctttattcacgacttttctaaattcggcgaaaactgcgagacagatcgcggggctattgaggcgatgggttccatattggcaggcacggacaagcccctgattatcacgtccggaaccggtttatttaatttgggacgccttgttaccgaggacgatcaaatcactgttggatcggccagtcctcgaaaagcttcggaggaagcagctgcggtggttgcagcacagggtgttaaaatatccatcgtaagactgccgccgtctgttcatgatgccggtgattatggtttcgttcccttgctgatcgccctggcgcgtgaaaagagcatgtccgcttatatcggagatggcgacaaccgctggcctgccgtgcatcgtttggatgccgcacgtttattccggctggcactggaaaaaaatgtgccatcgatctatcatgccgtgggcgaggaaggactgctattccgcgaaattgcggaagtaattgggaaaaatttggctctcccggtagtaagcaagtccggcgaagatgcagctgaatactttggctggttccagcattttgcatctctaaacagcccggcatcctctgaacaaacacgaaaagctttaaactggcagcctacacacaggggcttgattgctgacctggattcggaagcttattttaaacgaagcgaataatttcctggtatttttctgtcctttggtgtgtttaaataaataccggccatgcgtttaaggccttgtgacgtatgagcgaagcacggaagtaaagaaaccaagactcactggcactgtttttcggaaaatacacattactacaccgcgttattggtgtctcacaagaaacatttcagatcgttggtgagggacactaacgatgggttagagatgtctcctatcgtcgacatgacagtgaaatgaaagacgcaaatgctgccaccatttttcacatttttttatcattcaattccccgcgatctcatagtttttcttttcttcataatttaggtttcccaacctgcttatcccctcaattacgcaaatcaagaaaagaatatgaaaatatttaagattcatctatatgtgtttctaacaggagcggcttgttttcaagggtgcaaaaaagacgctggacaggcagaaaaacaggacattaactactccccgattgctaagagtctggcaacaacatcaagcgatgatttttcaagtataacctggggatcagtgaaaagccagccaattttaactcacgaagtacacggcgatgtagtaaacggtaaactatacatttttggcggctatgatgtcaataaaaagcctgcctggacgcccacaaaaaaagcatttgtttatgatcccatagcaaatacctggaaatcaattgccgatttaccgcatacgccaagcggacaaggcttcggtggcatcactcacgccggcgtcacaaatgatggttcagacatttacattgcgggtggctatacatcaaatgcaaacggcactagtcaactttttggcactaaacaggtgtggcgctataacatttccacaaatacgtatacgcgcttacccgatctgccacaatcgctggcaacggggcagcttcgctttttaaacggtaagatccactatatgggaggagccaacttatcacggcaggatgtcaatattcacctggctttggatctttctaatctcacagccggatggcaaacgctggcttcacttaataatcccgccaaccatccgggatccgcagtatataatggtaaaatctatttccttggaggtgctcatgaacaaaacgaaaataccgttacacaaaaaacgttagaagtttatgatgaagcaacaaatacctggaccaacctggcaccgatgccggtcggccgcgatcatattgcatccagtgtggttgttatgggttcgcgaataatcgttttgggcggggaaacatcgcacaacgttttgagcaaactggtgtcggcctattcacctgcaaccaacacatgggccgaacttactccgcttaatacggctaaatcagcaggcgttgcgggtgtgttagatggaaacatttattataccggcggaaattttgctgccacaaatcgaaagggagtgccggtatataacaccactgagacaattttactgcctacagacgatgcttatgtacgcgacggaagcttcgcggcagacaattatgggctggatacgattctattcgtgaaggcttcaacaagttcaggcttttcaagaaaatcttatttaaaattttcgctaagcgatatcagttcggtaaatacagccaggcttagaatttatggttataatgccgacaatagctctaccattacaatttcctgttattctgtagataacgattcatggacggaacaaacgatttcgcaaaacaatgctccgtcgaatggaacaaccgcgttaagcacgtcagcggtaaataatgtccgtaagtatatagaatttgacgtaaccaattttgtaaaagcacaagcggctggagacaaattggtaagtttcgcaatcagggacgcaggaaatacaaaaatcagcttatactttaacagcggacaaaacaattcaaataaacctcagctgattataaactagctaatgctaaagacatcattgcattgagatatattataaactggaatcacaaacaaaaaaggggaatcgtaatgactccccttttttatttcttacatgtatactgttaaccggcattaaacgaatcaaatacattttgctggttaagaaaattagatttataggctccatctgttccattgataaacaggcaggaatgcccttttacctggtctataatgggtttgcttagttccggtggcagggccggacagccaaagcttctacctaatcgtccatgctgattaataaagttctggctgacataatcagctgcatgcatcacgatagcacgacttaaagcattgttattatagccggcatccattccattaagcttcaatgaaaggccatgtttgccaaaatatgtaccttcagttacataaaaaccaaggctgctttggtgcgattccgcattgtttgaaaaattcgtcgccacatcgtcaccacttccctgtccgtgtgcaaccaatgagttaaaaagaagcttcctgtttgcgacgtcaattacccaaagtcttttttgtttacttgagcgggacaaatcgacaatagtgatcagatcttttgaaagaattccctcctgcttcatgttgtaaaaaccaacaagtgctttcttgaaaacgtttatatcaagatctgttccctgtaaattagctgcctgatagattccgcttacatattgttcaaagcgagactcgcgggatacagtttttacttcgccatctgcttttgcggcatgagccttcccatctgctttccagcttaaaaaccctgtaatcaataatatagcaacagctgcaataatgtacgatgaatattttctcataatcttcactaaactttccaaacgaaaatactaatacttattttgatttactgaataacaaagataaaactttatcattttcaatttatccgttaattgtcagtttaaattccaataatttaggatgctaataattttagttgctaaatttgtcttatgtatgcgattgttgatattgaaacaacggggggccatgctcaaacaaatggtataaccgagatcgcgatcgttctgcacgatggggtttgtgttaccgagcgatatgaaactctcgttaatccgcaaattgctattccgccgttcattacagcgctcaccggcatcagtaatgacatggtttttaatgcccctgcctggattgatgtcgccgaaaccattcataaactcctggaaaacaaaattttcattgcacacaatgtaaattttgattactcgtttgtaaagtttcatttatcaaaacatggctttgacttaaactgtaaaaagctatgtaccgttcgtttaggccgaaaaatcttcccgggattatcgtcttacagcttggggaaattcgctaaacaaatgggcattaataattattcaaggcatcgtgctgcaggggatgctgatgcaaccgcaaagctattcgagctgatgcttcagaatgacaccaataaacatattgaacaggcgctaaaacatcattcgaaagagcaggtattgccgcccaatcttccaaaagaacaatttgaatcactcccgtatacgcccggcatttattatttccacaatgctaagggaaagatcatatacgtcggaaaagcaaaaaatataaggcggcgggtgttcagccatttctcgaataacagtccccgtaaacagaaacaggactttttacgcgatattcatcagctcagctaccaggattgcggcaatgagctaatttcatttattctcgaggagatcgagatcaaacgtttgtggcccgaatataaccgcgcgcaaaagcgatttgagcaacaatggggcatattcctttttgaggaccaaaacgggtataccaggttagcggtcgacaaaaaatcgcgccttacgaatcctgtgttatcgtttaaccaggcgctggaagcttacaactttttaagccgctttgttgaggataacgagctttgtccgaaattgtgcttcatacaacgtaaccgcctggaatgcgccggtttaatttcaggaaaatgccacggtccatgttgcggaaaagaacaagcagaaacttataacaagcgggtcgaagatgcatttcgtagcctaaagctcgcccagccgacttatgcaattatcgaaagcgggcgaatgagagatgaaaagagctgtatcctggttgaacagggaaagttctacggcctgggttatattcaaagcgaatctgttatggatgatctagagcttgtcaaaagatcagtaacgcc

SEQ ID NO: 2095 - DNA, 24365 bp, synthetic construct
  misc_feature 1..24365: note = Synthetic
  source 1..24365: mol_type = other DNA
aggacggcgatgcaggccacggcgatgacgatgaagccaatccaaacggcgagccagtcttcttttttccagaggttggatgtgttgtttgccatagtgttttctttttagaatttataattgaccataccgaccacgcgatgggaatggttcttttggtattgaccttcgacttttttgagtccatcaataaaggaataatccactttgaagttgaggttcttcaacggccaatagttgataccaacggtgtaataactcgttggagcggaaacattaggaaggaaataaacaacgtgatcagctgtatggatttgaaaaacgccaacttgctgctcgaaatgctcataacgcaagacgggcatcagtttctgttccttgccttctttgccaaattggaagttgtatccagccacggcgtagtaaccagcactattgaattggttcggagcatcttcgccttcaaaaccataatagccagttgtgccctctaagtattcggcgcgaaccaaaaactttccgtcgttgtattgcaagccagctgcccagcggttacgaacaccgttgaaatcctcgtctttgtagtagtttccgtggtaatacgaaccgctgagtgtcaaggctttcacccaagggtggaagtccaagcgacccacaatatccttacggttgttgttgtcgagctggttggcgccgttgccattgaacacgccgatgctgtaatcgacgatgccgaatttgtctccgttttgcgtttcggcagggaagaggctacccgtggccatgataccgaggtcgcgaccaatggaacccacgccgcagacatcgctgtagccgacaagtttttggacgctctcgccgtagtcgaaaatttcgaggttgacggggttgatggggctttcgatggagaacggggtcttgaactgtcccacttggatggcaaactcgttgcagactttgtacttcacaaaagcatcgacgagcatcgggctgcggctgaagtcgccttggatcttgtaggtcaatcccttggcgaggtttccttccaccgacatacgcacgcggcgcattctaaaggtgttgtccttcaattcgccttcttcagttaggttggcttggtacaagccttgtacgaagcctgaaatcttgggcatacggtcaatcttgccttgaagatcgtccactttcttgtttacgtcttgtgcgctgacacacaacggaatggatagcaacatcattccaacgattgtacgaaaaatacgtttcatagtgtttgaaatttatcgtttttcaattttaaaatcgctgcaaaagtagtaaaaatacttatagtaagtatatttactaattattttcgatgaaaaatgtggatgtgagcgtgtttcaaatccctaaaagttccgcatgtcgcgtcatctcctcaaaagtgatcttgaaccattccgtataatgctcgggatgggcttcgagatcctttttcaagtcgttgaggctcatgtgtttccatgattccacttcgtcgcggttgatgttgggcgcgtcgtcgctttggccgatgaagacgtggtcgaactcgtgctcggtgaggccttgcccgacgggtgccttatatataaaggtgtaaacttcgcgcatctcgcaagtcatgcccatttcttcctgaaggcgacgttgggcggcttgggctgtggtttcttcggtgcggggatggctacagcaggtgttggtccaaaggccaggggagtggtacttcgagagagcgcgttgctgtaacaacaattcgcctttagagttgaagatgaaaatagagaaagccctgtgcaggtgcggcgtcacgtgcgcggcttgcttctccatttggcctatgggctggtcgttttcatcgaccaaaatgacgtattcctccattacacattgaatctaatattcagaatgtcaccgtcttgtacgatataagtcttgccttccacgcggaactttccggcttccttcacggcggcttcgcttccgtatttcaggaagtcctcggtgctcatcacctcggcacggatgaagccgcgttgcaggtcgctgtggatggctcctgcggcaatgggggcagtgtcgcccacatggatggtccaggcacgggtttcgtcgggaccggtggtgaagaaggaatgtaagttcaaagtgtgataggcggtgcgcacgagcttgttcacgccaggttcggtgaggccggcgtcttccatgaagagggcgcggtcgtcggtgtcgagttcggcgatttcggcctccaacttgcccgcaatgacgagcatgtcctgaccttccttcaaggcggctttcacggcttcggaatacttgttgcccgtggtggctgaagcgtcatccacgttgcagacgtagatgatgggttttgccgtaagcagctgaatgtcttgcacatacttcttgtcttcctcggccactttcgcgtcgcgggcgttcccgaggttctcaagggtttccttgtaaactgtcagcacgtcgaaggctttcttgtagtccttctcgccgtttttgagcattttctgtgtgcgttccaactttcgggttaccaaatccaagtcgcggacttgaagctccaaatcaacgagttccatgtcgcgcacagggtcgatgctgccttcgctgtggggaacgttggggtcgtcgaagcaacgcacgacgtggatgagcgcgtccatggtctgcacctcggccaagagcttgttgcccacgccctgaccgcctttgctcagtcccggcaggtccacgatttctaccgtggcgggaacgatgcgcttcgagtgggagatgttgtcgatgagcttcagccgctcgtcgatcacctcgcacattccgatgttcgacttcgaggcaaaaccgatttctgccttagtgtttgaaatacaattgaatatggtggtctttccagtgcttgaaagaccgatgattccgcaattgagtgacataatgataaggtttaatttgctgcaaaaataggaaaaattattgtctgtcgcccgcgttccagtcgatttgcctgtattcggtgttgaagccggtgctggtttcgttgatttggaagtccatgtcggcggctttggcttcttcggcttgcagacgcgagttttcctgttgctttcggatgtatttcaggccgagtttccacagcttgatgtcgccccaaatgaacacagcgtagatgacaagtgtgaccataggggagaggcggtctgtaaccatcagcagccagtcgaaaagtccgtgggcgagcatggccaaaagcagtcccgacaaaatataagtgccgcgtttttcgggatggaatttcgccaacgaaaggaaatggcccagcaccactccgaagaggaaatgggctggcacagagagcaatgcgcgcaccacgcccgttgcaaagccatagttgaaaacgtatgtgatgttctccacgcaggcaaagccaagcccgatgaaagtggcatagacaatgccgtcgaaatactcgtcgaagttcttgtcgcgccaaatcagcagcatgaaaatgaggaacttggacagctcttcggggatgccagcctccataaaagagctgaaaaacacggtgttggcaatgaaagtgttgccgaataacaagccgattcccgtaacgatgagaatgtccaacggaatggacaacatgccgccaaagaaggcctttgcgagcgacttgacaggctctttctggtacttgtcctgacggtaaatgaacaccatcagcaccacgacgggcagcacggcgatgccaaacaaaataaggtaatttagcatggtttggatactttttgcaaaaatagggaatttgtccgtgaaaaaaacttatttttgcagaaaattttcgtgtatgcaagaaatgatcctcatcctcgacttcggctcgcaggtgacgcaactcatcggtcgccgcctccgcgagctgaacgtctattgcgaaatccatccctacaacaagattccggccatcggtgagaacgtcaaaggcgtaattctcagcggaagcccgttctcggtgcgcgacgagaaagcacccatcgccaaccttgaaggcatcaagggcaaactgccgcttttgggcatttgctatggcgcacagttcatttcccaccattttggcggcgaagtgaatggcagcatcgcccgcgaatatggtcgtgccatgctgacggtgactgacgagcaatgcccgctgttcaagggcgtgagcaagaccagccaggtgtggatgagccatggcgacacgattgcaaaactgcctgacggagcgcaagttatcgcctccaccgacgacgtggagaacgccgcctacaagattgacggcgagaaaacctttgcggtgcagttccatcccgaagtgttccacaccaaggaaggcccgcagatgttggccaatttcgccctcggcatttgcggctgcaagggcgattggacccccgactcgttcatcgacaacaccgtgtcgagcctgaaacagcaacttggcgatgacaaggtcattctaggactttcgggtggcgtggacagcaccgtggctgctgttttgctcaacaaggcgataggaaagaacctgacttgcattttcgtcgataacggccttttgcgcaagaacgagtttgaggaagtgcttgattcctataaagaaatgggtctcaacgtgataggcgtacattccggacatctgttcctcgaaaagctgaaaggtgtcaccgaccccgaagccaagcgcaaggccatcggaacgactttcattgacgtgttcgacgctgaggctcaaaagattgaaggtgcgcgttggctcgcccaaggcaccatctatcccgatgtgatcgagagcgtgagcgtgaacgggccgagttgcaaaatcaagtcgcaccacaatgtgggcggcctgcccgagaagatgaacctcaagattgtggagccgctgcgttccttgttcaaggacgaggtgcgccgagtgggtcgcgccttgggcatcaagcgcgagctgattggccgccatcctttccctggaccgagccttggcatccgcattttgggtgaagtgacggaagagaaattgagaattttgcgcgatgccgacgacatcttcatcaaaggcttgcgcaattggccttgtgagctgccaagcgcgtcatatcccaacgaaatggctgacaacttgtatgatagcatctggcaggcgggcacgatgctgctgcccgtgaagtcggtcggcgtgatgggcgacgagagaagctacgaatacacgattgccctccgcgcagtgatttccaccgacggcatgacggccgactgggtgcatctgccatacgacttcatggcgaaggtttcaaacgatattattaataaggtgaaaggcgtgaatcgcgtgtgttacgacatttcgtcgaagccgcctgcgaccatagaatgggagtaattgattatgagtaagataatgagaatggttttcttctttttgttttcattgctcttgaccactaatttgatggcgcaggtgcatgtggagcgttccaccgaaattgtgaagataggagggaaggaatactatatgcaccatgtgaagcaaggagaaacgctgtatggcatctcgcaagtctattttgtgacggtggaagagatcgaggccttgaatccagaggtgaaaaaaggacttagggcgggcgatgttatcggtattccgatgcgtcttgaggctcccaaaccagccgagcctcagcatgtggttcctaaacccgttgaaccccaacccgcagagtcagaaacggttgtccaacccgttcagcaaccctcagcaccccccaagccaaacgcgacgccaaaaccagtcgtgacgggagacggtgtgcaggtgggtacagattatgtggtcctgcatggcgaagacctttacgacatcgccaagaagttcggcatcgatgtggctgagttcaaggtcatcaatccaggactgaccgaaaaacccaccgccggaactaccatcaaggtgcccaatatcgtgaacaccgacgaatatatcgtccacaaggtggaatacaacgagcgcacctcgtcgctgctgaaacgctggaaggtgtcggaaagcgagttcaggaaaatcaacatttccgttgggtcgcaggtgtttgtgaatcaggtggttctgatacctatcgccaaagtgaaccatgcttcggaaacgccctcgcaggaagccgattacgaagaagaacaacctgcggagattgtttcggcagaggtgatttttgaggaagaggaaccctaccagattccggaatgcaacccgctttcgaacaatgcctcgaagcgttacaaagtggccttgatggtgccgctctatctcaacagcctggaaagtctgaatgtctcaaaggaacaggtgcacaaggtgcaaaagtcgcgttcgatgcggttccttcagttctatgaaggctttaagatggccgccgagcaactgacacaaaagtcggggcttcagttggacctcaccgttatcgatgtgaccgacaatgtttcaacggcaactagtgccttgtcgcaaatccaagggaaggagctggatatgattatcgggccgttcttcggaaagagttttgaaatcatcgaagaatatgccaaagagcagaacatacttgtcgtcaatccgctttcgacccgcgaaatcatcatcgagggcaaccccaatgtggtgaaggcaaaggctggcccgacaggtcaaatcgtgaatcttgtcaatttggtgaaaaggcaataccgcgatgccaatgtattcattgtcagtcaggaattagaagccgacacggcattcctcaacgctttggagtatcgcctcaaccaggcggtgaatgccgaagtgacggtgagcaacgaagaactcttgcactatgcacgcgaggagagcgagcggaaagagatgggcgagaagatggtgacgaccgtcgatgtggaaggccaagtgtattcgacagaggcccttaatgccaacgtgacgggtagcgccgtgctgagcaacgctgtcaagcgattcgcctattcggatgtggggtcgatgaagtcgcaactgtcgggcgtgcgcgacaatatgattatcgcctacggcaacacaaatgtcttcgcgacacaagtgctcaacacgctgaagcgttcgaccgaccataagcccatcacattggtggcgcttcccgactggaccaagttcgagaaactgcttgttgacgacctcttggacatgaacgccatctatttcagtgaccactttgttgactaccgcgaccccgatgtcaaacaatttgtccagcggttcagggatcgatacaaagctgagccgcaacaatacgcttttgaaggctatggggtggcctggtatttcctcaacgccctcatgcaatttggccccgatatgattgactgtctgccatcatatccaatgcaggtgcttcatacgcaatatcgttttgcccatcgcgggcgaggcaacggcatcgagaaccaagcatggagcgtgttccaatacgagggcaaggaagtcgaactggttcccgttgacccctttcaagaatgatggccatgaataagctttggcaaatggcggctttgctggccctgctgatggcttcgtgcggcgacacgacgcagaagtcctactgggagaatggcaagctgaagtcggcgttgaattaccaagacggcaaactcaacgggctgtgtcaatggtattatgctaacggcaatccgcagatggaggcaacgtatcaggacgacgagaaaaacggccattcgatgcgatggtacgacaacggtcatctcgccgaagactgttggtataagcacggccgactcgatagcatctaccgcacctattccattaatggccaactcgcatcggaggagtatttcgtggatggcaaacggaacggcccttccaaaaaatggtatgaagacggacggcttttccaagacggacaatacgtcgatgacatgatggatggctcgtggctcgtgttctatcccgaaggcgaactggcttccaacgccgtgttcgacaaaggcgcgggaaggcaggtaggttacgaccaatcgggttataagtgcatggaagtcaactatcttgacaatgtaaaacacggtaaggaaatccgttataatccagacggaaaagtggtgaaagtgattgaatacgaacacggcaaaatcgtgtcggaagaatgaagccaataggcccgaaaaatattttgctttttttgaaaatcgtacaaataaatgtcctaactttgcaccgctttaccaaatgaagcacaactttcaaaccgtaaaataaacctttaataaaagtcaaaaaaatgaaagtcaatgaaattatgaccgctctggaagccaagcatccaggcgaaaatgagtacctgcaagcagtgcgcgaagtgctcgaaagcatcgaagaagtttacaaccagcatcctgagttcgagaaggccaagatcgtcgaaagaatcgttgagcccgatcgtatcttcacgttccgcgtgacttgggtggaccgcaatggcgaagtccagaccaacttgggctaccgtgtgcagtacaacgctgccctcggcgcttacaagggtggcctccgtttccacaaggccgtgaacgtttccatgctgaagttcttgggcttcgagcaaatcttcaagaacagcctcaccaatctgcctttgggcggtggcaagggcggttccgacttcgacccggttggcaagaccgacgaggaaatcatgcgtttctgccaagctttcatgtatgagatgtggagaaacatcggtcccgaccaagacagccctgctggcgacgttggtgttggtggccgcgaaatcggctatctctacggtgcctacaagaagcttgcccgcgaacacagcactggcgctcttaccggtaagagctacggctggggtggttctctgattcgtcccgaagccactggtttcggtgccatctactatgtcgagcgcatggtgaagcaaaccggcgacacgatggaaggcaagcgcattgccctctctggcttcggtaacgtggcttggggtgccgccatcaaggcttgcgaactcggtgccaaggttgttgccctgtcaggcccggacggcgtgtgcgaactgcccaacggtatcgacaaggaaatgatcgactacatgctcgatatgcgtgcctccaaccgcaacaaggttgaagacatggccaccaagttccccggcaaggccgtcttcactcctggcaagaaagcctggacggtgaagtgcgacatcgcttgcccctgcgctttccagaacgagctggctgaagaagacgccaaggaactgatcgccaatggtgtgaagtacgtcgccgaggtctccaacatgggttgccaacccggtgccatcgccgctttccaagccgccaagattccgtttggtcctggtaaggctgtgaacgctggtggcgttgccacttctggactcgaaatctgccagaacgctggccacatcaactggactgcccccgaggtggaccagaagctgcacaagatcatgaacgacatctatgacatgtgcgtcgagtacggcaagcaagccgacggcagcatcaactacgtgaagggtgccaacatcgctggcttcatgcgcgtggccaaagccatgctggctcaaggtatcatctaatttccagagcaaaaaaggtttttgcaaggcggctcacttgggtcgccttgctttttttgtggctattatgccgccattattgtaagaggaaaaaaaagacgaggcgaccgaaatcgccccgaacttgatgttttcacaacggaataatccttattgtgaattgctgcatatcttgtgctgcaaaaatacaactttttgggattgtgcaattgttttttgaggattttttgtatttttgacgggtatttttcaattctgaaatcattacaattatgaagaagatattaggtcttgatttaggcaccaatagcattggttgggcggtggtgaatgaggcagagatgccaacagaaaaatcatcaattgtgaaattgggtgtcagagttataaactatgataactttgtgagcacagaaacagggaaagattcgatggatcctgtaaaagatttttcaggtggaaaaggaatctcctgtaatgcaaagcggacaatgaagcgctctgcaaggcgaaatctccagcgttacaagttgcgtcgtgagattttaatagatgtgttgaaagtaaacggtttcattggtgacgacactttgttgtctgaaaacggcaacaaaacaacatttgaaacctatcgtcttcgtgcaaaagcggctacggaagagatttctttgcaggagtttgctcgtgttttgttgatgataaacaagaagagaggctacaaaagcagtcgtaaggcaaaatccacggaagaaggacaactgattgatggaatggagattgccaaacgactttacgaagaaaatctcacgccgggccaactttcacttcaattattgatgaatggtaaacggcatctgcctgatttttatcgatcagatttgaaggccgaatttgacaagatttggcaaaagcaaaacgagtattattctgacttgttaactgaacaattgagaagtgatttgcaaggaaaaaacaaagcccaaacgtgggcaatttgtgcgaagccgttccaaattgttggaatgaaacgtgcaaagaaaggccaagagctaaaaacagagaattatcaatggagatccgatgctcttgcgaagcaattggagttggaagagttggccattgtgtttcaagaaatcaatgcccaaatcaacaatgcaagtggttatttgggagatattagcgaccgaagcaaggcattgtatttcaataatatgactgttggccaatatcaaatggcccagttggagaagaacccaaattatagtttgaagaaccaagtgttttatcggcaagattatcttaatgagtttgagaaaatttgggaaacacaagccaaattccataaggaattgacgcaagaactaaagaaagaagtccgcgacataatcattttctatcaacgtccgttgaaatcgcaaaaagggttgatatctttctgtgagtttgaaagtcgtcagattgaagtggagattgacggcaaaaagaaaacaagaaccattggtttgcgcgtttgtccgaaatcttctccgctgtttcaggaattcaagatttggcaggttttgaacattattgtggtttccggaaaagttgttccaaatcaacagacggatttgtttggttttgaagggtcttacaagcaaggtaaacgcttcctttatcaggaagaaaaggaaaaactgtatgcagaactcaactacaaagagaaactctcaaaatcggatgcgttaaaactactgtttggcaatcaaaaagatttggacctcaatttcaaggaattggatggcaatcgcactcaatcagaattgttcaaggcctaccaaaccatcattgagatgagtgggcatggcgattatgatttttcaaaaatgccttctgagaaagccttggagattgttgctgaagtgtttgacggattgggattcgacacggacattctttgctttgactcaagccttgaaggtcatgcgatggaacaacagcccatgttcaaattatggcatctgttgtattcgtttgagggcgacaaatcagagttgggcaatttcaatctcatcgaaaaactgcatgaccgttttggctttgatatagaatacgccactgtgttggctggggtcgtcttccctagtgattattccagtttgagcagcaaggccatccgtaagattctgcctcatttgaaagacggacttgaatacagcgttgcgtgtgaatatgcgggttatcgccattcaaagaaatcgcttaccaaagaggaaattaataataaggtgttaaaagacaggttggagttgttgcctcggaatagtttgcgtaacccggtagttgaaaagattttgaatcagatggttaatgtggtcaatgcggtgattgatgagtatggaaagcctgatgaaattcgtattgagttggctcgtgaattgaaaaaatcggcaaaagagcgtgaggaaatgacgaaatctatcaatgaaacgacacgacttcatgaaggatttgtcaagttattgcaaggagaaccattcttcctcaagcatgtgagcagaaacgacatcatccgttacaaactatatgaagaattgaagttcaacggttacaaaaccttgtattccaatacttacatcccccgagagaaactgttcagcaaggagtttgacattgaacacataatcccacaagcaaagttgtttgacgattcgttctcaaacaagactttggaggttcgccaagtcaacctcgacaaggggaatgcgaccgcattcgattttgtgtctgaaaggtatggtgaacaaggcacatctgaatatgagaaacggatagaaagcctttataataaggtaatatccaagacaaagcgagataaattgttgatgaaagaaactgaaattccaagcggtttcatcaaccgtgacttgcgagattcgcagtacattgccaagaaggcacgggaaattttggaagagattgtgcgcttcgttgtcccaaccacgggcagcattactgaccgtttgcgcgaagattggcaattggtggacgtgatgcaagaactcaactgggacaaatacgatcaattgggcttgacagaagtcattgaaggacgggacgggcagcgtattcgtcgaatcaaagactggacaaaacgcaacgatcatcgtcatcatgccatggatgcactaaccattgcatttacgaaacgcagtttcatccaatacttgaacaacttgaatgcccgtgtacaaaaaggcatggatgattacattgacttggatatggtggaactgtctgaccttagcaaagaagaacgcacggcggctatttatggcatagaaagaaaagaactccatcgcgatagtcatggcaaacttcgtttcaattcacccatgccattggaggagtttagagcagaagcgaaacggcagttggaaagcacattggtttcaattaaggcgaagaacaaggtggtgacgcagaatacaaatgtttcaaaaacgaaatcaggcaaaaataagaaagtccaactcacaccgcgtggtcagttgcatttggagacggtttacggcagtagtaaacgatatgtaaccaaggaggaaaaggtgaatgccgcctttgatgcccagaaaattgctacagttgccaatatgcgttaccgcaatgcgcttatggatcgtttacagcaattcggagacgatcccaaaaaggcgttcaccggcaagaattctttggagaaaaaccccgtttggattgacgaactgcatgaagaaaaagtgccggaaaaggtaaaaaccgtaggctttgaaactatatacactatccgcaaggaaattacgcctgatttgaagttagaaaaagttgttgatgtgcatatccgccaaattttgcaattgaggctggatgaatttggcggcgatgccaaaaaagcgttctctaatcttgatgacaaccccatttggctcaacaaagaaaaaggcattgccattaaacgtgtcacaatcacaggcattagcaatgcagaggctttgcattcgaagcgcgataaggatggtgggctgattctcgacgcaaacggcaatgagcagcctgtagatttcgtgaatacaggaaacaaccatcatgtggcgatttaccgcaaacctaaattggataagaatgggctgcctgttatggatgaaaacgatgagattcaatacgaattagacgagagaatcgtttcattttatgaagccacttcacgcgccatgcaaggtttcccaatagtggataaagattacaaaaaagaggaaggctggcagttcctgtttacgatgaagcaaaatgagtatttcgtgtttccaagatatgatgaacaaggcaatctgattttcaatcccttggattatgatgaaacttggtacaagaatcctgcaaattatgctgtgattagtccgaatttgtctagagttcagaaactttccaaggttaaggcaggtaatagttatgttagggaatatgtatacagacatcatttagaaactacagttaccaagaatgaatctgaattaaggggatttacgtggcagaaaatacaatcatctgaaaagttaggtacacttgtcaaagtccgcgtaaatcatatcggtaaaatcgtttcaataggagagtattaaaaatctatagtgaaatatgaccaacatcaaactatttcaagacaagaaaatccgttccgcatggaacgaagaagaggagcaatggtatttctccgttgtggatgtggtggaggcattgactgactctcctaatccgcgtcagtattggagaaaaatgaaagaccgcgacttaaaggaatatgaaacgtacccattttgggtacagttgaaattgataagtcctgacggaaagatgcgtgctacagactgcgccaacatcaaaggcttgtttcgcatcatccaatccatcccctcgccaaaggctgaacctttcaagcaatggttagcaacagtgggctatgagcgtatgctcgaaatcgaaaacccagaactggcacaagagcgtatgaaggaactctatgagaagaaaggttatcccaaggattggatcgacaaacgccttcgcggaatggccatccgccaaaacctgaccgatgaatggaaacggcgcagtatcacagccgaacaggattacgccattctaacggcagaaatctcaaaggccacctttggcatgactccttcggaatacaaggagtttaaaggcttgaccaaaaagagccagaacctgcgcgaccacatgaacgacctcgaactgattttcaccatgcttggcgagcgcgtcactaccgaaatctcccaaaaagaagacccagaaactttcgagcaaagccgacaaatcgcaaaaagaggcggcaatgtggccggggtggcacgaaaggaaacggagaaggaactgggcagaagcgtgtccaatcccaacaattatctcccaacgcaaaccaacttggaattagaataaacaaccatgatcaaacgaaccctatttttcggcaatccggcctacctttcgctgaaaaacgcgcagttggtcatcaggctgaacgatgcgcaaacgcaacaggaagtgaccaagaccgtgcccatcgaggacatcggtgtggtggtgcttgaagaccgacaaatcaccattactaacggcgcgatggatgctttgttgcaaaacaattgcgcggtcgtcacttgcgacgagaagcacatgcccgccggtttgttgttgccgcttgaaggccacacggtgcaaagcgagcgtttccgttggcagattgaggcttcgctgccgttgaagaaacaattgtggcaacaaaccgtacaggccaaaatccgcaatcaggcctcggtgctgaaacggttgagtggggtagaggtgggctgcatggtggcttgggccaatagcgtgaaaagcggcgacagcgagaacctcgaaggtcgggcggcggcttattattggaagtcggtgtttcccgaaatggagcgttttgttcgcgaccgcgagggcgacgcgcccaacaacctattgaactacggttacgccatcgtcagggcggtggtggcgcgtgctttggtggccagcggactgttgcccactttcggcatccatcatcacaaccgttacaacgccttttgcttggccgacgacatcatggaaccatatcgaccatacgttgatgagctggtcattgagattttgcgtagcggcgtggattgcagcgagctcaccaccgatttgaagcggcaactgttgggactgcctgtgaaggaggtcgtcatcgacggacggcgcagcccgttgatggtggcggttacgcaaaccacggcctcgcttgccaagtgtttcggcggagagttgcgaaaagtggtttatccgacaatggaattatgatggaccgtttcagcgaatacaggattatgtgggtgcttgtgcttttcgatttgccgacggaaacgaaaaaggagcgcaaggcctacgccgatttccgcaagcgcatcatggcggatggcttcactatgttccagttttccatctacttgcggcattgtcccagccgcgaaaacgcggaggtgcatatcaagcgggtgaagtcgttcatgcctgagtttggcgacatcggtattttgtgcatcaccgacaagcagtttggcgacatggagattttcagcaactgcaagccgaaggcgatggacacgccgtgccagcaattggagttgttttgaatgggaaaaactgcggaaacaaaagaaaaatcccgctcggaagggcgggatttttcttttctgaaacaacttctaaaatgttgtggctctttttgttacacatatcgtgttgtttcaaagagcaaagatacaagataaatgcaagcaattcacaaccgaagacgaaatcctgtcaggcgaggtggagttgtttcaaagagcaaagatacaagataaatgcaagcaattcacaactgcaaagtattgccaaccaaacccgcgacggttgtttcaaagagcaaagatacaagataaatgcaagcaattcacaactgagtggtttatatcgccaccctgctaagggttgtttcaaagagcaaagatacaagataaatgcaagcaattcacaacattaatgatgtctttaaggcctcatgtaaagttgtttcaaagagcaaagatacaagataaatgcaagcaattcacaacagaacaacagacacaagcaattcaaaaggtgttgtttcaaagagcaaagatacaagataaatgcaagcaattcacaacgtttaggctctaatgctgaaaatgttgctggttgtttcaaagagcaaagatacaagataaatgcaagcaattcacaacttcgtcgctctgagtatcgaaaatttgatgttgtttcaaagagcaaagatacaagataaatgcaagcaattcacaaccgtccctgaatagggcggggctgtggctgtgttgtttcaaagagcaaagatacaagataaatgcaagcaattcacaacccaatcgtcaatccgaaggtagtggcaattgttgtttcaaagagcaaagatacaagataaatgcaagcaattcacaactgaacggtgtttatatgcgtgtgaacgcttgttgtttcaaagagcaaagatacaagataaatgcaagcaattcacaacattttcgctattttatttctactgaatacgggttgtttcaaagagcaaagatacaagataaatgcaagcaattcacaacttattcttggtgctgcaacggctgaagatagttgtttcaaagagcaaagatacaagataaatgcaagcaattcacaactttcctggctatccgagaacacagaataaagttgtttcaaagagcaaagatacaagataaatgcaagcaattcacaacactgaacatggatggttgattggagttgcgttgtttcaaagatacaagataaatgcaagcaattcacaaccgttgaatcctatttgtgctcattttgggtacgactaaaacccgaacaaatcccagccaaattgccgaacaaatcccagccaaattgccgaacaaatcccagccaaattgccgaacaaaactcagccaaattgccgaacaaaactcagccaaattgccgaattgaaagaaaaaatattcgattttatatttgagtttcaaatatttatcgtaattttgcagcgtgataaaaaatgatgcaaaaaatggacaattatagacccagaatttgcgaccaattattggttgaattattggaggcttgcggatcggttttgctggaaggatccaagtggtgcggcaagactactaccgccgaacaagcagccaatagtatcgtgtatatggccgacccagaagacggcgagcgcaacatccaattggcgcggaccagcccgaaatttctgctggaaggcgaaacaccccgcctgattgatgaatggcaggtcgtgcccaaactctgggacgcggtgcgcttcgaggtggaccacaggtgcaaacttggtcaattcatcctgacgggttcggcggtgccggccaaacgcgacgaaatcatccacacgggaacgggccgcattgcctcgttgctgatgcgcccgatgagcctctgggagtcgggcgacagcaacggaacggtgagcctcgaatccctgtttgacgcgcccgaacaattgacctccaaaagtgctatcggcattgaagaccttgcctatgtggtgtgccgtggcggttggccgatggccatcaacacgaaaaaccggaagtcggccttgaagcaggccaccatcttttatgacggcgtggtcggcaaggctgacggcagcgggtccgacatctcgcgctccgacggcgtgacccgcaatcccgaactcgtcaagttgctgatgcgcagcctgagccgccaccaaggaacgcaagcgtccgtcgcgaccatctaccaagacatggtggccaacgagagtaattcattgagcgaagacacaatagcctcttacatcaaggcgttgaagcggattttcgtggtcgagaacatgcccgcgtggaaccccaacctgcgcagcaagaccgccatccgcacttccgacacgctttatttcgtggactcaagcatcgccatcgccgcgttgaggataggcccgcaagacttgattaatgacctgaaaaccttcggcttgttctatgagacgatggccgtgcgcgacttgcgcgtgtatgccgattcgcttgacggacaagtttatcactaccgcgacaagaacggccttgaatgtgacgccgtcgtgcatctcgccaacggcaaatatggtctcgtggaaatcaagttgggcggcgacgacctgattgaggagggcgcaggcaccttgaagcaattggccggaaaaatcgacacgacacggatgcgtaatccgtcgtttatgatggtgttggttggcattgggaactacgcctaccgccgcgaggacggcgtgtatatagtgcctattgggtgcttgaaggagtagtttttgattgtttccaaaaataatacgcaaaaaccgttacgtaaaatacgtaatattgaaaaaatgtgtatttttgcggggtaaaatgaacgaatgatgaaaaatccatttgtcacatcgggctatgaagggcctgaatatttctgcgacagggaagaggaaaccgcgaaactgattcggatgctgaccaacggcaacaatgtcgtactgatgtcgccgcgccgcatggggaaaacgggactgctctaccatgcctttcagcaggaagagattgcctctgaataccatacttttatcatcgacatctattcgaccaagaatctgaatgatttggtcgcagagatggggaaagtgatactgaacacgttgcagtcgaaaagcaagaaggcttttgacaagttcgtcaaggaggccacttcgctgcggcccggcgtgagtttcgactcgtggggcaacccgacttggaacgtggaggttgggaacatccaaaacgccgacaacacattggaccagatttttgactacatcaagcagtcagacatgcgctgtcttgttgccattgacgagttccagcagattgcccattaccccgaaaaaaacgtcgaggccatcttgaggacttatatccagcattgcagcaatgccgaattcgtgttttccggctcggatcggcatctgcttgcggagatgttttcttcgccgtcgcgacctttttatgcatccacttcaacactcagtttggaatgtatcaacccattgaagtacgatgaatttgcaaggacgcattttgagaaggcggaaaagcttttggaggcgggagtcgtggaggaaatttgccatagatttgaaggtgtcacatggtatattcagaaagcgttgaattacctctttgccgacaccgcttttggcgaaacctgtagaatggacatgcttgatgtcgctgtgaacgagatagttaaggataacggaacgatttacgccgatttgctttaccaactgacggccaagcagaaagaattgttgatcgccatcaacaaggaagggaaggtaaaagccgtcacggggtcaaaattcatcaagaagcaccatttgacggctgccagttcggtacaaactacaatcaaatcgctgatggataagcagttggtgacatgtcatctcggcgtttatgaagtttacgacaagtttttcagtatttggctctcaagattatgaaacaaaccaccctatgttatttggaacgcggcagccaatacctcatgctgcaccgcaccaagaaagaaaacgacctcaaccacgacaaatggcttggcgtgggcggcaagtttgaggacggcgaaagccccgaagactgtatgctgcgtgaggtgtgggaagaaacgggcttcaccatcacgcaatggcgctattgcggcatcgtcaccttcgtacacaacatttatgaggacgagcatatgcacattttcgtctgcaccgactggatcggcgacccaatcgagtgcaacgagggcgacctcgaatggattgagaaacagcaccttttggaacttaccatgtgggaaggcgacaagatttttctgcgcctcatcgatgaacacagaccgttcttctcgttgaaactgacctacgagtacgacacgctgaaaagtgccgttttggacggctctcatcttgtcattacgagcagggacgacgatgccccaacaattcaacaattcaacaatcaacaatcaacaaaatgaaacgaggatttggaagcgacaaccattcgggcgtgtgtcccgaggttttggaagccatcgctcgcgtgaacaaggaccacgctgtggcttacggcgatgatgaatattgcgccgcgacggaggcgaaattccgtgaacaatttggcgaacaagcccgcgtgttctttgccttcaacggcacgggctgcaacaccctttgcatcgatgccatgacgcgctcgcacgaggccgtggtctgcgccgaaagtgctcacatcaacgtggatgaatgtggtgcgccgcagcgcatcgtgggctgtcgcttgctgacggtggccacgcccgacggcaaactgacccccgagttgataaaaacacgcttgcatggcttcggtttcgagcaccactcgcagcccaaagtgatttccatcacgcaaccgacagaacttggcactttgtattctttggacgaaatcaaggccattgtgggcatggcgcgcgaatacaacatgtatgtccatatcgacggggcgcgtttggccaatgccgccgtggctttgggatgcaccttcaaggaaatgacctccgacctcggcgtggatgctgtttcctttggcggtactaaaaacggcctaatgatgggcgaagcggtcgtgcttctcaaccccgacctttgccccgagttcaaataccgtcgcaagcaggccatgcaactttgctcgaagatgcgattcatcgcggcgcagttcgacgcttatttcgagaacgacctgtggaaacgcaatgccgaacattcgaaccgtatggcgcaattgctttatcaagcagtgaaagacattcctggcgtgaaaatcgtttatcccgtacaggccaacggcgtgtttgcccagctgccccgcaaagtatggaaagagctgcaaaaccactatttcttctacgactgggacgaggatgccgatgtcgtccgctggatgtgcgcgtatgacacgacggaaaacgacattcaacagtttgttgcgctgttggaggaagtggtgaagaaataaggtttagtgttataaaagcagtctgttaaaaggtttcgggtgctttttcgcttccgttgtcagcctcaaaataaggccgcttctcaaagccgaacattttggcaatcaagttgctgggaaacttgcgaacgctttggttgtaaaccttggcggtttcgttgaagcgctcgcgctcggtgaggatgcggttctcgcaaccagccaattgtgcttgcaaggttaggtattcctcattggctttcaagtcgggatagttctcgacggaaacgatgaggcggttcagggaattgcccaattcgttttgcgccgactcgaagtcggcaaactcgttctcgtcgaagttctccgtattgacgttggcgttggcggccttggcgcgggcttccgtcacggcgatgagcgtgccttgctcgtattcggtgtagttttttaccaaggcaacaaggttcggaacaaggtcggcgcggcgttgataaacgttttcgacttgtccccacgccgtcgtcatggcttcttgttttttcacaaaaccgttgtaggtgccgatgccccaaatgaggattatgccaaaaaatatggctataacaatcccagtctttttcataagtggtgttttcgttgactatgaccactgaccatgactatgacagcgacaccatggaggccgatttccgcaccatgggctgaaatggtcattgtcatggtcaatagtcatggtaaaaatcagatgaattccagcttgtcttgcgtggtgttcttttcgcagtagtggcagtgcagtttgatgttgccctgcgcgtccttcacgacggtgaacttggtcggcacgtcgtgttccttgttggtgacgcagttcgggttgaagcacttcacgatgcgctcaatgcgctcggggatggcgacggagtgcttcttgacgacctcaaaccccttgatttcgatgatggaggccgtaggcgcgacgagcgcgattttgttcacgtcctcaggtgcgaagtactggtttgaggccttgatgaagcctttggtgccgtatttcttgctttccacgttggtgccgaaatacacgggcgtgctaactttctccaagcccaaaatcttgacgacttggaacaccttgtcggcggggatatggtcgatgacggtgccattctcaatggctgaaacggtcagttcttttttcttttccataactgtatgttgaattgttggttgtttaactgtttaattgttgtttttttggaactgttaccctaatccgtcattgcgggcttgacccgcaatctcctatgcgaaaggaatcgtcttcgcgtgtgggagatggcggatgtttctccgccatgacggtaaaaagtgtgtgtagtacgttcccatgttacttaagtccaagtatcgctgcaatcagagcttgacgggcgtaaacgccattctgggcctgctggaagtagtatgccttcgggttggcgtccacatccacatggatttcattgacgcgcggcagcgggtgcagcacgcggcagttgggcttcgcggcatcgagcatggcgttgcgcaagatgtaggagttttttaccttctcgtattcctcggggtcggggaagcgctcgcgctggatgcgggtcatgtagatgatgtcggagtgggggatggcatcctcaagctcggtatattggtggtattcgagcttacggtccttgatgtgctgttttaccacgctcggcagtttcagttcgacgggcgaaacgaggttgaacttcgcgttgaagtggcacatggcttccacgaggctgtggacggtgcggccgtatttcaggtcgccgacgagggtaatctccagattttcaagcgttccctgtgtcttgcggatgctgtataggtcgagcatacactgggtggggtgctggttggcaccgtcgcccgcgttgatgactggcactttcgatacctcggaggcaaagcgagccgagccttcgatggggttgcgcatgacgatgaggtcggcgtagctggccaccatcgtgatggtgtcggctaaggattcgcctttttggatactcgttccggcggtgctgctgaagccgatgacgttgccgcccaaaagttggatagcagtctcgaaactcaagcgcgtacgcgtcgaaggctcaaagaagagcgacccgatgacgcgaccgttcagcaggttctggtgtgggtttttctcgaagtcctcggcgatgtcgaggacgtggcacatttcctcaggtgtgaagtcgctgatggaaatcaaactgcggtttttcagtgaaatagacataggcttataggtttagtttgttgatgttgcaaaaaaaagacggccaacaatgtgaccgtcggt

SEQ ID NO: 2096 - DNA, 24359 bp, synthetic construct
  source 1..24359: mol_type = other DNA
  variation 16154..17684: note = n is a, c, g, or t
  misc_feature 1..24359: note = Synthetic
gaaaatagcgcattcgcgaaatactgtctgcatatacattaccaataaatgaactgctattgaacaaaacggcctgcgatggttgaaaagtaacctgatggcctaaagcaagtgcattattgccatctactctattaataacttgccatccattcagcaatagcattgacaaataccatttttcgtttgaagtagtataagatagccgcacaccactttcataataaggtgagttttccgctaatatacttctagttaaagtccaacaatcatttgatatggcgctttcaaaaccaatgtgtgacgggaaaatacctgcatctatccatagtgctttttttgatgatagttttacacccaaattagcctcaaaaacatttttcattacaccaacttcattgacataattggcattcatgtaagtaccggtggcaaaagccaaattagctcttacatttttttctactaacgaagcttttatataacctaaatttaaattaacctcatttgttctggtgtaattgtacaaaaaagtggggcgagtatgattatcgggattggcaaaatcataggtatcatacatatcaaggtatgcactcaatttcaatttttgttttgaggaatctgtttgcgcatttacggcaacagcagaaaaataaaaaaataaaaatgtaatttttcgcataaatgaattaaaaaattttattgtgcatgataacttgcagacaaatcatttaaagcaacattcaattccaatacatttacataagcaggaccaaaaattcccaaaaatggatgatgaatatgttgttgaattaatgactgcagtaaaccgggttgaagattgcgaacatgagcaattctatttacctgaatgttggcagcctgaaccgtaatatcggggtctaagccactagcactggctgtaatcatatcaatgggaatatttttcacagccacatccggatgatgtattacaaacgaatcaatattggcctgtattgattttaaataatcggtattatatgggcctttattactggcacctgcagcggccgcattataatttacagcagaaggacgcgaccaaaaatattggtcagcatcaaacttttgtccaacatcgctatacattctttttccttgcacatttataattgcaggctcgccattgttgggtgtaatttttgcaacaccccatataattgcagtgtaaataatgctgcatagaaccaaaaaaacaaatgttaatcgtatagccggaaataaataagttttcatatctaattatattaaaaaaagtatgtaacaatcatatcaatgagtttaatacctacaaagggaactataataccccctaagccataaatgaataaattgcggcgcaataaagcacttgcaccaataggccgataggtaacaccttttaaagccaatggaattaataaaggaatgataattgcattgaaaataacagcagataaaatggcgctttgagggctatgcaaatgcataatattaattccctgcaatgcaggaatgtaggtaatgaataaggccggcacaatggcaaaatattttgctacatcattggcaatactaaaagtagtaagtgtaccccgcgtcattaataattgctttccaatttcaactacttcaattagtttagtggggtcattatccaaatcaaccatattgcctgcttctttggctgcttgggtaccactattcatggcaacacctacatcagcttgagctaaagcaggggcatcatttgttccatcgcccatcatagcaaataagcggccttgcatttgttcaacctttatgtaattcattttatcttcaggttttgcttcggcaataaaatcatctacacctgctttttctgcaatgtatttagcggttaatggattatctcctgtaaccattacagtttttatacccatttttcgtaatcggtcaaaacgctctttaatacctgtttttataatatcttgtagctctaccactcctatcacattttcatttactgccaccactaacggtgtacccccttgcattgaaatagattgaacaatatgggtagcttcttccggaaacatggtgcctgctttttcgcaaattctcttaatagcatcagccgccccttttcttatgcgtaagttattgcaatcaattcccgaacaacgtgtttcggcagtaaatgcaataaacctgggattttctaattgctgtaccgatacattcatgtcagctaactcaatgatagattttccttcaggggtttcatctgccaaggaactatataccgccatttgtttaaaatattccttgtcaacattagataatgcatgaaaatgagtagcttttctattaccaatcgtaattgtaccagttttatcaagcaacagcacatccacatcaccagctgtttcaactgctttaccgctttttgtaatcacattggcttttaatgctctattcatgcctgctatgcctatggcagacaataagccgccaatggttgtaggaattaaacaaacaaacaaggcaatgaaagccgcaatggttatgggtgtatgtgcataatcggcaaatggtttaagtgttaccgttacaataatgaataccaatgtaaaccctgccaacaaaatagtaagcgcaatttcattgggcgatttttgtcgggaagcaccttccaccaactcaatcattttatctaagaaactttctccggcatcgcttgtaactttaacttttatcttatcacttaatactttagtgccgccggtaacactgcttttatcaccacccgcttctcttataacaggtgcgctttctccggtaatagcactttcatcaatggtagcaagaccttcaataatttcaccatcggccggtataatatcattggtttcacaaataaatacatctccttttttcaacttggaagccggaattgtaatgacttcattcatataaatttcacctacaggcaacactaacttagcaggtgaatcttcacgggtttttcttaaactattcgcctgtgctttgccacgttcttcagctattgcttccgcaaaattggcaaacaataatgttacaaataaaataatggtaatggttacattatagcttaaactgccctgcgatgtttcgcctaaagcaatccatatacaaacacaagccattaccgcagttcctaaccatactgtaaacattaccggattcaatattaatgtggcaggatttaattttaaaaaagattgttttaatgcaccacctattgatgccttattgattactttgtttgtcataatatataattgatatataacatttgtttagaaagaaaaatattcggcaacaggacccagtgtcagtgcagggaaaaaggataatgctgcaataatgataattaccgcaataatcataatgccaaatgttggggtatcaatttgtaaagtgccggcaccggcaggaatatattttttttgcgataaagatgcggcaattgctaccggaccaatgattggtataaatctggccaataacatcacaattccatcggcaatattccaccaggccgtattcgcatttagccccgcaaactcgctaccgttgttggcacttgctgaagtaaattcatacaacatttcgctgaagccatgatagccgggattagataaccatgctgcatattgttcaggatgatgcgcatacaaataggaagcaatagcggtaccggttaaaattaagaatggatgcaacaaagcaacaatcatggcaatttgcatttcacgagcttcaatttttttacccaataactcaggtgttcttcctaccattaaaccactgataaacacggctaagatcatgaaaatataaaagtttaaaaatcctacacctaccccaccataaaaggcattaatcatcattcccaacattgcacacatacctgataatggcataaagctatcatgcatggcatttacagaaccattactggttaccgttgttgcaattgcccaataggctgaagccattgaaccaaagcgaacttcttttccttccatatttccagaaatattattaatacccattttggcaatggctgtatttcccctaacctccatgctaatggtgggaaccaccaaaagaatgaatcctaaggtcataataccgaaaacaatccaagctaatttttttctattcagcatatagcccatggtaaagattaaagcaatgggtaataaataaatagctattgtttcaaccatattggtaaagtagttcggattttccagcggatgagcagaattgggtccaaagaaccccccaccatttgtacccaattgcttgatcgcaacaaaagctgcaacaggccctttactaacttgtacagtatcaccttgcaaagttgtaatggtgtctttaccttgaaacgtcatgggcacaccgttgtataaaaaaataatggccagtacaatgcaaataggcaataatactcttgtacatgtacgaacaaagtaaaaataaaagttacccaacggtaaattaatcccttctttcatggccttaataacaacaatagaaatggctataccactggctgcgctaataaactgaaagagcattaataccaattgtcctaaatacgacatggctgtttcgcctgcatagtgctgaatattagtattggtaataaaactgatagcggtattaaaagccaaatcgagtggcatggatggattatgatcgggattgaatggcagatgcgccatatttgttaataccaacatggccaatacaaaccaaataaaattaatcatcaacaataccttgatgtgttgtttccaattcatttcaacattttcatctatcccaattaagcggtaaatgaagcggtcaaccggattcaacacaacatctaaccaggtatcttctcctaaaaatacctttcccatatatctacccaatgggatggcaattaatacagcgattatgaacatggcaattacaccatataattccgaataagattgcattataattatttttaaactttaaaacttttctacctgacgtttaataaaatttgctttaaaatttttcaggatgcacaagtacataacacatgtagatgaataccaatattgctataataaaaacgataaacattttgcatgaagattgataaggtggtgatataattcgttgactagaaaattaaatacataacttaaagcatcattatgaggtgttcagttttggcatggctcattcattttggcattataggtggcaaatgaaagaccaagaattttcaagatcaataaaatgtaatacaggactgaattatgaaattttttcattattcatttgcaaaaaaataccctttcaaattgaaagggtaagactatcgttttgaaagggtaacaatagaaatttattgaggggaaacggaaattttgtattcttccagttttctgtaaagagtagttaaagcaatattcaataaacgagcagtttccgttttattaccaccggtatattgcagtactttttgaatatgtgctttttcaacagaggctaaatcaaaaatacccgattgatgcatagtatccctattaaaatcttgcagaaaatcaataggcaaggtttcgggctgcaaaacatccgaatcggttaaaataacgcttcgttcaataatgttttttaattctcgaatattgcctttccaagtatggttttgcaagagttgaatataatcgggactaatattttctattttcttgtttattttttctgagaagtgttttaggaaataggctgcaataacaggtatatcctctaatctttcacacaaggaaggcaattgaatttgaaaaacagaaatacggtaatacaagtcctcacgaaattttccatttaaaatttcttgttttaaatctctattcgttgcagcaattaaccgtacgttcactttagtaggcacggtatcgccgagttttaaaaattcgcctgtttcaataacacgcaacagtttggcttgtaaatcaatgggcatttcgccaatctcatctaaaaaaatggttccttcattggcttcttcaaaaataccttttgcatctttcgtggctccggtaaatgctcccattttatgaccaaacaattcattttctaacaaatctttgctgaaagccgaacaattcactgcgacaaaattgttttgtttacgcttgcttgcctgatgaatagcttgtgcaaatacttcttttcccgttcctgtttctcccaataataaaaccgttgcatccgtttgtgccacccttttagctgcatcaattgcctgttgaatgactgttgattttccgataatactatcaaacgcatatttatgaactaactgtttctccagttgctgtacgcgttttgccagctttactttatccattgccctatgcagtaagggaattatttttaaattatcatcacccttggttatataatcaaaagcaccacttttaatggccttcacactatccggaatagtgccgtatgccgtcattaaaataatttcaatggtaggatacttttgcttgatggcggcagataattcaataccattttcatcgggtaattttacatcgcaaagtacaatatcaatattttgttgttctaatttctttaatcccgatttaccatctccggcctgaagtacttcaaagccttccagcatcaacattttagccaataagcttctaagcttcacttcatcatcaattattaaaatagtgttggccatattcatgaaaatacattcgttgtaaatgcttttaaagcataacaaatgtaaaagtaatttgattctgaaaattaaaataaaggcatttcaaaatgatgaatcacctatttcaatgtccaagacaatcatcaaaacatgataaaacctttattgctgccgatgaataacatgtgcacctaataggaatgtatcagctttttttagtgtattgatgttagaattacctcatgtaattcaattaaccaagttctgtttcaaatacctgatgcgtcatttatatcataaaaactattttttactatctttttccggtttgtagctgaataataccattaaaaagaaagtaaataaaacccctgcggcaattacaatgaaggaaataattttttaaattatccgtattacatttcgttttcttaaattttttatgccggaagtaatggcgtcaattcctgctgacaaataaataaataaaaagaatccgccaatcagtaatgcggtttctaacaataacatttgcatgctaccgaggttttaggtgattaaataaagttgggtagagttatatgcatgcagctattttaaatgaaagaacagcaaatttaataaaaaaaattgaaatactaaattttttaacataaaaaacttaaaatattagcaaacattaatgcagggtcattgaaagaatgatgcaagcttgtttacaatagtttgaatagtaagtaatgaatactgaaacgagatgatattccctacaaaaaagccccaacttaaagttgaggcttttggcttagtgaatgagtccttccggaacagattttcgcaacaaatatttataaatgaatttggtttttaaattttggaaatcatcccacttagccggtaaataaggccatccatgtctgccgcccgggtataacatcatttcaaaaggcttcttggcatcttccaatgcactaattaattgaatgctgttttgcatgtgcacattatcatccatggtaccatgcacaatttgtaacatgcctttataattgtttacataatttaaaacactgcttttcttatatccctcttcattatctgccggtgtgcccatgtaacgttcagtataatggctgtcgtacaactgccaatctaccacgcttccgccggccatgccataagtaaacacatcagacttatacgtcaatgctaaacacgtcatgtatccaccgtaactgaatccggtaatgcaaatacgggcaggatcggcacctgcattgttaataaaccattttgccatagtgctgtaatcttccatttcccaataccccaaatcatggtacatataatttacacctgcttttccaaactggccactggctctgtgatcgaaagccacttgaattaatccttcttgtgctaacaattccctgttcgcagtccaattccatttatcccatacagtaccggcattagggccgccataaatactgattaacatgggatattttttatttttatcgtaatgagtaggccatgtaaccaaagcaggtaattcaaataaaccatctgcacttttaatgcgtataatttcggttttggcaatagcatattggtccatttcagcacctttggcattacccaactctttgactattttaccatttacatcaaccaatgccatacgggcaggggtttgtgtattgctgtatgtggtaataaaataattaccgaatggcgaaaaattaatggaatgagtataattcccaaatgttaatcgttttggggttccgccatcaaaacttattttgtacaaatctattctggtagaattttctataccccttgctgtaaaataaattatgcgattagcttcgtcaatatattcaatgccggtaactgtgtattttccgttggtaataggatgttgcaaagtaccatccatgttatagagatacaacatattccatccgcttttatcactttgcgcaatataacctttgccattttttaaaaagttaatgcgcccacctaccctatcttctaaatcaatccatgttttctgcgtttcggtatataccggtttacgtgtacccgtttgtgtatttacttcataaataattaaactgtcttgtttccgattcatccaaggtaaccacaaactattattatcgctgcgccaaacaggccatccaaaatactgatcgtatttttcattgaaattagcccatgtggtattgccaccgtttggatgaacaaaaccaattttaacttcagggtttttatcaccgggttgtggatagcgggtttcttctaaataaccatgtttcccttggctgctgtaaatagggaaaataggcaccatgctttcatcaaagcgggcataagcaatggttttactgtcggggctccaccaaaatgcccgataatgtgtaggacgaccataaatttcttctaaatatacccaactggcataaccatttaaaatagtggcagagccatcgaaggttaattgcacttctttttgattagctatattgtaagcatataaattattgtttttggtgtaagcaataaaattgctatccggtgaaaaagtagggtttctttcctgcgcagtatcgtgcgtaatttgagtgggattaccattgatgaataaaaacaaatcgttgttcataacggtaacgcgtttacccagttgcgcttctttattttgcgtaaaaggtgttgttgtatttaaagcaatgttatagcgcaacagtttaacatcgcttctattttcgccacgttgtgctaaaaccaattcattattattgagccactccataacagaaggcaatggttgcataaaacctttaggtggtttaccggtaaccagttcatgaataggaattgttttttgttgtgccggcaaataagctgccatacagcaagccacagccagtaagccaaatatttttctcatgtgtttgaaaattttagatgaaggtaaaacacaaatacatgcaacgatgaaccatttataaaaaaagctgagatggaattatacaaatattaaaatttttgtattttggggaagaaaaaagccccacattgtaaggtgaggcgacttaaatgttttcacaacggaataatccttattgtgatttgctttcaaattatgacataaaaataataaattaattaattaaagaaacaaatatgggaaaaaaaattttaggacttgatttaggtacaacaagcataggttgggctttagtaaatgaagctgagaatgacaatgaaaaatcatctataattaaaattggtgtgcgtttgaatccattaacagttgatgaacagcagaattttaaaaaaggaaaaagtattaccactaatgccaacagaacgctcaaacggagtattagaagaaatttacaacgttacaaacttcgcagagaaaacctaattgagattttaaaagaacacaagtttatattgaaagaaactaatttatctgaaaatggtaattttagtacttttgagacacacagactaagggcaaaagcggcaagtgaaaaaatttcactagaacaatttgccagagttttattaatgataaacaaaaagcgcggttacaaaagtagtcgtaaagcaaaaggaacagaagagggagtattgattgatggaatggaaattgcaaaaaaattgtataatgaaaatttgactcccggacaattctgcttacaattattgaataatggggaaaagtatttacccgatttttataggtcggatttgcaaaaagagtttgataaaatatggtacaaacaaaaagagttttatcccgatattttaacggatgaactaaaagaaaaattacacaataaaaacgaaaaaacaacctgggcaattttacaggaaccgcttaaacttataggtgtaaaacgtactacaaaaggagatgcacaaaaaaaagaaaattttgagtggcgtgtgaaagcactttccgaaaaaatggatttggaaagtttatctattatttttcaaaaactaaattcgcaaatcaatagttcaagcggctatttaggggaaatcagtgaccgaagtaaagagttatatttcaacaaacaaactgttggacagtatcaaatgagtgtattggataaaaatccaaatgcgagtttacgcaatatggttttttatcgtcaagattatttagatgagtttaatactatttgggatgaacaagctaaatatcacgaagaactgacccaagaactaaaaaaagaaattcgtgatgtaattattttttttcaaagaagattaaaaagtaaaaatggattaattagtttttgtgaatttgaaaaccgaaaaattgaaatagaaaaaaatggaaaaaagattactaaaattgtcggtagtcatgttattcctcgctcatcaccattatttcaggaatttagaatttggcaaaaattaaatgatatagaaatttttcctataagcgaaaaaaataaaaagaccaaaccgaatgctagaacattggaacttaaggaaaaaaatattttattctcagaattgagcgtaaaagaaaaactttcaaaggccgaaatacttgctttattggatttacaagattttgagatcaatttcaataacattgaagggaataaaacacaggctgaattatttaaagcctatcaaaaaattatagaactatcgggctatgaactgaatctaaaagaatctgctgaaaaaattttaattgaagtttcaaaaatatttaaaacgcttaattacaatgaggatattttgcacccaaatacagagacattatacaaattttggcacttactctattcgtttgagggtgataaatcaattacaggaaacgaaaagctaatcaataaattgaaaaacgattatggttttgaaaaaaaggctgcagttattcttgcaggagtggtctttgaaagtgattacggaaatttgagtgcaaaagcaatcaagaaaatattgcctcatttaaaaacaggtgaaaaatatgatgtggcttgtgcgcttgcgggttacaagcattcggcaaattcgcttacaaaagaggaaattgaaaacaaaatttataaaaaccggcttgatattttgccgaaaaatcatttacgaaatcctgttgtggagaaaattttaaatcagatgattaatgtagtcaatacgattattgatacctatggcaaacctgatgaaatacgcattgagttagctcgtgagctgaaaaaaagtgcaaaagaacgggaagaaatgactaaagaaattgatgatacaacaaaaaagaatgatgaaattaaaactaaattgcaaaaagagttcggtttaactaatgtaactcaaaacgatataattcgttataaattatatgaagaattaaaaaataacggttacagaactctatattccgatacatatatacctcaagaaaaattatttagtaaagaatttgatattgaacatatcattccacagtctcgattatttgatgattcattttcaaataaaactttggaggttagaagtattaatattgaaaaaggaaatcaaaccgcttttgattatgtaaaaggaaaaggctatgataatctaaatatttttttaaacagaatcatttctgtttatggaaagaaaaatgaaaaagactttgattattataaaacagagtatgaaaaatcattaatgaaaaaagaagcaagagaaaaatggaataagttaaccgaagcggaaaaacaaatacaggtaattaacaaatattattctggaaagctaaaaaaattaattattacaggtgaagatattcctgaagactttattaatcgtgatttatcagatacaagatatattgccaaatatgctaaaacaatgttagaaagtttagtaaaaaatgtcgtgagcacgtcaggttcaataactaaacgtttacgtgaagattggcaattagttgacgtattgaaagaattaaattgggacaaatacaaagcagttcaattggtcgaagagttcactaacagagacggcaaaatagtgaagcaaattaaagattggacaaaacgaaacgaccatcgacatcatgcactagatgcacttactgttgcctttactaaacggcaatatgttcaatatctaaacaacttgaatgcacggagtgacaaaaattcagttatttatggtatagaacaaaaagaactttaccgagacgataaaggaaagttattattcaaaccacctatagaaataaaggaatttagagcagaagcaaaaaaacatttagaaaatactttagtttctattaaagcaaaaaataaagttactaccaaaaatattaacattacaaagaaaaaaaacagcataaacaaaaaagtacaacttacgccacgtgggcaattacatttggaaactgtttacgggagccaaaaaaaatacacagtaaaactagaaaaaattggtacaacctttgacgaggaaaaaattaaaactgtatgcaagcctgtatacaaaaatgccttgcttaagcacttgcaggaaaataaaaatgatccgaaaaaagcatttggctcaaaaaatacacctaaaaaacatccgatttatattgatgaagcaaaaacccttactgttcccgaaaaagtaaaaacgaaaaattttgaaactgtatacactattcgtaaagaaatttgtcccgaattatttaaggatgcaaaaaagaaagatatttttgaaaaagcattaggtgaagctaccaatctatctgaaagagaaattgataaatcctatgacaaggctattgaatttatttttgataagggcattagaaaaatattaattgaacgatataaaaaaacaaaactagaaatagaagattataataaaagagttgaaaagaaagaacaaaaaaaagtattagaaactgcattttccaaccttatcgagaacccaattataaacaaaaatggtaaatcaataaaaagagtaactatttcgggtattaacaatgtacaagcactacataccaaaaaagatcataatggaaaattaatcttagatgaaaattgcaagacacaccctgttgattttgtaaatactggcagcaaccatcatgtagctatatttctagataaagaaggcaacttacaagaaaatgtaatatctttttacgaagcagttacacgccgcaatctaggattaccaataattgacaaagaatttaataaaaaagaaggttggcaatttttgttcagtatgaaacaaaacgaatactttgtttttcctaatgaaaaaaatgggttcagcccaaaagaaattgatttgttaaatcctgataactacgcattgataagtccgaatttatttagggtacaaaaaatttccacaaaaaattatatgttcaggcatcacctggaaacttctgttagcgaaaataaattattaagaaaagtaacttgggagttaattcaaacaccaaataagttaaaagggattatcaaagttcgattaaatcacattgggcaaattgtatatgtaggtgagtattaggaatcgccacaaaagcattttttaacatatttaatttttaactaaccaatcaaaaattaactttgaaaacaattaattgattaataaaaaaatctgtttgaaaatatgcttcattacacaagcggcttaaataaaattaatttagaacaactaattatttatacactttaaaaatgatatcattttatttcttatggataattttcaggaaatatttagctaaaatttagattatttgcaaaaaattatgacaattacactcctcataattaaacttactgttttatgttatacatcgcaatataaaaattggtcataaattaattttccacatgctgaagcgaaccctttgcatagaaaatccatgtcatttaaaattcaacttagagcagttggtaattagctatgcccatataaaaggattggaagaccggcaagataaaaccgtgcccattgaggacattggggtattggtgatagagcatcctcaaattaccattacccattttttattagacaaactggtggctaacaatattgccgtaattacctgtaatgcaaaccaccaccccagcggtatgttgttaccgttggaaagtcataccttgcaaagcgagcgctttaaagcacaaataaatgccagtgaacctttaaaaaagcaattatggcaacaaaccataaaagcaaaaattaaaaatcaagctgccattttacaaaaatggcaagtacccgcaggatatttaaatacagctcaacagcaagttaaaagcggcgataccgataatgccgaggcaaaagcggctgcttattattggagccacttatttcctgcatcctggcagttttttagaaaccgagaaggccccccacccaacaatttattaaattatggctatgccattataagggctgccatggcccgcgccattgcaggagcaggtttattgccaactttaggcatctttcatcgcaaccgatataatgcctattgtttggccgatgacatgatggaaccctatcgcccatttgtagatgcaatagttcgtcaaattattcacgaaacatcattggtaacaacattaacccaaccattgaaaattcaattgttaaatgtattaacccaagatgccattattgataatcaaaccagcccattgatgattgctatgcaaaaaacggcattttcgttgagcaaatgctataccggtgaactacgaaaactatcctttcctgagcttcaataagcaattcaattaaaatagcccatcagtttaaaataaatcactttttataatcgtttttattaataatcactaaacattcaatgcatattggccaatatggcggcgcaacaaaaaaatgcagaacgttttaatgcctatagaattatgtgggtaatggtattttttgacctgccaacagaaaccaaggcagaaagaagggcagcccaacaattccgaaaaaatatgttggctgatggattcatcatgtttcaattttccatttacctccgccattgccccagtatggaaaatgccgccgtacatattaaacgcgtaaaaaagaacctgccggaaaaaggacatgtaggtataatgaccattaccgataaacaatttggcatgatggaactatttcaagggaaaaaagaagcaccgagccagcctattccacagcagttagaattgttttaggtacacagaaataaaaaaggaggcaaataagccaagtatgcctcctaaaaacttcattttttttgttctattttctttgaaaacgcttattggcattgcannnnnnnnnnnnnnnnnnnnnnnnnnnnnnnnnnnnnnnnnnnnnnnnnnnnnnnnnnnnnnnnnnnnnnnnnnnnnnnnnnnnnnnnnnnnnnnnnnnnnnnnnnnnnnnnnnnnnnnnnnnnnnnnnnnnnnnnnnnnnnnnnnnnnnnnnnnnnnnnnnnnnnnnnnnnnnnnnnnnnnnnnnnnnnnnnnnnnnnnnnnnnnnnnnnnnnnnnnnnnnnnnnnnnnnnnnnnnnnnnnnnnnnnnnnnnnnnnnnnnnnnnnnnnnnnnnnnnnnnnnnnnnnnnnnnnnnnnnnnnnnnnnnnnnnnnnnnnnnnnnnnnnnnnnnnnnnnnnnnnnnnnnnnnnnnnnnnnnnnnnnnnnnnnnnnnnnnnnnnnnnnnnnnnnnnnnnnnnnnnnnnnnnnnnnnnnnnnnnnnnnnnnnnnnnnnnnnnnnnnnnnnnnnnnnnnnnnnnnnnnnnnnnnnnnnnnnnnnnnnnnnnnnnnnnnnnnnnnnnnnnnnnnnnnnnnnnnnnnnnnnnnnnnnnnnnnnnnnnnnnnnnnnnnnnnnnnnnnnnnnnnnnnnnnnnnnnnnnnnnnnnnnnnnnnnnnnnnnnnnnnnnnnnnnnnnnnnnnnnnnnnnnnnnnnnnnnnnnnnnnnnnnnnnnnnnnnnnnnnnnnnnnnnnnnnnnnnnnnnnnnnnnnnnnnnnnnnnnnnnnnnnnnnnnnnnnnnnnnnnnnnnnnnnnnnnnnnnnnnnnnnnnnnnnnnnnnnnnnnnnnnnnnnnnnnnnnnnnnnnnnnnnnnnnnnnnnnnnnnnnnnnnnnnnnnnnnnnnnnnnnnnnnnnnnnnnnnnnnnnnnnnnnnnnnnnnnnnnnnnnnnnnnnnnnnnnnnnnnnnnnnnnnnnnnnnnnnnnnnnnnnnnnnnnnnnnnnnnnnnnnnnnnnnnnnnnnnnnnnnnnnnnnnnnnnnnnnnnnnnnnnnnnnnnnnnnnnnnnnnnnnnnnnnnnnnnnnnnnnnnnnnnnnnnnnnnnnnnnnnnnnnnnnnnnnnnnnnnnnnnnnnnnnnnnnnnnnnnnnnnnnnnnnnnnnnnnnnnnnnnnnnnnnnnnnnnnnnnnnnnnnnnnnnnnnnnnnnnnnnnnnnnnnnnnnnnnnnnnnnnnnnnnnnnnnnnnnnnnnnnnnnnnnnnnnnnnnnnnnnnnnnnnnnnnnnnnnnnnnnnnnnnnnnnnnnnnnnnnnnnnnnnnnnnnnnnnnnnnnnnnnnnnnnnnnnnnnnnnnnnnnnnnnnnnnnnnnnnnnnnnnnnnnnnnnnnnnnnnnnnnnnnnnnnnnnnnnnnnnnnnnnnnnnnnnnnnnnnnnnnnnnnnnnnnnnnnnnnnnnnnnnnnnnnnnnnnnnnnnnnnnnnnnnnnnnnnnnnnnnnnnnnnnnnnnnnnnnnnnnnnnnnnnnnnnnnnnnnnnnnnnnnnnnnnnnnnnnnnnnnnnnnnnnnnnnnnnnnnnnnnnnnnnnnnnnnnnnnnnnnnnnnnnnnnnnnnnnnnnnnnnnnnnnnngttgtattcaaagatcgaacaaaaagaatttgaaaaataaaccttagaattttcagtgtatgcatgcatttgatttacaatcttaccgaaatattatgcttatgtaaatattgttttaaatcgggtatagctatttctttaaagtgaaaaatactggctgctaatgcagcatcggcttgcgcatccttaaatacagcttcaaaatgttgcatggttcctccacccccactggctattaccggtataggtaattgtgtacttaatgttcgggtaatgtctaaggcaaatccttgcttggcaccatcgtgattcattgaggttaataaaatttcgccggcacctaattcataggcctgtttggcccaggtagtacaaagggtattagtagctgttcttcctccgtttaaataaacataccagttaccatcactttcttgttttatatcgatggctaacaccacaaactgactgccaaattcattggctaattgcgtaattaaattgggatttttaaaagcggcagtattaatagaaactttatcagctccattgtgtaatagtactgatgcatcttcaacactgctaactccgccaccaacagtaaaagggatattaatatgcgctgcaattctgttggctaattctttcagtgtttttcgtttttcaacagtagcggtaatatctaaaaacaccaactcatcagctccttgttcggcataaaatgcacctaactcaacaggatcgcctgcatcacgtatttgttcaaaatgaatgccctttaccgttcttccatcttttatatctaaacagggaataatgcgtttggttaagcccgataccggttgtatttgttttgtttccattgttattagttaaactgaaccaactgatttaaagatattttattttcataaatggcttttccaacaatagcaccactacaaccaatttgttgcagttgtaacaaatcgtcaacactactaatgccaccactggcaattaaatgtaagtgcggtaatgcatttaataaactttgatacaattcaagggaagggccttctaaacgaccatccttacttacatcagtacaaaaaatttgttgcacgcccaactgcatataattttccatgaattgttgtacggggaactcagtagtgtttaaccaaccattgatggtgatataaccgtttttcacatcggcacccaataaaaatttatctaccccaaaccggtgtaaccattcgataaataagtctttttgctttgcagccacactgccaaccgttgcataccttgcccctgcattcagcacagtgctcacatcattagcggttttaatgcctcctccaaaatcaatgactaattgtgtatgattagctattgtttctagcactttccaattggtaacttttccggctttggctccatctaagtcaaccaaatgcaaccttttaataccggcagattcaaactgcaaagcaacttctaaaggattttcgttgtaaatttttttttgttgataatcaccttccgttaaccgaacacattttccgtcaataatatctatagcgggtattatttccataagggttgttttataaagccataaaatttttcaaaatttgttcacctactgcagcacttttttctgcgtgaaattgtacaccataaaagttgttgtgatgtatggcagatgcataaggttcaacataattagtagtagcaatagcaaagttgttttgaggtacataataactatgcacaaaatagcaataactgttttcaggcacctgatgcataaggggcgatgataaattataaatactattccagcctacttggggcacttttaagttggattgtgtattgaattttttcacagttaaattgaaaacacctaaacagtcggtattattttcttcggaaaaagaacataacaactgcatgcctacacaaatgcctaacagtggttgttgcaaagttggaattaacaaatgcaggttattttgttgcaaacttcgcatggcactgctggcctcacctactccgggaaatataactttatcagcactttttattgtagcatgatcgtttgaaagtattgcattaacgccaattcgttgtaaggcatattgtacactttgtatgttgccggcgttgtattctataattactactttcatgaaaaaaaattattgctttactttaaaatattctctaaaaattgttgtgtagttgcagcaatatcggttgaactgcccaatgcctgaatgtaagcgctacctataatggcaccattgctgtaagtgcacgctgttgtaaacgtacttttatcctttacaccaaaacccaccataatggggtttttgagttgcatggcctgtaagcgttgtaaataagtattcacctcattaaaatttttatcttttccggtagtggccgatgaacttaccgcatacaaaaatcctgaacttaatgcatccatttttcgaatacgttcttcagaagtttcaggtgtgattaaaaatataaaatcaagttggtatttttttataacagcaccatacatattttcaaattcgtactcgggcaaatcgggtaatattaaaccatctactcctacttcagctgcttttttacaaaatgcttcaaatccatattgcagaatgggattcatgtatcccattaaaataatgggaatatgtatggttttcctgcaatccttcaattgttcaaataatactttaatggacataccattttgtaaagcaacactactgctttgttgaattaccggcccatcagccaatggatcgctgtaaggcattcctaattcaattaaatcggcaccatattgctgcaatgcctgcattactgttaatgtactattcaactggggataacctgctgtgcagtaaacattgagtacttgtttgggtttatttaaaaatgtttgtgcaattcttgtcatgatgtacaattattttgcatgtataatttaatggtatcgttgttgggaatggtaacaaaacctaaagccgaatatagtttttgtgctcgggtattcaagcgcaatacttcaagcgctacttttttgccactcgcttttgctttatgaatttgttgttgcaccaaaaagcttccaatttttttgttttgataatccggatgaatatataaactgctgataaaaattttttcattgtcttcaagcaactcaatagtaccaaccggttgtgcttgccacaaaataatttgggtttgattgggatgaaaattgtctgcatgaaattgttgttgcacttgttcatcccaaccccaaatagcctgcacataatgaaatagcactaattttttcaattcgtaaaaaaattggctgtcagcaggagtacaaggtcttaaacttaattccggaagtgcaatattattctgcattttctaatcatttttttgcatggcatgcatataagttgccaaatctttatcaccacgtccgcttaagcatagcactaccacatcattcgctttaaacgacatttgctttaatgctgcaaatgcatgcgcagtttctaaagcaggtataataccttctaattttgttacctcaaaagcggcttgcaaagcttcctcatcggttgcgcttaaaaaagtagccctgcccgattcgaataaatgtgcatgcaaaggaccaataccgggataatcaaggcctgcagaaatactatgcggttctactacctgaccatcttctgtttgcataaccaaacttttactgccatgcaaaatgccgggcttaccaagttgagaagtggccgcactcattccactataaacacctaaccctgcagcttcaacagcaattaattgtacagcgggttcatctaaaaaatgataaaaagctccggctgcattactgcccccgcctacacaagctattacgtgcgtaggtaattcactgcctgttttttcttttaattgccaacgagtttcttcactaattacgctttgaaagcgagctaccatatccgggtaaggatggggccccactacactacctattacataatgtgtatcgttaggatgattaatccaatcgcgaattgcttcattggtagcatctttcaaagttttactgccgctggttgctgccacaactttagcacccaacatttgcatacgggcaacgttaggggcctgacgttcaatatctttctcacccatatacacaatacattccaaccccattaaagcacaaacagtggctgtggcaacaccatgttgaccggcaccggtttctgcaataattctttttttgcctaaacgttgtgctaataacacctgaccaatggcattattaattttatgggcaccggtatggtttaaatcttctcgttttaagtaaatacgggtattatgcaaagcacttaagcgttcagccaaaaatagcggtgatggcctacctacataatcgcgcaataactgatgaaatgcagccacaaacgaaggctcatgcataatttctaaataacggctgcgcaactcttccacatttctgtgcaacatttcgggaatataggcaccaccaaattgaccaaaatagccatgctcattggggtgcatgtaagaaacggaatttgtttttgtttggctcataatgatttataatggattcacttgattaaagaattcgtgcaccaaagctaagttttttatacccggtgctatttcaaatttgctgttaatatcaaaagcaaataaatcttttgctacgctatcctgcataaagttttgtaattcaggcacatcatccggttgaatgccgccgctcaataaaaatggcttgcgaatagaaagccctttcaacatattccaattaaatttttttccggttcctccgtatccaacgccctctgtatcaaataaaaaaatatctactacatcttgatagtctttaattttccaaagtatgttgtcgttttcgctaatacgaaaagccttaatggtagttacataattcgataagttttcgcaagtacgcggtgtttcatcgccatgcaattgaataaggtataagccacattcatctaccattttcagaatgttgtcttctttttcatttacaaaaacacccactttattgatggtgccttttacccttttaatagcctcagttgtattattgtttaacacataccttgggcttttaggataaaaaataaaaccgcagaaatgcactccccagtcattcaactggcgaacctgattcatgtcggtaaggccacaaacttttaatcgcatgatgcctgttttagttgttgaacaaattgctgaaatgccaaattgggttgttcatgtttcataaaattttcgcccattaaaaaccctttaaacccggctttctttaattgaagaatagtttccactgccgaaataccactttccgttaccggaacttttgtggggggaatctgttcaattaaacgtaatgatgtttcaatatttacttcaaaggtttttaaattacgattattaacaccaaccatatctacctcatcgcaaatgtgttgtagttctgtttcatcgtgtatttctaataacacttctaaacccaattgtttggcttcaacggccaattgttgcacttgtttgggcgataagcaagccgcaattaataaaaccacatcagcaccaatggcttttgcctcatataactgatatgcatcaatcataaaatcttttcgcaaaatgggaacgggttgtatgcgtgcctgagcaaaatcttgaaaagacccaccgaaaaattcggtatcggttaacactgaaatgcctgcagcatattgtgcataggcctgtgtaacagtaattacattggcatattgatgaataaatcctttggaaggtgaacgtcgcttaaattcagctataattccggttgaattttgttgcgacaaattctgcttcaatgaataggttgtagcactaaaaaaaggctgttgttgtaattgttcaatggatatacgttgtttagcctgttgtacttctacttgcttttttgctactattgtttctaatatattcatacaaatgcctactttaaaaatattcgttattgcaatgctattaattgttgaagcgtgttgtaagccttaccactttccaaactttcaaccgctgccgcgtatgccgattcataatcagtaaaatttttggttgcatacagtgccatggcagcattagccaatactaccgcattttgtgcccaagtaccttcaccttttaaaatggataaaaatatttttgctgcttcttcaacagaatgaccgccataaatatcctgtggttgaaccaggcgtttacccaattgaagtggtgttaatatttgttcacctgaattggtaatgacttttgtatcgccggttaatgaaatttcatcgtaaccatctaaagcatgaataatggtaaatgacttattggtttgctgtaatagataattgtaaatgcgtgccatttctaaattatatacaccaaccagttgataggccggcgatgcaggattaaccattggccctaacatgttaaaaaaagtacgtacacctatacttttacgcaaaggggcaaccgtttttaaagcgggatgaaaaagcggtgcatgtaaaaaacaaatatttacttcgt

SEQ ID NO: 2097 - DNA, 24359 bp, synthetic construct
  source 1..24359: mol_type = other DNA
  misc_feature 1..24359: note = Synthetic
atatagacattatagtaaaacagtgggacgacctgaaaaaacaagatacaccggtagacaccaccgaattatgccgagtactcggtatcgagaagagcgatttcatcgaacggctcgacaatctcaaagacaagaataaaaacatcaactattcacccatactgccacaaaaacttatcacacagctcactcccgaagaagctgccgtaatacaggaggttatatggaagtttcccggcatatcgctcgtcagccgtactatgaggcaatacaccactccctacgcgtctcacgccataggctccattggcgaagtgtcgaaagccatactcaaaaaatatggagatgagtataaacaaggcgattacatcggtgtgagtggtgtcgagaaacagtatgaagacatactaaaagggaaaaacggattagaaatatttctccgcgacgtaaagggcagaatacaaggcaaatacaaaaacggcaaagaagacgtagcccccgtcggcggcaaatcgttgacgctgagcatagacattgatttacaggcgtatggagagatgcttatgcagaacaaagtaggcagcatagtggctatagagccgtctacgggcgaaatcctcgcgcttgtgtcgtcgccgaactacgacctgtccgaccttatcggcaaacaacgcagccaaaactacgcaaaactcctcagagacccatacaagccgctcctcgaccgcccaatgatggcatattaccctccgggcagtactttcaagacagccaatgctctcgtattcgaacatcagaaaataatcgacagagacacacgtttcggctgccattcgggttatgtcgtaggtagcttccgagtcggttgccactcgcattcgtcgccgctcgacctacccaattccatatcaaactcgtgcaatgcatactattgtgcagccttacgaaagatgctcgacgaccccaaatacggtaatataaaaaatgcattcaacgagtggaaaaaaaatatcgtatccttcgggttcgggcataaactcggagtcgatttccccaacgagaatcggggactcataccgaacaccgacacttacgataagatacacggcaaagaccgctggcgaagcctcaacgtagtatcgatagcaatcggacaaggcgaagtgctggcaacacctattcagatggcaaacttctgtgccatcatagccaatcgcggatattggatacgtccgcatatactcaaaaaagtagaaggatacccgctcgataccgcctataccaacaaacgctacaccgacgtagagcctgagtatttcgagcctgtcgttcaaggtatggagtgggcggtcaatggcggcggcagcggctccacggcacgcatagcccgaatagacagtatcatagtatgcggtaagacaggtactgcacagaacccgcacggcaaagaccattccatattcatagcattcgcacccaaagataacccgaagattgccatagcaatagtggtcgaaaactcgggattcggtgccacctgggctgccccgatagtatcgttgatgatagaaaaatatctgaaaggcaaaatctccgagaagcgtcagtggctcgaagaccgaatgcgtaatgccaacctgatgccacctctcccccaagaggcgtctgtgcccgataccgttacccgaacacgtcaataaacacctttttcgcgtaagtactcccgaaaaaaaagtgctccctgttgatgtacaaggagcaaaacaaaagttttcactacggaataatccttattgtgaattgctcaaaaatttgtaatgcaaaggtacaatatttttcccaatcaacaaaattacaaatgttttatagacatgcccgcaacactatccgccaaatagatctacaatagtagaaattataagtgtcttatagactggctaccgcatttgcaaaatcaatctatctacaatagtagaaattataagtgtcttatagacgcctgacctattttatttatatggcaagatctacaatagtagaaattataagtgtcttatagacgacaagcagcctaataccgagttcttgatctacaatagtagaaattatagtgtcttatagaccattactgctgccgcacaggacgaacgatctacaatagtagaaattataagtgtcttatagacgtttgtgcagggggcattatagatttttaatctacaatagtagaaattataagtgtcttatagacctgtgctgtctgtcaataacgttgagcaatctacaatagtagaaattataaatgtcttatagactgttgtgcaaggtgaatatatgtattacttatctacaatagtagaaattataagtgtcttatagactcgctttctacctcgtccgctaacgctcatctacaatagtagaaattataaatgtcttatagactgtgagcctgcctgccgctcttatctgcgaatctacaatagtagaaattataaatgtcttatagacagcaccccgcactattcgaacagtacaaatctacaatagtagaaattataagtgtcttatagactgtataattgcgaggcaacttccgtattttatctacaatagtagaaattataagtgtcttatagaccacgaataatgtgccatcggctatcagatctacaatagtagaaattataagtgtcttatagaccgcggttaggtctgcgacagggcacaaaatctacaatagtagaaattataagtgtcttatagacagcatccgataaactcaccgaccagatagatctacaatagtataaattataagtgtcttatagacgagagtatactccgtcgggagaagataaatctacaatagtagaaattataagtgtcttatagacagttgtatttagcggtgtcgaggtgggaatctacaatagtagaaattataagtgtcttatagactcgacttaggcaaaaacgtcaaattcttatctacaatagtagaaattataagtgtcttatagactaattctttgacaatgccacctatggtatatctacaatagtagaaattataagtgtcttatagaccgcttcctgatatacgtcctgcactgcttatctacaatagtagaaattataagtgtcttatagacgcctcatcgctcggatttgacactcaatatctacaatagtagaaattataagtgccttatagacatattcgggacatagcaataaaggcaagatctacaatagtagaaattataagtgccttatagacactataaacgacgagtaaaacacaacagctaatctacaatagtagaaattataagtgccttatagactcttagcaacgtttgaatatttttttaatctacaatagtagaaattataagtgccttatagactttctcgcagatagtcgagtaagtcggatctacaatagtagaaattataagtgccttatagaccgccgacgtaatacttcgggtataacctatctacaatagtagaaattataagtgccttatagactcgatgaggcttcgatattgaggaactatctacaatagtagaaattataagtgccttatagacagtttaattaggggaataaaagcagcacatctacaatagtagaaattataagtgccttatagacattcaaccgtaatcccgcacggaaggatctacaatagtagaaattataagtgccttatagactcgaagaaacgtcttgcactctgccaactatctacaatagtagaaattataaatgtcttatagactctatctaaaaaatacattgcaaatgtacaattaattattggtttatacaaagtattttacacaaaatgtcaaagaacaatcacaaaagagtattttatcccccctgcaaaaaacaaattttcatagtttatttattatcaagacaataatcaaactttgtattctccattgacaccgacatttgcacaaagaaatcaaaaatacaaaatatccgtatccctatggattgcattaccgtatttgacagcggttttcatatcggtttcgaaaataaaaatactatctccaccgtcgaactctttagcaaaaatggtctcgactttcactttcagtatatccaaaatacgtttggtattattgaactcataaaccgaaaattgcaaccgtatacctccatttttcaaaagcatcttcgaaaaacgagttctcaactttgtgttcgatatgtcgtaacttacaataatcataattgtgtctcaaattaaaaatttcggataatcggcaaccgtagctccccgcataaaacaacgataatacgcctgaatatatttgaaaacatcacccttgtaccgtataagcacatcgaaaaacaagcggcaataatctttattcttctctgtcctcagacgccattcacccttattgaccacaaagtctttatccgtacactgtttacgattgaaagccgaacgaacagtattgtctataatacatctgaaaggttccataagatcacagacaagagatttgcgtttgaaccataaacgatgataaacacctgcataaatatcgaatccgaacattctcacaaaactttctatataattaaacaaaatcgtatagccaatgtcgagagtagcattcaaagcatcggattttatacgtgggcggcgtaccgtccagttgttattctgaaagtatgcggcaaaaaaggatttggaaactattccttcaagccccataagtcggtcataatccaaaatggcatcaatcgtatctaacgcacgagtacatcggaatttggcaatcgttgtaagttcgtcgctcatacgggtatttttcaacagtgtcaattgattggctatcttgttggcaacaagtatctttgcaatagatatatcattcttgctcatttcatactgtttacgacgtagcagataattggcttccgctgcgtctgcccaaaagaaaaccggacgaagactcggtttcataacaaccagtgcaatattgaatttcttacatttttctatcaacggagtagtaaccgagatatgccctataacgaacaatgccaatattttttgaaacggaagtttggtcagagttttgctaccaatgtcatttacttcttcgagcagcaactctccgttgcttacccgtaaattacgtttttctaagcaatttacgacaaaaatcgttctgtattctatatctttatgtgtaaacattgtcggattgtgttttgtcgcacagactacaatagatgcagtgagcacatttattagggtttacagtaatagcttcgttcggattgaactgcctgaattgccgtattaaatcatataattcacttttattgttattattagggatatcgacaggtatcattctgttggtggaaatctcgtagaaagatatgcgctctacctcgtaacccatttcgcacaaacaaaagtattgagcccacagttgataaatctgtccgcggaatatctgtttcagttgatatttgcgttctatcagccatcgttccgtaaggcgatatatatatatttttcccataacacccaattcttcggacgaaaccggcaaagagagcaggtcgctcttttgggtactcgatgttttaccgtcgatacccttatgagccgcctgtccctttgtttgaggcactgcgtgatatatatcctcgtccgtctccagcatatacattgtgtagatagatggaatacggacagaaaataaaatcattaagtgtcgatataagaatgaggtcttccaatttaatcttccaaataaggttttgtttgtgcaaatttcagccactctttgttgcttatggcaagactgatcttcgccgaatcattttcttcctgtttcatctttcttattgccaacaatccttttcgagcaatattatatgctccgttggcatcggcattcataggcaagacggcgttttctttcaactctgcctgcttccgactgtcgaagaagcatccggtgtcgtcggcaacaggcgatataagataatcaatatcagaagaaggcatactgttacgcatctgcaaagtcaacctgagtagtcgcaacaattcttcaaaaaactcttttttgttctgagtgtttatttgctccctcaaatctttgcttatgtctactccataagcctcgaagtgttctttgaatgccttggtcaaatcgatttctcgtccctcccattcgttgtttctttgatgattacggcaaatttgtattctcttgccctgcgtacatattgtccagtctctgcgagtcccctctgccttggggctgaagcgagtgtagtcgtcgactacaaactcaaaccaatctttattgctgttgtagcgtatgcttttgaacttatcgaaaaacccttttgccttctcgatattttcgtaatgtgtatcaaacagattcacaaaacctgtaacagggtctattttactggtattccacgcgggaacataaaacaaaataccgctttgtttaccgagagtcttaaaactttcgagttcgcctgtcagttgatatgctctcagcaaaccaccggtttcggcgacaggctttttcttatctaccagatagtttagcttgtctatcaacatcttttcgaatttttgataaacctgtttttccactttctgtctgctacgcataaatccgaagttcaaatcttcgagtactataactgcattgtactttatcgccaattcactgattttatgtattacttggcttaggtacccttcctttaattcacgtatattttgtattgtctgccagtttcgacgagcctctgttcgctcaccttcacgagtatcgagcaactcatggtagtcagtacggtaagtattaccattatattcgttcacaatctcattcaacgaaaactgctctttgatattgcctctcgagtctataacggtaagatacagcaaatgccgctctcctctatcgatacctattatatgtaggtcggtggcagagcgaatgtgtcgttttacgagttggtttatattactgccacctacactcttgaaattcattgtaatcggtacgtgaaacagaaatttatctaccgtatagcgacgatcttttatcaaatcatatttaaactcactctctttcttttggttatctttgtttttattcttaatcggactattggctggatgtgtcggagactgtacggtaatactcgatttacggaaaaagacctctgcctcaccatttagtttgtataccacatccttcagattctcttcgtcgaaaagcattttccaatacagagtatgcatatttggcgttcctttactgtgagcagaaaaatctttgttatatatctgaaaaagatatagtttaccttcttctaccagcgattttatgtaggcaacagatactttgcgaaacgacattttatatccttgctgctcaacttcacgataaaattcacttatatcttggtaagtactcgtgtcggaaaacttgaagtcgaattttttccagtcgtcgtgcctctcaatggattttttgaaaaagtctatcaaagccctacagtcgcccaaatcgaaatctgcaccttttttatgagtgcctctttcatatttaccaagtaattcttcgcttgggcgaaatctttgtatccctgtttccgaaaagaaaactttcggtagcattttgttggcacccggtagcaatttgtactccatcttatcatagcattctccatcgtgaggcaaatcctctctatcgacaaaaactctattgtacttcttgcccataatacccaaatagtaaagaccgtctttgcaaaaaattaccgttgtattatcgggttctttattcaaatcccaaccgtccatcaatgtggagttttcgaaattaagttttatcttctttgtcgaatacggtttacttgtaaggtaattgcgaaccatattgtaaagaggcgttacttggtcgagttttgtccaaagagacgtaaattcaccgtagaaaactccatctttatcggcttcgtctcctttaccgagtagtggctttataaatcgctgtaagtcttttatggcatctaatagagtttttattttctctacattgcctttgtcttgcatcagattattgtctgtaatattatctgcattattcaataattctttaaccgacttataagctccctctatattctttttgaaagacgttgcatctgtttgtccctcaaccatatccgacgctcccatagcaacgaaataatcttctacacgttttacatacggttctccgagttgagcaagacattcatcgacatctcctatcgaaatgctgtcgatggcttttaattttttatcgatacgttccgcaaatttctccaatgactctctactcttttgcggattccttttagcacaatcctctctaatagccttacctataatatcccatctaccaaacattttctgagaaatatatgacagctgcgagtcgttactgatataaatcttactcagatcgtatgtagacagcgacttcaatatcgattccaatttatcgaatactttttctctttccgacaacgcatcatagcactctttgatttttatcagcaaatctttgtcggaatcaaatttcggcggcaaccacgaaacggactcgcgatcactcagaatctgcttatagagtggcttgagcttgggcaaacggttcgacctatcagtttgttgctgattgtactcattgatgtattgattcaatccttttatttgtattttgttgtcttcttctgtccgtcccccgacgattgcattatataggtctatctgtttttgtgtgagtagttcatcgtaatagtccaatctaaacactcttgatatttcctccacatttaaatactctttaaagtcctcataaagtgcgtttatcttttccgcaaggggcgacgaagcaaccttttcgaatgcggcgatgttgtcgacgaatttcggcagattttcatttatcagacgaaacgctatggctgtcgacttctcttctttggagtacatattctttcggttcttatgaaactccgtaaaatatgtggtaaaattcttgaacttttctacgagtttcttttcgctttcattcgttaaaaaatcaggcaaatccgttgttataagctcttttttatctattcgtttgtacttttcggactgcgtcaacttatttacaatttgcttacggagattgttttgtatagtcttgaatgtcttctgctcctgctcgtttcttttccttaagttgtaatacagataatattccgacagagaattattacttctaccatctgcctcagtatcaaaagtaaaacccgataatgcctcatcgataaggcatttatgatacttgtcaataatttttttgaccttgacataatcgtcggctctgaccgcatcatactcaagtaatttgtttctttgtatgtattcgagtgttttgcctatcggtttcaactcgaatcgcaatgttttggatataggataaagtcccacaaactcatcaaattttctcatattatatgttttttttaaattaataaatctacattcatacacaatacactccattcatttacttttattattttcgtgtattcaaacaaatattttattacccagcccacaaatcaacaaaaacagtctcactatacttagttataacaaattcaagcaattcacaactaaacaaaacatttaattcaaattctatttttaaacttttttagtgagactgagaatttctgcaaaggtaatacatttttccaatatgaagaatgttttgtttataattttatattatatcactctatttactacaccaacctaataataagtatatttataatcatatttcaaaaattcatttacagcaataaatgctattcggggacttatttgtatttttgcagctaaaatagttttttatgaaaaatattttaggactcgacttgggcacaaacagtatcggctgggcttatgtaaaacaagctcaaaatgactcggaaaaatcagaaatcgtagaattgggcgtaagagtgaaccctcttacagtagacgaaaagacaaattttgaaaaaggtaaaccaatctctaccaatgccgatagaacactaaaacgaggagccagacgcaacctacaacgctacaaacttcgtaggcaagagctaatagagttactaaaagagtatcaagtgatttctgacaaaactattttagccgaagacggcaaagggacaacgttcgagacactcagattgagagcaaaatctgcaaaagaacaggtttcgttagaagagttggctcgcattctactgatgataaacaaaaaaagaggctacaaaagcagcagaaaagccaaaaacgaagacgaagggcaattgatagacggaatggaaatagtccgaagactatatgacgaaaacctaaccacggggcaattgtctttgcagcttctaaaagaggggaaaaagtcacttcccgattattatcgttctgatttacaacacgaattagacaaggtttggaattttcagaaacagtttcaccccgatatattgacagacgaattttatacctccattcaaggtaaaggacaaaaagccacacgtgaatcgttttcatcgaaatacgggatagatactgccgaaaacaaagggagccgagaagaaaagagactacaagcctatcaatggcgagccgatgctacccacaaaaaactcaccaaagaagagttggcttttgtgattaccgaaatcaacaataatataaacaattccagcggatacttgggagcaatctcagaccgtagtaaagagctgatttttgctaacgaaacagtaggagaatacctttggaagcaaatacagaacgacccgcatacttctctgaaaaaccaagttttctacagacaagattatttcgatgaattcgaacggatttgggagatacaatccgaattttatccccaaattttgaccgagagtcttaaaaacgaactacgagatattttgattttttatcaaagaaagctcaagtcacaaaaagcattggtaagtatttgtgagttcgaaagtaaagaaatacccctgaaagacaagcaaggaaatccgatatcgaaaaacgggatacccgttacaaaattggtgggaccgaaagtagctccaaagtcatcgcctctgttccaagagtttaagatttggcaaaatctcaacaacgttttagtacgacccaaaggtagcagaaaaagaaaagttactacagatcaacaatctacactccttgaagggcaagaacctgttttcgaactgaatttggagcagaaagaattacttttcgaagaattgaatattaaaggtaatctaaaaacagattattgtctggaaattattggatactctgcaaaggagtgggaaatgaactaccctactctcgaaggcaacaaaacaaacaaggcattatacgaagcttatttagaaatcatcgattcagagggttatgacgcaaaaaaactactgaaagtaaaaaccgacaaagacgatataaatcttggcgacatcaaagtatctacctcggagataaaaactatgatttccgatattttcaatgaactaggtatcaatataaaaatattggatttcgacgccgaattggaaagaaagcaatttgaggcacaagcctcttacagactttggcatttgttgtactcttacgagggcgatgattcaaaaagcggtaacgaactgctatacaggctcttggaagacaagttcggatttaagcgagaacattctaaaatattagcaaatatctctttattaagtgattatgggaatttatctaccaaagcgatgcagaaaattatttcccatttaaaaaagggatattcttttgcaggaagaagatataaacccaatgaaaaaagtgcatgcgaattggcaggttatcgtcattcaaaactctcgattaccaaggaagagaacgaaaatcgtactctgaaagacaccttggatgtcctgaaaaaaaacagtctgcgtcagcccgtagtggagaagattcttaatcagatgattaacctgataaatgaattgatagaaaaacacagcgaaaaggacgaaaaaggtaatatcgtaaaatatttcaagttcgatgaaattcacatagaattggctcgtgagttgaaaaagaatgccgaagaacgccgagaactcgactcaaaagtaagagaaagtaaagcccgtaatgaaaaaatcataacaatattaaaatcagaatttggccttccataccccactaaaaacgatattattcgttatcgcttgtacgaagaactgaaatataatgaatacaaagacctgtataccaataccgacatacctaaagaaaaattattcagcaaagaaattgacatcgagcatattataccaaaatcaaggctattcaatgatagtttttcgaacaagactatatgctacagacaagacaatctgaataaaggagaaagaacggcatacgattatatcgaaggactgggaaaaacacaattggacgagtatctcaatcgtgtagaaaacttgtatgtaaataaaattattacaaaggcaaaataccgtaatttactcaaaaaagaatccgaaatcggcgatggattcatagaaagagatttgcgagaaacacagtatattgcaaaaaaagccaaagagatgcttttgcaaatcactcgtcacgtagtatcgaccacaggcagcattaccgaccgtctacgcgatgattgggagttggtaaacgtaatgagagagttgaatctgccaaaatataaagcattggggctaaccgagatacaggaacgcaaaaatggacaaacggtagaagtcataaccgactggacaaaacgtaacgaccatcgccaccacgcaatggacgctctaacagtagctttcaccaagcacagccatattcaataccttaactttctaaatgcccgcaaagacgagaaacacaaagagtatagcaatattatggggattcaacaattagaaaccgagaaaacaaccgataaagacggtaaggatagacgggttttcaaagctcctataccaaatttccgccaagtggcaaaagaacatttagagtcgattctgatttctcataaaacaaaaaataaggtagttacaagggcaacaaataagattgcaggaagcaaaaaacagcaggaaaccctctctcctcgcggacaattgcataaagaaacggtttatggcaaataccttcgttacgtacagaaagaagaaaaaataggctctaaattcgatttacagaccatcgaaagagtagcaagtcctttatacaaaaggctattaactaaacgattggaagaaaatggaggtgaccctaaaaaagcttttacaggcaaaaacgcattggcaaagactccaatatatttagacgaggcacagacacagcaactgcccgaaaaggttaagctggtttggttagaaacagatttctctatcagaaaagatattactcccgacaatttcaaagacgaaaaatctatcgataaggttctagacgaaggaatcaagagaagcctaaaagaccgactcaaaagtttcgatggagatgccaaaagagccttcaccgacttggagcaaaacccgatttggctcaataaagaaaaaggcattgccatcaagcgagttacgataagtggagtaagtaatgccgaaccgctacataccaaaaaagatcatttaggcaatgaaattttcgacgacacaggcaaacctatccccgtagactatgtcagcacaggcaacaatcaccatatagccatttatcgcgacgagaatggtgatttacacgatgaagtagtatcatttttcgaggctgttaccagagcaaatcagggattacctatcgtcgataaaacctataaccgacatttgggttggcaatttttgttcacgatgaaacaaaacgaaatgtttgtattccccaacaaagaaacaggtttcgaccctcaagaggtagatttgttagaccctaaaaacaaaaaacttataagtcctaacttgtttcgagtacaaactatctctgtagtaaagtatggtaataatgtagtaagagattttaagtttcgacatcacttagagacaacagtagaggacaaaaaagaactacaacaaattacttatcagcaaataaagagtttatctccgttgaataatatagtaaaagtacgaatcaatcatttaggagatattgtgcatataggagaatattgataatcaagctatgattaaacgtacaacatagatttccacatcgacaaggagaggtcgccaattgtttcagactacaaagatacaaacttttgaaagcaattcacaacgacttggtcgctggcgacgtagctcttaatgttgtttcagactacaaagatacaaacttttgaaagcaattcacaacttatccatatcctcgatattagcgtcgatagttgtttcagactacaaagatacaaacttttgaaagcaattcacaacttcgacctctgattaccgccgacgtacgccgttgtttcagactacaaagatacaaacttttgaaagcaattcacaacaatcttggaaaaattgattggtgggagaccgttgtttcagactacaaagatacaaattttctcaaagcaatttacaacactatgtcagaggaagttaaagtgtttttgttttttcagataataattttatctttgcgctttaatttaaattttaaatttatgggtattattgcaacacttattattggagccatcgccggatggttaggaggaactatctacaaaggtagtggattaggacttatcgggaatatcattgttggtattcttggaggtatcgtagggtattggcttttaggaagtgtatttcacatctcacttggagaaggatggatcggttctatcttgacaggagctattggagctatcgttattttgttcttgataaatttgatatttaaaaagaagaaataaggaaggaagagcagatattttaatgtctggtagttttttcccatctaatacatgaaaagccccgaaatattagatattcggggctttcttcttacattatttagaactatctttttgcgttagcagtccaggtctttccatctgtagtatacagaatattcaatgaagaggcattgattttaattattttcacaccatcttgcaagtcgatgttcaccaatgtgtgatctccttcttttttgaatttaacacctttaagatcaggaatgccgtctgaaaagcggaaataatagtcttttcctgccttaagaactgttactgaaccattgtcggcagatttttttgtttcactatctgagtaagagattttacccttgtaggttcctacaaaaaggtcattgtctgccgggtcatcattcttgctgcaagaagcgcaagaaaaagctactagtgataaacaaatcactgaaaataaaacaaatttttttttcatgtttgattgagtttaaaaaattaatataaaattttgcggcaataatgccatgataaatatttattcaaattgaatagtttaaaaataagtttttaagttagttatcgaaaaacaaatcttcttagagatgtttttttatctatttttgttcaaatatcgtttcgctaaaaatcgcataccatatcccaaagctatatttatccttcgttttttattaaataaaagagagggccaagtattagctaataaattctttggagttaatctctctgctgaaactgattataaattctatattatactgtttcagactacaaagatacaaatttttgaaagcaattcacaactcggcgtcgcgtggacagcaggattaccctgttgtttcagactacaaagatacaaatttttgaaagcaattcacaacggctgctttgagtgtcctttttcaggcttagttgtttcagactacaaagatacaaactttctcaaagcaattgacaacaaatcgtagcttgggggctgtatgtagtaatgcttggtcactgcgtaagcgggggctgtgataacacttgtgccgaaaatagccttagactgatagtcaaatgcaatcatttacagcacacctgttgccaactcgttagaaccacaaacggcttccactcgtccgaggttgtcaatgtccgtttcatagtagaagtgattgacatccatacaattcaaatattcttctttattctatcgctatcgcttctggtatcctttttaacttaccatcatgattaaaatcgaacattatccatgatttgtctgcattctcatcaatctcattatttatgcaaattgatttaatgtagtatattaaagcgaaaccatcttgagttttttgttttttattgtattgacccatgtgttctataaacgcaagagtatctttaccaacaagatgattctttgtaataatactatcagccatctgagctgttctctgtttcaaacatccgcaactatctcttttccatatatcttcacacatattagttttatcatctatattagacatcactatagaatctccctgcgttacagaatattgatgtttagcattttggcaactcaaaaatgcacatagcacaattgtaaaaagaactctaacaacttccatctttcttaattggaaatatttacagatttattgtttcgataatttcaccaatattactccaatacacatcgacaacattttccttggtaacgggagcagcaaggctatttcagactacgaagatacaaatttatcaaagcaattgacaacttatagcaagccattatctgtcaatttaaaggctttatctctatacaaaaatctttaaaacaatgagcaacgtcaacgactccttcttcgagaccatactcccaagatacatatttaatcacacctgaaggaatttcaatatagaactcattacctgcagcgtctctggcaaatgggatatgcttttcagcaaaaatcttcatactgtcagaattttccttagccgttttccacatttttgctaagtgttcaatactgtaaatgaattctatttcgagttcataatacccttcatcatcagttccttggaaatgttctatgcttatttttgctccctccgggaaatacactccattctgagagagatagaactgtacaaattcctctttccctctaaaactttgtggtataacactttcgattatatcggctgttacgcttttgttttgaactttgagaatcaagttttggtgtttaaagaaagaactcttcatattcatttatccgattttatattccatttcgaaaaatcgacctcactttctgctttctgctcgatactatcaggcagtgcggggaagaaatcaatatcggtaatcttttgtatctcttcgacgctcatagcataagtcgataacggtttccgcccgctttggttggggtacataaaagcgatagccgaccaattaccattttcgtcttgcaacagcactttgaaaaaagcgtcggggacagccacattattgctaccgattgtttggggacgttgcgaaactatcggtccgcaaacgacatagattttgcctttctgtcgggctaacgctcgaacctgctcttccaaatctttccagatgccactatttagttttttgttttgcgggcagatattggagaggtaaaaggactctttcattgcttgctcgctccacttcatatcgcctgccggagccatatgtcctctatcccaacctgtacccttgtagtcgtaagtcgtcgccgattcaccggaggggacttcggggtcaggcataaaaacatcgtaacgctcaacagctcctccgacttcttcttttgtgagttcgtaagcgacccaattcggaatcttccaatccgaattataacttacggtataacctgtatgacagataatttgctccttccgacctgctatctcagcagggatttctaccttctgaataactgtatcttctgtcaggttttgcgttacgttcggttggttcgcaagcaaaaaaacggctatcacaaatcctacggctatcagaattaaattgaatttgatggatttcgaatgtttgctcataattctctattttttcttacattgggatatcgatagtacatatttcgaagagtttttcgtccgtcgaattgacctccttcgacaaacggtttgcctgtcgctctatggtttcctcgaacaattcggtcagaaatcgacaaaacacctcgtagataaacgacacaccgtctatggtgtttcgatacaaaagattgctccatcggttcgcaaaggtacgaataaaaaatcaaacaaagtcaatcggaagtatagagacaaggtgtaaactgctcggcatagaagcacctaaacgtgtagacgtaacaacggcgggagagaagatagaatttaagggatttaattttttaccgtatacgaaattggagggcaagtaatatgaaggtaggacagaggatattgagcgtaagtgccgacgggttcgaggagctgaggaggctcgggctgctgcggtataatgcgggcagggatatagagatatacgactactatctgagcgaggtggatataacgggcagccgtatgcaggcacagacgaactgtgcgatgaggtacaacctatccgaaaaggctatacaggtgatagtctatgggtttgagaatagactgcggggtgcatttaagcaaggataaaaggatatgaatgtactaagagatagtcggaggaaagccgccgagcattgccgtagtgtttatgaggtctctgttttttttctccgcatcggaaatattgttgctgtatcgaactttggttaccataatcaatacaagcatagtaatacctgtggcagtaaaaacgacctctgctccgtcccactccataagggaaagaacaatggttgatattgtagtcgtaattactataagagccaaatatccgatagccgttttattttcctttttcatagtgcaaatatataaataaatttagtaaccaccaaatatttaacacaaaaaaatacatcaaaaaaatgagcgacgaaaagaaggtattaatcgatgtagacataaaggcgaccgaagccgaaacgcaactctccacgtgggtgtaagttgcagaagtccatcagcgagacgtctgcgaaaaagtgctttataaagtcattttctgtccgtatccttcttcaaagtcagttacgacacatctcatttcgtcgggtagatagctcagcacattagctttgatatgctcgggtataccataaaacgcttctgcgatacttcccgttatcgcagcgatagtgtcgctatcgccaccgatagacactgcaagtctaatggcgctctcgaagtcggcactttccaagaagcaaacgatggcttgcggtacggttacttggcaggttgcgtcaaatgtatttgtctgccttatggcttggcacgattgccctacattataaccgtattggtcggctgcgagtcgttttatgtcgtctttcgacgctccgctgcgggcatgcaatatacagtcggctatacagaccgcccctttgataccttcggggtggttgtgcgtacactctgccgacaaccgtgcgtattccaataccttttcccttgtcgacagccaaccgcacggcgatacacgcattgcagagccgttgccgaagctattgtaaggctcgggggcagcagagtgtgtccatcgggcgaaaaggctaccatagccgcctttgggaggcgtgtattttctacaccatctaagtagtgaccgctcgaatgagacacccgtcagaatagcatctgctacagcaaccgtacaaacagtgtcgtccgtaaaatcgcactcggacgtaaacaactcgaagtccgtcccgagatagttgtcgaactcgaaacgcgaccctataatatcgcctgcaatagctcctaacatatacccgacacaaaagtgttgtcttcggattcgacccctatattcccaataatttccttacagcaaaacgttctcatctccctatcattctattacttatgagataactcaatatgtcctttagccccttttctttttggttcatatcaacaccgaaccaatgttacgttgcaaatataataaatcttttcccgctccgcaaaatttactgttcttggcaaaaactaaatattgttttttatttttgcatggcgtacctttgcataaacgctgtgttctttgcggtaaaaacacacatccgcttaaacaattaaacgattgaacgaaaaagggcgaacacacaggttcgaccctacattccttcattcctacatttcttaaattcctacattctcctcacacacccaacacctaaaacctaacacccaatacctaaaaaacataaaaaagaagtgccatctatcacagacagcactcccatctatataacatcatgaaaaacaattttcctacgattattccgcctttttggcctctttttctcccgaattcatctgctccttcaggtcggagagagcttcgatatcgccaagggtcgtcttagccttttttacgggctttttctttacctctgtgctatgttctcccccttcggtcgtactcttggcgttctgttcgtcttcgaaagtacggctatgcgacaagataatacgtttggcatctttgttgaattcgataaccttgaaaggcaacttttcgtctatcttagcctgctttccgttctctttgacgatatgcttgggagtagcaaaaccctctataccgtaaggaagagctatgacagcacccttgtcgaagagttctacgatagtaccttcgtgtatcgaaccctcggagaatatggtctcgaacacgtcccaggggttttcttccaattgtttgtgaccgagcgacaggcgagagttttctttgtctatttcgagcactacgacttctatttcggagccaagctgagtaaactccgatggatgttttatcttcttcgtccagctcaggtctgagatatggataagaccgtctacaccctcttcgagttcggcaaatacaccgaaattggtaaagttgcgtaccttggcggtatgccttgtgccaacggcatatttggtatcgatagtagcccaaggatcgggcttgagctgcttcatacccaacgacatcttacgttcttctctgtcgagagtaagtatgacggcttctacctcgtcgcctaccttgaggaagtcgtttgcagagcgtaggtgctggctccaactcatttccgatacgtggataagtccctctacaccggggattatttcgaggaatgctccgtaatctgccattaccactactttacctttcaccttatcgcctaccttgaggttctggtcgagagcatcccaaggatgaggagtaagctgcttgagacccagagcaatacgctttttctcttcgtcgaagtcgagtataacgacattaattttttcgtcgagtttcactatttcgtcagggtggttgacacgtccccagctgaggtctgtgatatggataagaccatcaacaccgccaaggtctataaatacaccatacgaggtaacgttcttgacgataccctcgagcacctgtcctttttcgaggcgcgagataatctctttgcgttgctcttcgagttcctcctcgataagggctttgtgcgatacgacaacgtttttgaattcgttattgacttttacaatcttgaattccatagttttacccacaaacacatcataatcgcgtatgggtttgacgtcgatttgcgagccgggcaagaatgcctctattccgaatacttctactatcataccgcctttggtacggcatttgatgtatccgtgtattatctcctgactttcgagagcagcctctacctgttcccaagcacgtgcatgtttggcgagtttgtgcgagagtagcagctgaccttttttatcttcttggttttcgatgaatacctctaccttatcgcccactttgaggtcggggttgtagcggaattcggcgtacggtatgacgccatcggatttgtatccgatgtttactactacctcgcgtttgtttatggacactaccgtaccctcaacaacctcttggttttgtatctgactcaatgttttgtcgtaaagctcggtatcgagctggcggttcgatttgatatcatcgcctttttcgtaagcttcccagtcgaagttttcgggagctacatttgcgttttttaccgcttcttgcggttcgttggtggaattgaattcttccattttttctttttctttaaagggttagacaatatgagatactcgccccatacaggacagtacctccgttaattaaaataaaacacaaaggtaatactttttttaatatctttattcgtagcaaagataataaatgaggctcaagattagtcgagcataaacaatctcccataatcaactataaaacaatggataacaaacactttggaggcattaagtgtttcggaagagaaatttcagagcaatattacaacagacattaaattatcggaatcagaatttatacttaactttgctcaaaagtttaataaatacccgcttaaagtttttatatatttattcgacttatcaattatacttttttagcgatgaaaaatatccatttattaatttttagcttgagctatgtgattgtattgcaatcaattcctcacacaaacaacaaaacaaattctaaagaggaaaaagttttagagaaacaattactaagagctcactccatatcaaacgaagttaccaccatacgatattatccctatgataaggaagacttagaagtctctattgctttattagacagcatattaaaagaaaacaagtacacccatatcgatgattttgacagtaaggttaaagctattttcggaaatatcaaacgatacgataacatatattttctgagacaagacaatagatgttacgattctaacgagatattatacaatgactctgaagggtttaagcttaatttatatttctctatcgataaaaaattgatgataggacaatatacaatacccgaacttattgattacaaaaccaaatatcctacgacatctaaaatagaagacactatatctgtaacaaagaaaaacagagatggtgaaaatatttatgtaacaagatggagagatatctccgaccttgacgctcaacgcaaggaaaacacagataggctggtacatcgtaataaatacttgtttaatgacgacagagcttcatttgattggcttataaagaacgatactttttttatggagcaattagtgaagacgtttggctatacgcaagatattgatttgttggagtgggttataaagaggacacattacgaaaaaaatcgtccggaagattacggcagtttattctgggtaaagaactgcgatggctctataacactgcattccaacactttcaaactcctacaaaaactatataatatcaagactgcctatcgaatcttagaagatataaaaggttatatcaattatttaggcaatgacgaattgagtaatagcgaagaactaacagaaaaacagcgaattgagatattggcaaacatagcttactttgcagaacaatataagtataccgataatagctcatatcaaatgatgggcagacttcggtatttttttgctccttcattcgattatttaaaacaaaaacattatttcggactcccaaaattcaaggaatggtgggataaggcagattacgatgaatactatgtaagacagtgtgaatatgaaggctcttgcggtacaggctatcaccctttatcagagaaggaatggaagaagcggaataacaagtaataagaaacgcaaacgacggattgtctttcggaaacaggtatactcttactcaaatacatctatatatcaacacattacagcaaggagtataaaaatttcacacaatacatataaattacttgtttcatactaaaaactttttattacctttgcccccaagataggaaagaggagagatttgtatgcttgcaacctcagaaaaaaatgctaaaaccattaatactaaggcttacaatatactatttatcctgttttctgtcgggacatcggttttgggcagatttttttagccaaacctcatttattaacaaaaaaaca

SEQ ID NO: 2098 - DNA, 24356 bp, synthetic construct
  misc_feature 1..24356: note = Synthetic
  variation 15760..18231: note = n is a, c, g, or t
  source 1..24356: mol_type = other DNA
aacgcgtatttaaccttttatcaaatgaatgaataaatatcctttttctattgcaaatttgctggaatattatgattattccgaataatgaagcaactctaccttttcataagtgcctacctgctttgcgttccttaccaaatacttttggctcaaggtgatacagaagcagtacaggccaaccaaaccgagctcaatgagctaaaagggctctatcaagagctcatcccctacccgcaggaaatttccgctggaggaatctacgaagctggaggaacattccatatcgaaggaactgccttcctggtttcctccgaatttatccgcggaaacgtctccatcaatcgggaaattttcaggaacttattcttgaattatgatgtgatgagagaccaactggtaacctaccactccgctaatttccagcagatcgtattggatgcacgcaaagtggagatgtttggccttgccaatgacaggatcttcatgaaaatcgaccgaaatacctcctattcatggcataagaatggattttacgaggttttgctggatgcagaaatcaaatttctctccaagcactataaaaccgaagaaattcagcgcgattacgggagttccgaaaaagcttttatttttataaatcatgaggatttcttcgtaatgaaggatcaggaatttataagaattcggaccaaaaaagacctggccaatgcggcggggattagcaaaaaggaaatcaacagcgttttaagaaaaaatggtctgcggtttaataaaaatcaacaccgcaccatgatcgaggttggcaaagcctatttttctaacgataactccccaggtcaatgaagtcaacccaacttatttttatagtccttttatttatggggggcctcggcagtggatttgcccaagatcaaaaatccagtcaggaaaaaattaccggcttatttccaggcatcagcttctccaggtttgtcaattccgtggaaagccagacttcctatcagttttattataagcaatcggatgtcaaggatattcaggttaatataagtgccaaggataacgatttggcggatgtattaaaattgatctttgaggggaaagagatgcaattccgcatagacaagtccaagcgggtattcatatatcgttcgggtccttttcatacgggattgagcgccaatttctttcagcaggaaccgcagcagggggaatttgaaagcatgtcttccgagttggacctagatcgagcctttgccaaaaacaagctatgggtaataggaagctcgcagagcagcgataccgagcccaccgctaggctgtcaggaactgtccttagcctcaaaacaggcgagccagtattcggagcagtggtttatgaaaaaacgaattttacccgatccatcacagatgaaaatggacaatttagcctcgaacttcctaaggggcgtcagacgatttatatccagcatctgggtcaatttcaggagcaacgtcaggtagaaatgcggggctcaggctctttggagctccagatagacgagagcatagtgtctctggatgaggtggtggtgagctcagaccgactctccaatgtaaacagaacagagatgggagtggaaaccatgtcggtatcctccatgaaaaaactcccttcggtcatgggggaagtcgatgtaatcaagagcatacttaccctgccaggcgtgaaaaccgtgggagaatccagcgtaggcttcaacgtccgtggcggcggggccgaccaaaacctagtgctactcaaccagtccaccatctataacccttcccatcttttcggcttcttttctgccttcaatggcgatatggtcgaaagtgtggccctgcataaggcaggcatgggagcagaatatggaggtcgtctatcctcggtattggatgtccggggaaaatacggaaaccgtgagaaaatcagtggtagaggaggcataggcctgctcactagccggctggcatttgatggacctgtgggtgacaaaaccacctttatggccagtgccagaacgacctatagcgactggctgctgaatctggtcaatgacaagtcggacctcgacgctgcggcagcaagcttctacgatctcaatttaaatataaaacactatctcgatgagaaaaatgagatcagcctaaccagctacctcagccatgattcatttaatttcgtcgccgacaccctatatgactttaccaatagaaatattgccgtaaactggaagcattatttcaacgaccaactcgaggcggatttctccatgggttatgatcaatatacctttggtatcgaaggctatgaaaatgagctcaatgcctttgaatttgactttaatatccagcagtaccacctgaaggcccacttcgattatgagcagggcgattatcatacgtttaaatttggagtagataatattctctataacctacagcctggagatattatgcctctgggtccaaactccatcgtccttccagagaccgtcatcaccgaaagagcgctagagtcggccctattctttaccgaccgctgggaagtcaccgaaaaattcactgcagaccttggacttcgctatggaatgtaccgcatgctcggaccaaaccagtttaaggaatatgcccctgatgctccaaagaacgacgaaactgtcacgggaatcgtggattatgacaaaaatgaaaccatcgtcacttatggtgccccagagtttaggcttagtggaaggtatattttggacaatttcacctccatcaaagctggcatacacagcacccggcaatacatccatcagctgtccaatacctcggcagtcactcctactgatacctggaagcttagcgatccctatatccaaccgcagcgcggatatcagacctccctaggcttctataaggaccttaatcagggactgatagaaacctccgtggaggtttattatagagggatgagtcatctgatcgattatcgaagtggtgcggagttattattgaataatgatattgagcaggacctgctcgatacagatggcagagcctatgggctggagctgcagctgaagaaaaccacaggcaagctaaatggctggattagctatacctattccagatctgaaatgcgcacctccgatacggagctatccgaatccatcaatggaggaagctggtaccctagtaattttgaccagccccacgcagtgatgctagcagccaattacgaactctccaagcgagccaacgtatcggtaaataccaattatagtacgggaagacccattaccttgcccgtggcaaaattctattataatggagctgagcaagtcctgttttctgaaagaaatgcctataggattcctgattatttcaggatagatctagcgctaaacctggaaggcaaccataaggtggataagcctgcgcatgcttcctggtctctaggcgtctataatttattaggaagaagtaacccttattccatctattatacccctgtaaatggccagcttaaaggatatcaattatcgatatttgccagtcctattccatatattacctataattttagattttgaaaatgactcgtctaaataaatcaatactcattaacctcctgatctttgcggtctttatggcctgtcgggagccgtatgatccagagataaacagtgaagacctcaatgtgctggtcgtggaagggcatatagaaacggagggaggtagctcctgggtttcgctcagcaccacaggctcattagatgattatttcaattcttattttcccattcaaggggcgcaagtgaggatactggatcagaataatggcagctatacactggatgaaaataatccgggacgctatactggaagccctgcattatcctccgaccagcagtataagctggtcattaccaccagcgaaaatggtacttatgaaagcgactggctccttcccatcgacagttcacctatagatgatattggctataagcctgagggcggaacgcaggatctggaggtctatgtatccacccacggaaccgaggaggcgcaatatttcatttgggattatgaggaaacctatatcttccgggcggggattccctccttctataagtatgatgcggtccgcgacaccgtggttttccgtagcaatcctgccgaccgtattgagcgctgctggaggaccgaatatacggatctcatcaatatcggctccgccagccaattcgcggaaaacttcatttttgagaagaaaatccaacatatcccctatggatccgaaaagatgaccgaacgctattccattctggtcaatcaacgcgctattagccgtgaggcatataccttctttaatattatggaaaaaaacaccaatgatatgggggatattttcagtccactgccttctaatctaagtagcaatctccatcaccttaccgatcccaacaaaagggtgattggtatggtgaccgcaggaaactccgtatctatgcgggtcttttttgatcgatcggagattgatttctggcgcgtggataacccctattatgctggatgtgagatgtatgatgacaccattaaaataagcgaacaaagattttggttccaggacttaggagccaaccctgtcttagtggtagagggtcccacaggaggaattttaggctatagaggcgcctccgtgagatgcaccgactgtaccttgagaggggtaaatgtagcaccagatttttgggtcgataatttatgaaaaaattcaaaaccatactattagcaatattattccttgcgatataccaagcttcagctggagctcagaataccgccttcgaggaatccatcagcgttcatctggcaaaaaccatcgctgtggcgggtgaaaaagtacccgtgcaagtgaccctgcagcttcaagggcaggcaagccccctgaactttgtctatgccgaactgctcagccgagatggaatacgatatgctgaagcgatcatacctctggaaaatggccgggcctctgcctatattcaaatcaccgatgagaccccaagtgaccactatctgctaagagtctatagccgactgggagctaaatctaccaatcctaaggccaactatcaggaactgataactatcatcaatccggaaatccctccgaccagacaaggaggcacttctgcctcttccggaaataccctccagctgagtgcgggcgaactgggaatcgatatggctagcagctccatgggccgtgctcaaacagccaaactaaagataaaggcgccaagccaaggcaaggtcaacctatccatcagcctgaaaaatccatacagcagcaggctggtgtttcaggaaaaactaaacagtgagccagcatcttccagtgaaatgatccctgaaatccgtggacatataatccaaggccaggtcacgagcagcccggtggacaccctaagttattacctattgagtgcccatggcaagcagtcggagctatttctctcccgtccaaatgccgagggggagatttattttgatcttggggtatttaagcattatgacttcctgatcttgcagtcagagcgcgattctgttgcttttgacttccatatccagtcccctttcgccagtccacccgatctttcctggttgccaaagctggagatagacgaggaagatcaggcctggctcgaccaatgggtattgggccaaagcatcgctaggcattaccttgcgccgcttcccctgccacaagacagcctggtgaccggttttaccgccgatttaagttatctattggatgattataaccgatttgaggatatgggtaccacctttaaagaatatttccctacggtaatggtaagaaaatcccatggaaagacccatttcaaattgatcaataaacctttgggaaccgtctttgatgaaaacccactgatgcttatcgatgggatgcctgtgtttgactcagaccaactggcaaaattccacccaaaaaatatacgacaggcactgatcaccaatcgtgaatattatattcgtaataagtccttcaagggggtgctggatctaaagtcctatcaaaatgattttgcaggatatccactacccgaaaatgccctctatctcgaatacccaagcatacagcaggaagtgatctgggattttgagcccagcggggcggaagagcaggtaaaagcccccgacttaagggatattttgctttggcaaagtaatatctttatggaaggcaatggagaaaaagaatggtcctttaccacttccgagttagcgggaacctatgaaatcgtcctcagctatactgatacgcaaggaaatcactaccaaaaaaccaagaccttcaccgtcctttaatccactaccccctgccccctaaagggggttcttgatctttctttaaaggacaattagatcccgaaattggagattcaagaacgtgaagcaaaccaatagaattcgacattgaaatctgccttttttgctcctcccctttaggggaggcggggtggggtgaataaaaccctgactggtcctataaatagtttacaagtttgtatttagatcctgatttagattgacagcgtatcgactaccccctgccccctaaagggggttcttgatccttctttaaaggacaattagatcctcaaattggagattcaagaacgtgaaccagaccaatagaattagacattgaaatctgcctttttttgcgcctccccttcaggggaggcggggtggggtgaataaaaccctgactggtcctaaaaatagtttacaagttgtatttagatcctgatttagattgacagcgtggcaactaccccctgccccctaaagggggttcttgatccttctttaaaggacaattagatcccgaaattggagattcaagaacgtgaaccagaccaatagaattagacattgaaatttgctttttttgctcctccccttcagggcaggctgggtggggtgaataaaaccctgactggtcctaaaaatagtttacaagttgtatttagatcctgagttagattgacagcgtggcaactaccccctgccccctaaagggggttcttgatcctattttaaggacaattcgatcctgaaattgaagaatcaagaaagtgaagcaaaccaatagaattagacattgaaatctgcttcttttgctcctccccttcagggcaggctgggtggggtgaataaaaccctgacttgccctaaaactagtttacaggtttgtatttagatcctgatttagattgacagcgtggcaactcccccctgccccctaaaggggggtcttgatctttctttaaaggacaattcgatcctgaaattggagattcaagaaagtgaaccataccaatagaattcgacattgaaatctgccttttttgctcctccccttcaggggaggcggggtggggtgaataaaaccctgacttgccctataaatagtttacaagttgtatttggatcctgagttaaattgacagcgtatcgactaccccctgccccctaaagggggttcttgattcttctcttaaggacaattagatcccgaaattgaagattcaagaaagtgaaccagaccaatagaattcgacattgaaatctgccttttttgctcctccccttcaggggaggctgggtggggtgatcgacaaataatgaaaaaaatagtccaaaaaaagaggctggctaggggatttgattcccttggccagcctttatatttatatagcacttctctctagatcaatatcctgcggcccaatcatctccacgaggatcgccagctccttcaagcttgccgtcaggctgcaccaggatcgcatcgactctaccgatggttccacggactttgatggcatgccccatcttctccaatgccattatcaccgcagaatcaagggctccctcctcagggaaaataaaatctggtttccactgcgaatgcactcttccggcacttacggcctctgtcatcgtcatcttatgatcgagaacattgaggatcgtctgatataccgaggtgatgatggtactaccgccaggtgtacccaccaccatcagcaacttgccatctctctccagaatggtgggagtcatcgcactaagcattcttttttccgcctcaatagcattcgccttaccgcctaacagaccatatagattaggtactccaggcttactgctgaagtcatccatttcattattcatcaaaaaacccgctcctgtcacaaagaccttagagccatagccggaattaatagtggtggtgaccgagacggcatttccatccttatccacgatggaatagtgcgtcgtctcctcactctcctgccctgccagctccatagcctccacttcattgctgtcggtggcttcgccaagatcgatttcgctcaccctgccagcgagataatcctcatccataagctccttccgaggcacttcccaaaaatcttcatcaccaagatgctttgcacggtctgcatatacgcgtcgctccatctcggtcatcacatgtaccgtctctgggctatgaaatccataagactccagcgggaaatattccgacatcctcagtaactgtatcaaggcgattcccccactgctgggcggtcccatactgtacaccgtcacatcatgatatttgccagacacaggcgttctccacttggattcatacctctccatatcctccatactgatgatgccattgccactttgcatctcagccacgaggagctcggcagttttacctttgtaaaaaccctcccagcccaacttctgaatacgcttcaaggtggccgcaaggtctttttgctttagcacatccccttcctgccagagacgatccagcctcaccaagggaatagctgtgctatcacggttattatctataaatcgctgcttggtgccattataattatcagcctgctgagcggtaatcgcaaatcctctcttcgccaactgataggcaggctcgatcaggtccttaagtggcatagtgccaaaacgcttatgagcacggatcataccatctaccgagcccggtactccggaggccatcggcccggcagtgctaaggccatcgataatttctccattttcatcctgatacatctcctcataagctgccagaggagccttctctctaaagtccagcgaaaccacttctccaccctctggacggtacatcatgaatccacccccaccgagatttcccgcagcaggatacaccaccgccaaggcaaaatgcacggccaccatcgcatcgatggcattgccacccgccttgagcacctcagcacccacacggctggcctcatgatgagcagagactaccatcgcctgattgcccaccacagatttgccctccgaatagtccttggtcggcatgggagcacaggaaaatagaacacagacccccagcaaaaaagccaggcctgaggtccatgaagaagaatgattataacgcataaataattttttataatagggtgaatgaatcgtaaatataagtcaattaatgaagtcaaaacctccagcaaatataggaaaatgttcggaatgcccatccctccactcccccctaaaaccgccaataaagggccctaacacgaggatatactagtaaaaaataccccatttcgggtattttatgaattggagaaattatgtaatttgaaaacccgtttaactataatgaaaaaagaaatactattatagatgataaactcaaaattaaaaatatcaattaaccaggcttcccaaaggggcataaaaaaagcctcctggtttataatggacaagaggcaacccaaatgttttcacaacggaataatccttattgtgaattgctttcaggtcagaaagatatggaaaaactaatagaatcaaaaaaacactcctcaaaatataaataatttttatgaaaagaatattaggacttgatttaggaactacatcaattggatgggcatacatcaaagaggcagagagtgaaaaagaaaaatcctcaattgagaaaataggggtcagagtcaataccctatcttcagacgaaaaaaccaattttgaaaaaggaaaaccaataacaacaaatgccaatagaacattaaaacgaagtgctagaagaaaccttgacagatatcagcttcgaagaaacaatttaattgaagtattaattcgtgagagaataatcaccaatgaatcaattttagccgagtccggcaaaaacaccacatttgagacatggaaattgagatcaactgctgtttctgaaaggataaataaaaaccaacttgcaagagtactattggctattaataagaaaagaggctataaaagcagtcgaaaagctaagaatgaggaagaaggtcattctattgatggtatggttatagcaaaaaaattatatgatgaaaatctgcatcctggtcaattagtttttcggctattaaatgagggaataaaaaatttgccagaattttatcggtctgatttacaagcggaatttgattgtatatgggatactcaaaaaaaatatcaccccgaggtttttactgataatttttatagagaaatcatgggcaaaggccaaaaagcaacatccgcggccttttggagaaattttggatttaacaccgcagatataaaagacatccacgaaaagttaaaatctcctaaaaccatctcatttggtttaagagaaaagaagaaatatcaaggatattattggcgaaatattggaattcattcaaaattagagaaagaggaagctgcatatgtgattacagatattaataatgaattgaaaaaatctagtggatatcttggagcaatatcagataggagtaaagaattatactttaataaagttactattggccaatatttatacaacaccctaaagcaagataaaaattcaaaacttaaaaatacagttttttacaggcaagattattttgatgaatttgaattaatatgggagacccaagctaaatatcatcctgaattaaccagaaaattaaaggaggaaattagggacattattattttttatcaacgaaagttaaaatctcaaaaaggattaataagtctttgtgaatttgagaatagagaaatatcagttaaaaaaggaggaaaaatttcaacaaggacaattgggtcaaaagttatccctagatcctctcccctttttcaggaattcaaaattttacagcttttacataatatcaaaattcgaaaaaaaggcagtaaaaaaagatcagtagcaaaagaaaaaattctaactgaagaatctgatattttcatacttgattcacttgcccgagagcatctctattcagaattaaatataaaaggaactttaaaggcgaccgaaataataaagcatttaggatataaaactacagaatgggaagtagctaactacacacagatagaaggaaataatacaaataagctattttatgaagcttatttaaaaattattgaatccgaaggttatgacattattgagatctttggcggcaaggctgattctgacgaggtaaaattaagtgatttcacaatttcagcatctgatttaaaggataaaatattgacaatttttgaatccttaaaaataaattctcagattttagagtttaatgcagaattagaaggaaaagcttttgaaaagcaagcctcataccaattatggcacctgctttattccgcagaggatgacagcaataatcatagtgcggacgatatacatacattcggaaaggataatattgacttaaaaaaactactatgtaataaatatggattccagcctcatcatgcaaagatccttaccaacctgccccttgatagagaatacggaagcttaagttcaaaggccattcggaaaatttatccattcatcaaagaacaccagtactcagaggcgtgtgaatatgcagggtataggcattctaaatcatcacttacaaaaagtgaggtccaaaatcgctcattaaaaaataaattagatttattaaagaaaaatagtttacgcaatcctgtagtagagaaaattctaaatcaaatgataaacgtggttaattcattaattgaccaggaaaatgtcctccttgtaaaacaaggtcttccaccagaatttcattttgatgaaatacgaatagaattagcgcgagaattaaagaaaaatgctaaggagagggaagaaatgaccacaaatattgctcatgccaaaaatttacatgactcaattttttccactcttcaagatgaatttggtattaaaaacccaactcgaaatgatatattaagatataaattatatgaagaacttaaaagcaccggatttaaggatctttatacgaatgtctatattcctcgtgacaaaatatttaccaaagagatagatatagaacatattatcccacaatctaaagtatttgacgatagtttttctaacaaaactttaacatttagaaagattaataatgataaaggaaaccttactgcatatgattatatcttaggagaatttggtcaaatagcattagatagctatttagaacgcattaaagtcttatttgatttaggtcaaaaaaacaataaggaaggcatttcaaaagctaaatatcagaaacttctaaaaactaattcccagattggggagggttttattgaaagagatttgagagatagccaatatattgctaagcaagcaaaatctatcctttttgaaataacccgatcagtagttgcaacttctggaaatataacagatagattgaggagggattggaatttaattaatgtaatgcaggaattaaattttagtaagtacaatcatatagggctaactgaagtaattgaaaataaagacggaacattcaaagaaagaattgtaggatggaataaacgaaatgatcataggcatcacgctttagacgcattaacgatagccttcactaaacacagtcatattcaatacctaaatcatttgaacgctcgcaaagatgaaactcatataaaacacattttaataaaccagattgagaataaggagactcataaggtcctcagtaaaaatgggagaaaaaaaactcaatttaatgttcctataccaaatttcagacaggcggcaaaagctcatttggaatcagtgctagtttcaaggaaagcaaaaaacaaagttgttacacgaaataaaaatttaattaaaactgttaaggaggtattaataaaaaccgaattaaccccaaggggccaactccataacgaaagtatttataaaaaatataagtacccaataacaaaggaggttaaaataggtgggagatttgatgaagaactaatttcgatggttaataatcctcattacaaaaagcttctgttattaagattatatgagtttggaaatgatccaaagaaagctttcactggaaaaaatgctttggctaaaaaccccatcttcattaatcccgataaaacagaaaaactacctgagaaaatatcgataacacaatttttggagggctattctattagaaataagatagaccatttattaaatattgataaagtaattgatgaaggagtaaaacaaatactaatggaacgtctagaaaggtttaataatgatcgcaaaaaagctttttcaaacctagaaaaggatccaatttggctaaataaagctaaaggaataagcattaagaatgtacggattaggggtaaaaaaaatgcagaaagccttcattctaaaaaggatcatttgggaaataaaattttagatcaaaatggatttgagatccctgtagattttgtaaatacaggaagcaatcatcatgtcgcaatttatattgataaggagggtaatcttcaagaaaatatagtttcatttttcgaggcggtagctagagcaaatcagaaattagaaataattgacaaaaattataacaaggacttaggctggacatttttattctccttgaagcaaaatgagcattttgtttttccggatttaggaaatggttttaacccaagtgatttcgatctattcagtaaagataataaaagcgttattagcccacatttatttagagtacagaagcttgcgacaaaagattatttctttagacatcatttggatacaagcgtagaggaaaatgctaagttaaaaggaattacgtggaaaaggactggcttgactggccttaagggaatagtaaaggtccgaataaatcacttaggagatgtggtctcgataggggaaacaaggtaatactgattattatgataaaacggacacttttctttggaaacccagcatatttaagcaccaataatgaacaacttttggtgacttaccctgataatcaaggagaaaagcaagtaccaattgaagacattggaatggtgattttagaaaatgcccaaatcaccattaccaatggattaatcggtaagctggttgatcataaggtggcagtagtatcttgtaataaccaacatctgcctgatggactgcatctacctctgcatggacatactgagcaaaccgaacgcataagatttcaacttaatgccagtcaaccccttaaaaagaatctatggcaacagaccataagctccaaaataaaaaatcaggcggccttgttatcagaacgagatgtacctattcaaaaactaactcatctagccaaaacagtacaatcaggtgattcgggaaataatgaatctcaagcagccgcctattattggcaacatatctttgacctacctgattttaataggggacaacatggacttcctcctaataacttgctcaattatgggtatgcaattctccgagcgataattgctcgagcactagtaagttctggattattacctgtaatcggtatatggcatagaaataaatacaatgcttattgccttgcggatgacatcatggaaccttatcgtccctttgtggatatggtggttcggcatattgtcgaaactgaggataattacgaagagctaaatttatcattaaaaacagaattgttatctattcctgtcttagatgtcaatataaatggacaaaaaagtccccttatgattgcagcaagtagaactactaattcattatttgagtgttatgcaggaataagtcgaaaaatcttatatccagtttatgaatgatcgtttttattccagattaaatcaataccgaagtatgtgggttttagttttttttgatcttcctaccgacactaaaattgataggaaaagggctagtaaatttcgaaaaaaacttctggatgatggctttaatatgtttcaattctccatctatatgaggttttgtgctagcagggaaaatgcagaggtacataccaagcgagtaaaaattaatcttcctcccaaagggaaagtaggtataatggcgattaccgacaaacaatttggtatgatggatctattttatgggacaaaactggctgataaagagactccagctcaacagttagagcttttttgattgaattattttaaaaggatatttggtatactctgatatatttccagctctgtttttccaatcctaatttcatacataactaacagcataccagcctattatgaccaggtatgctgtgattacctatgcaaggtacaagtctgaaagcaattcacaacnnnnnnnnnnnnnnnnnnnnnnnnnnnnnnnnnnnnnnnnnnnnnnnnnnnnnnnnnnnnnnnnnnnnnnnnnnnnnnnnnnnnnnnnnnnnnnnnnnnnnnnnnnnnnnnnnnnnnnnnnnnnnnnnnnnnnnnnnnnnnnnnnnnnnnnnnnnnnnnnnnnnnnnnnnnnnnnnnnnnnnnnnnnnnnnnnnnnnnnnnnnnnnnnnnnnnnnnnnnnnnnnnnnnnnnnnnnnnnnnnnnnnnnnnnnnnnnnnnnnnnnnnnnnnnnnnnnnnnnnnnnnnnnnnnnnnnnnnnnnnnnnnnnnnnnnnnnnnnnnnnnnnnnnnnnnnnnnnnnnnnnnnnnnnnnnnnnnnnnnnnnnnnnnnnnnnnnnnnnnnnnnnnnnnnnnnnnnnnnnnnnnnnnnnnnnnnnnnnnnnnnnnnnnnnnnnnnnnnnnnnnnnnnnnnnnnnnnnnnnnnnnnnnnnnnnnnnnnnnnnnnnnnnnnnnnnnnnnnnnnnnnnnnnnnnnnnnnnnnnnnnnnnnnnnnnnnnnnnnnnnnnnnnnnnnnnnnnnnnnnnnnnnnnnnnnnnnnnnnnnnnnnnnnnnnnnnnnnnnnnnnnnnnnnnnnnnnnnnnnnnnnnnnnnnnnnnnnnnnnnnnnnnnnnnnnnnnnnnnnnnnnnnnnnnnnnnnnnnnnnnnnnnnnnnnnnnnnnnnnnnnnnnnnnnnnnnnnnnnnnnnnnnnnnnnnnnnnnnnnnnnnnnnnnnnnnnnnnnnnnnnnnnnnnnnnnnnnnnnnnnnnnnnnnnnnnnnnnnnnnnnnnnnnnnnnnnnnnnnnnnnnnnnnnnnnnnnnnnnnnnnnnnnnnnnnnnnnnnnnnnnnnnnnnnnnnnnnnnnnnnnnnnnnnnnnnnnnnnnnnnnnnnnnnnnnnnnnnnnnnnnnnnnnnnnnnnnnnnnnnnnnnnnnnnnnnnnnnnnnnnnnnnnnnnnnnnnnnnnnnnnnnnnnnnnnnnnnnnnnnnnnnnnnnnnnnnnnnnnnnnnnnnnnnnnnnnnnnnnnnnnnnnnnnnnnnnnnnnnnnnnnnnnnnnnnnnnnnnnnnnnnnnnnnnnnnnnnnnnnnnnnnnnnnnnnnnnnnnnnnnnnnnnnnnnnnnnnnnnnnnnnnnnnnnnnnnnnnnnnnnnnnnnnnnnnnnnnnnnnnnnnnnnnnnnnnnnnnnnnnnnnnnnnnnnnnnnnnnnnnnnnnnnnnnnnnnnnnnnnnnnnnnnnnnnnnnnnnnnnnnnnnnnnnnnnnnnnnnnnnnnnnnnnnnnnnnnnnnnnnnnnnnnnnnnnnnnnnnnnnnnnnnnnnnnnnnnnnnnnnnnnnnnnnnnnnnnnnnnnnnnnnnnnnnnnnnnnnnnnnnnnnnnnnnnnnnnnnnnnnnnnnnnnnnnnnnnnnnnnnnnnnnnnnnnnnnnnnnnnnnnnnnnnnnnnnnnnnnnnnnnnnnnnnnnnnnnnnnnnnnnnnnnnnnnnnnnnnnnnnnnnnnnnnnnnnnnnnnnnnnnnnnnnnnnnnnnnnnnnnnnnnnnnnnnnnnnnnnnnnnnnnnnnnnnnnnnnnnnnnnnnnnnnnnnnnnnnnnnnnnnnnnnnnnnnnnnnnnnnnnnnnnnnnnnnnnnnnnnnnnnnnnnnnnnnnnnnnnnnnnnnnnnnnnnnnnnnnnnnnnnnnnnnnnnnnnnnnnnnnnnnnnnnnnnnnnnnnnnnnnnnnnnnnnnnnnnnnnnnnnnnnnnnnnnnnnnnnnnnnnnnnnnnnnnnnnnnnnnnnnnnnnnnnnnnnnnnnnnnnnnnnnnnnnnnnnnnnnnnnnnnnnnnnnnnnnnnnnnnnnnnnnnnnnnnnnnnnnnnnnnnnnnnnnnnnnnnnnnnnnnnnnnnnnnnnnnnnnnnnnnnnnnnnnnnnnnnnnnnnnnnnnnnnnnnnnnnnnnnnnnnnnnnnnnnnnnnnnnnnnnnnnnnnnnnnnnnnnnnnnnnnnnnnnnnnnnnnnnnnnnnnnnnnnnnnnnnnnnnnnnnnnnnnnnnnnnnnnnnnnnnnnnnnnnnnnnnnnnnnnnnnnnnnnnnnnnnnnnnnnnnnnnnnnnnnnnnnnnnnnnnnnnnnnnnnnnnnnnnnnnnnnnnnnnnnnnnnnnnnnnnnnnnnnnnnnnnnnnnnnnnnnnnnnnnnnnnnnnnnnnnnnnnnnnnnnnnnnnnnnnnnnnnnnnnnnnnnnnnnnnnnnnnnnnnnnnnnnnnnnnnnnnnnnnnnnnnnnnnnnnnnnnnnnnnnnnnnnnnnnnnnnnnnnnnnnnnnnnnnnnnnnnnnnnnnnnnnnnnnnnnnnnnnnnnnnnnnnnnnnnnnnnnnnnnnnnnnnnnnnnnnnnnnnnnnnnnnnnnnnnnnnnnnnnnnnnnnnnnnnnnnnnnnnnnnnnnnnnnnnnnnnnnnnnnnnnnnnnnnnnnnnnnnnnnnnnnnnnnnnnnnnnnnnnnttccgaatattcctgtgctgtgattacctatgcaaggtataagtttgataaccatctattacccccctcattccacaattaaagcaaaaacacttgaccagcgacataatctagggtcatttttattggatttactcagaataaaaaaatgggcggatgctaaaaggtgactattttaattttgaaagggcatccatataatgggctacatgctattagttgctccaatctctcctgacctaatatacaccggctctcttccacctgcctggaggccctgcgcggagggattcgaaccttccacgcagggcctaaatattaattcgtaatacttcattaaatcaaaaaactaattcgaagtctcactattgcgatttaaaagccatccccctccccctatctagcaaaaccgatcgaccacgaatccttctagtgggcagctggggctttggtgatgggcgatttgggcgaggagcttgccggtggcgggggccaggctgaggcccatcatgctgtggccggtgccaaaacagacattggtccaccttggagacttgccgatatagggcaggccatccggggagcagggccgcagacctgaccatatctgctggtccgcgggaaactcggcccggaagtcgggataatacctgcttatagcatcaaaaatcccttgcactcggttgagattgatcttctggggttgattggagatctccatggtccccccaaatcgcaccttgggtccataggggctttgcgaaactctcgcttcggtcaaaatactggcttgttgcagctggggctggttgggaagctcaaaactatagcccttccctcccatcataggcaagcgaaaacctagcattttggccagatcgccggaccaagctcccgcgcagatcatcagctggccacagggaatgctacccttatcggtctgcactgcggtcaccatgtctccttgtttatcaaatcccctaacagctcggtttgtgtggatcttcacccctcttttgattagatagccttttagatatcggtgtaagtccgcaggtgatagatgggcatcttccgggaaataaattcctcctcgagcccttacctccacattgggctccagccgctggatgtcttctgagcccagtacctccacttgcagaccattggccctggccagatgactgaattccctttcttctttctctccttccttcgtttgatagagcatgagcaggcctttttcttgtagctggatgccattatcgccatgctctgccacaaaatccacatataattgacgactcaacaggctgagggctttcagggaagggatggattttttgacatgctggagggtggagtgacggtaaaacagcatacaccaatccaccaatctcctgtccaaccgaggctggatataaaaagggctttttgaggatagcatccatgaaaatcccttcgctatcatccccggtgaggccagaggcacgatatgactcggcactatcatcccggcattgcccgtggagcagtttacctccatttctccttggtcgagaatctctacttcttctccttgctgcaggagataataggccgtatagaggcccactatccctccaccgatcactagatttggtttcatcgttggcttattatttatgcttttttgactaagaaaggtggtttatatcacctggaatccatgaacatagggatcatcatcgtccaagaaaatggtattatatccggtgattttggcccagccttctatgctggggatgataccggaaataccacccacggtacattcagcgaggatttcgccagtgaatttagaacctatatagctttcattgatgaaggcttcgtgcagccccagctttccgcgagcatatagctgggccatcctggcggaggtacctgtgccgcagggagagcgatcgatggccttctccccgtaaaatacggcattcctcccatgagagtgctcgtcgattggcttcccaatccactgaatatggctcagtccccggatttccgggttttcgggatgtacaaattcgtacttttgattgatatcccttcgtagcttgcggctcatcatgatcagctgctcagcgctatacgcctccaggcctgggaaattcttctgcggatcgataatcgcatagaaattccccccataagaaacgtcgaaagacagttctcccagttcctccgaacagatataaaggtccctggcgctcagaaaactgggaacattggtaagccttacagcgctcactttgccggcctgctgctcatacgagaccagcaccagaccagctggagtttccagtcgtagctgaccggggaccttgggctgtatcagcccttcctctatcgccacggtcacggtgccgatggtcccatggccgcacatgggcaggcagccgctggtttctatatacaatacccccatatcattggcgggatcaaggggcgcatagagcatggatccggacatcatatcatggcctcgaggctcaaacatcagcccccgacggatccaatcatagtttttgacaaaaaactgtcgtttttcgaacatggattttccctccagtagaggtagtccgccggtgaccacccgcaccggattgccgcaggtatgcgcatcaatacaactgaatgttttcttcatctatttatctaaatccaaaagcaaatataccctcgctaagctattctattttgccgaaggccaggaataaatcacttcccggctctcctgtcggctagtccccaaggctcagcttaccgtccacagtacggctgatttttagtggatttttttcttttagtgcctccggcaaaaggctgtcggggcaattttgataagccaggggccttgcaaatcgcttgatcgcatggacgcccacggaggtacttcggctatcggtggtcgcaggaaatggtcctccatgctgcatggcatggcctacctccactccggtgggcactcccccaaagagtagtctgccacaacggctgcctagtcctgcgatcagcccctcatgtgccgcaagctcctgctcctcggcccagagtgtaatggtcagctggccctgcaacagcgctggcatcgcatggagctgctccctgtccgcataggtcaccatcagcccaaaaggtccaaatacctcctcatgcaagcgatggctggcactccagtcttccattttcacccttgccaatgccggtaaggccgcagtgagatgatcgggagtacatatccattccagccccgcttgggctttcatggcttccactgcggaggcataggcgctttggatgccaggatgaagcatcagctgagagggcatggcggcaagtagcttagcggctagcgccgcaaagtcatcggccttagactcgggaataaacagcaaaccaggattggtgcaaaactgcccagcacccaaggtaagcgactggctataatcggaggccatcttttccatattggcttcacaatactcctccaaggcaactatcggattggtacttcccatttcggcatatacaggaataggctttggtcgggcataagccaggtcaaagagggcttttcctccggtatatgaacctgtaaaggccacggcctctgccaaaggatgctgtaccagctcctgtccttcggctattcctccggccacatgctggaatattgccgcaggcaaatcctgctccttcagcgctgcctgcaccaattcaaataccaaaagggaggtttccggatgggcagggtgccccttgtacaccaccgtgcagcctgccgccaaggccgatatgctgtctccgccagcagtagaaaatgctaagggaaaattactggccccaaagacaatcaccggccccagtggcaccagcatccttcgcaggtcaggctttggcgcggggctgcgatcaggatcgccatgatcgatcgtcacctccagccaactgccttcctcgagataagtggcaaataagcgaatctggcccgtcgtacgagccagttcccccttgatacgtccttcggggaggtgagattcggcacaggcgatcggcagcagccgctctactccctggtcgagtagctcagccagatgccgcagaaaagtcgcccgctgcgccaagcttgtttctttatattggctaaaggcggcagcagattgctgcatgatatggtctagttgcattaggcaagtgtttttaatgaggataaattgggtctggtatctaagccatgctgaatcaagcgttctactctttctttttcttcccccaccaagcggaggcgcggagcccttacatgggcggttcctattcccgtcatctgctcggccagcttgatatactgtaccaatttaggatgaatatccaattccagcaaaggcaaaaaccactggtataatgcgatggcttccttgatcctatgagccttcaccaagtcaaataataccacggtctcggcggggaaagcacatactagcccagcgacaagaccatcagcacccatgatgacactttccatagtcagcgtatccaccccacatagcaccttatagcggtcaccaaagcgggttttcatacgtgtgatattgctgacatcccgggtggactccttgaccgcttgtatagtggggcaagattgtaattcgtcaaacatctccagtgtaatataggtcttatagtccacaggattattataaatcataatgggcaaagtagtggcttctgccacggccttaaaataagctacggtctcccgatgatctgagctatagcgcatgggaggcagcagcatcaaggcctgtgctcccagctcctcggcttgccgggcccagtggaccgcctttgcggtggccccttctgcaatattcagtattactggcacacgcccacggaggtaatcgatggttttgcgggtcaattctatcttctcctcttcctccagcacactggattctcccagtgtaccgcccaaaatcacccccgccacacctgcatcaagctgtgcatccaggtttctgaagaaagtatcaaagtcaaggctgccatcctcaaaaaatttggtagtgacagcgggaaatacaccgttccagttcatagttatttattttagttccttacaaatgtagcgcgatgacttcaggataaattgcaccaaattggtgattcatgatacaatactgtcctatttatttctccctggcagaaaggaaaatcccgatggacaggaaaatcaattttggcccagggccgaaatcaaaaacttcactctcccaaaatctcctgctgccgctgagctgcgctggacttaatgaagctttaaagagtgatttctggttgccttgcaaaaaatgatgcctcctccaataagctaaatccccctctgctaggctgggataggctgggtgaaataggatgcctcattagttggcggcaggacttatgagtattggtgagaggtggacagcgataaaccttcaagctatcccgcataaactattcagtactcggtattttttatttattttgcaattatgcagacacccttgaccctatcggaattaaatcagcagattcagcaggccatagacagtcatttgtctcccacctattgggtggtggcggagattggcgacctgcggggatctccgcgggggcatgcctatctggaactggtggagaagagcaatcaacaggtactcgccaaggtcaaggcgaatatctgggcttacgcttatagcagtatatccagtcgttttcagtccatcacgggcacgccgctcaagacggggatgaaggtactggcgcaggttaatgtccagttccacccggtgtatggtcttagcctgaatgtcaaggatatcgatccaaactttaccttgggcgaaaaagcacggaggaagcaagaaaccctccagcgcttgcagaaggaaggtctgatgcagcttaataagcagtttctgctccccactgtaccccaaaagatagccgtgattagctctgcaactgccgcgggctttggggacttcaaagaccaagtagatcaaaatcgggaaggctatcgcgtgcattataagctctat

SEQ ID NO: 2099 - DNA, 24350 bp, synthetic construct
  misc_feature 1..24350: note = Synthetic
  source 1..24350: mol_type = other DNA
cttccgttcattgttctgtcgatatttttattgtaatcggcgttgtagctcacccaggttccgtccagagcctttaaaatgccatagtctacattatctacaatctggttcagatttttttctctgaaaggaatcaacggatcatcgatcgtgagtttggaataccctttcataaggttttccagaaaaccctgagaactgtctgcggatgttctcagaaacaggctttcctgctcaatactttctttttgtcttttcagcatggtaatttcgtttttataatgataagtttttttgattctgaaaattattttaacttcaaaatagaggtttaaagatttccgaaatcatcagttttactcttcaaaattaatcagtctgggaaagaaaaaagtcagtagttttacttaattgtgcagtgtaaagagaatttttcgtaatttaaaaatgaatagtaaataaaagtttctaaataacagaatttaaatatcgaagagagtagatcaaaaaaagttacccttaaataattcttataggattgtttttacggtttttaagattgaatttgttgtagaaccaagaacttttaaagtgttagtgagagaaagttaagaaattgttgtttcgggattttttatatttaagtaagtgtttttttgattaatcttatcgtgaagttttaccttaacattatctataataaattttaatttttcctttttttattttaaaaggttttacattttgggagcattggctgatttggatctttttatatttggtaattatagtgatttaatatattcactgggtgttattccttcaatttgtttaaaaactctgttaaatgtagattgatttgaaaatccagcctccgaatatatatagagcatggtaagtttctgcaaatcacttttttcgatcattttttttacatgaataatccgcaatgtattgatatagtgattaaaatttttgtaattattgatctggatggcttttgatatatagcttggatttacattcataatcgaggcgagtttggaaaggctgaaatcaggatctttaaagagcttttgactgttgatttctgagtctgttttctcaaataattttttcagcaatgattcatcaatattaacagttttgttattctcgcttttcttcggttcttctttcaaattttcttcttctttactgttgagtatttcctgaatacttttggtttctgctattttaattttttctttataataaataagtaaaagaaccactaaaaaatttgctaaaaatacaatcgtatccgacagcagaatttcatttctggaatacactctgagattcaaatgaaaatgagtagaaataatatacactaaagctatcaaaataaaagtataaaaagagtacatataacactctcttttactcaaaaaaatatatgctgcaatgggaatcgggaaaaaccaaactacattcagaatggtatatttccagaaaacaaataataaaaagcaggcatataatggagcaacgaataaatagatctttataaacttaaatggattaaagttgttcagtgtattcaaaacaactaaaagtatcagaattattataaaaccgcaagcagtataataggtcaacagggaatctttaacgaaaaaaagatacattattgtaaacagcattaataccgaaagcattatcttaaagtaagccgacaagaggttttttatttccttttctacccctttttcataaatctcttctatcatgtgtgctttattttcttatttattgaatttgattgatttaaaatattgatttacaattatttatttttttataaatgatttattgtttttcatttatcacaaatatttatccctatgttcaagtgtttatttttgtaaagcgaaaattaaaacaagataatttctgtaagcgcaaatatagttattgtttaaaaaaaatcttgtttaaatactaaaaatagcaaaatatagaatttatattttgtttttcatcagaataatacaataaatacagtcaacatgaaaaaacacattatgtttgttttactgatctcgtcagtatctctttttaacagtcaagtaggtattaatacagctaatccccaaggtatcttccatgtagatggaggaaaagataatagcacatctggaattcctacagaatcacagcaagccaacgattttgtcgctacagcttccggaagtgtaggagtaggcacagtagctcctgatgcttcatcaattttagatttaacaagttccagcaaaggttttcttgcaccacgaattgccctaacttcaaatacagatacgacaactatttcttctcctgctgtcggattgcttatattcaacaaaggaactggaggtcttagttatgtaggatatgtcttttggaatggaacagagtggagaacattcaatggaggttcacttgcaaatggtactataggaagcattctttgcgatcaggtagctcttactccggaaacatatgtgcttggtacttcctattccggaactttaacggtgagatatactggtggtaatggaggcatttatgccgctcagtcaatagcttctaccggtgttacaggacttactgccacgttagcttcaggaagttttgaagcaggttcaggggtgctgaattataatgtaacaggaacgcccagtgcaagcagcccagcgactgcccattttgcaattaatattggaggtaagagttgtgacgttgagataggctcaggattatctttgggtcaggcgaaatattggtatggctctatgcccgcaaatgtaggttccggaggtaccaatactgctactgttgttaccgcaaattatcttagcagttacaacaacggtgttaatgcagttccaagcattgatgggatgaggttcgactattatgctattgctcctgtaaccggaaacggtactatttcaggaattccacgtttggtaaatatttctggagaaaatataaaagtaagttttgccgccttttcaacagcgcaaaattatggcactatgaataaatggctgagtgacggacagttcattaatttagatgacggaatatggaacggttatggtgccaatgaaacaacaagcactgttcctaccagtttgtcgacacctccaacaggacttacagaaattgaaacgttggatatctggctgaacgagcgttggtatagagttacttactttcctgtgattgataataataatacaataagcgcagcagatgatatcagaaaagtggcaatttctgtgaccaggctgaaataattttcgaaatgttagaaaagccaagttagtctagaatatcaacttgttgaaatagattggtttattgttttctgcaaagaaagattgtatgattattgactacaaaatttcagaaaactgacaaataaaaatactttagactgtttaatatttctgcttgtctgggaaaaataaaataaaccatacttttttagcaattaatttgaatattttttcttcactattaggctggaatcaccataaaagctatatttgcagcctaaattttaaaaataatgaaagaactaattgaaaaaatcaacgcagaatttgaagctttcacaactgaagcaaaccaacaagcagaaaaaggaaacaaagcagctggaacaagagctcgtaaagcagctttggaactaagcaagcttttcaaggaattcagaaaagtttctgttgaagaatcaaaaaaatagttgttcccaaaaccggcttttcagtcggtttttttatttgaatttttacaaagaaatttactttttaaataatcacatacgtcacatgagatttaaacactcgttaagtcgtaagaaaacatcagtttctgaaaatctctgattttcctcttatgtagtcttgatttgtggattgtaaatcaaaagcgaatctcattcacccttgactttttcaccattcaccagcaacaattcaccatcaccaaatcctttccgcgttttcccatttccgcgaatctctttatctttagggctacaatgattaatatgaagataaacagatttcttgcattgcctgttatgatggcgatgacgcaattttctctggctcagaatgccgtttctcaggaaaaacttaatcccgtagttcagaatttcgtgaatgaggtaaacaataattcccagcttgaaacgatggcgtatgaacttttggacggaatcggtcctcgactgatcggaactccggaaatgtttgctgccaatgaatggacggcaaataaattgaaatcatgggatattgaagccagtctgcaacagtttggaacatggaaaggatggcaaagagggatcactcatgtggatatgacgtttcctcgtatgaaaagtttatcggcaacccagttagcatggagtccggcaaccaaaaaagcagtggaagcagaagttattattctcccgaaagtctcttccaaagctgaatttgatcaatggatgtcttccgtgaagggaaaagttgttttgatggcacagtatcagaaaataggacgctccgacgatcagatcaaagaatttgccacgcctgaactgtatgagaaactcaaaaaagagaaagaacaggcttcaaaagagtatcagaattatataaaaagcatcggctataacaatgaaacgcttcctgaagctctggaaaaagcgggtgcggcaggaattgcgatttccaactggacgggaattatgggagccaacagaatttttgaggcaaaaacgaaaaatattcccatgttcgatattgagcttgaagattatggaatgttgtacagaatggcggaaaacggcgcaaaacccaagatcaggatcgaggtgaaatcaaaaatccttcccgaagcaaaatcgttcaacaccatcggaatgattaaaggaaaagaaaaacctgatgaatacgttattctttctgcgcatctggattcgtgggacggtgcgcaaggcgctacagacaacggaacgggagttttaaccatgttggaagcgatgagaattcttaagaaatattatcccgataacaaaagaaccattattgtcggactttggggcagtgaagagcagggactgaacggatcaagaagttttgtggcggatcatcctgaaattgtaaagggagttcaggcggttttcaatcaggacaacgggacgggtagagtagtaaacatcggcggacagggttttgtacatgcttacgattatcttggaaaatggctgaacgcggttcctaaaaatattaaaagccagattaaaacagactttccgggaactccgggtggaggaggttccgatcatgcttctttcgtagcagcgggagttccgtcgttcggactgggttctttaaactggggatattttggctacacttggcatacgacaaaagatacctacgacaaaattatttttgatgaggtgaaaagcaatgtgattctaacagcaactttagcgtacatggcttcagaagaccccgaattttcgaaccgggaaaaaagagcaatgccactggacgataaaggacagattactaaatggccggaagtgagaaaagcggtaagagattttaaggattattaaaattcagtgtttttataagccacaaaatatgaagagtcagttttaaagtttgttctaagagagagaaagaacatacaaagtatttaaaaatctctgattttattttttgagaattttaaaaattttgaagatagattttaaaatgagcgactagtcaatgagtcgctcattatttttattattttcagtttgaagcatatcttttacttcggatagtttactttctttaatgacataagttttacagattttattgttgagatacattctgaaattcatttgggtagatgtttttttaccgtacggatttctgtaagtctgttctgtaaagacaggtaagagatttaccaaacataaaatatttcttttcaaagactttccgaatttaggatgattgccttcatcatcgattactttcatacggaatatctttttgcctaaagttgttccgaaataatattcactgatagcccccaaaacaatcaccaaaggaattgataagagtatattgaatatgatggatttattcagcaagaaattaatgaagcaagaaaatatagcaatgtctatccatttggcaaaaagcctttgagtttcatttcctttaaagcttggattatatggaagatgatattcgtaagcatgataaattcttttcccatacttgtcaaaatcgagagtaggtctattaataatttttctttcttttatatccgaaattttcatacaagtttaactacaaaaccatactcagctgaattctttttctcgcttcatcaatctccgttactcttacctgaacgtgctgatgcagttttaccacttcattcacatcagaaacaaagccgtcttttaactgggaaatatgaaccaatccgctttccttgattcccagatctacaaaacagccaaaagcggtgatattattaacgattcccggaaggatcattcctgtttttaaatctttgatgctttttacattcggatcaaattcaaaaattttggcagcttttcttggatccagccccggtttttcaagctcttttaaaatatctttgattcctaaaattccgatgtctccggtgatgtagttttcgggttttaccagtgcgatcttttctttattggcgatcagctcattggtttttatgcctaaatcttttgccattttttcaacaattccgtaggcttcgggatgtacggcagaattatccagcggatttttggcattatgaattctcacaaatgcggctgcctgctgaaaagctttttcgcctaatctcggaacttttttaagttgttttctatcttcaaaagctccattttcagtacggtagttcacaatattttctgccattttctcgccgattcccgaaacatagcttaataaagatttactcgctgtattcagattgattcccacagaatttacacatttcatcaccgtagaatccagttcgttttttaattgggtctgatccacatcgtgctgatattgcccgactccgatggatttcggatctatttttaccagttccgccaacggatccgccagtcttcttccgatggaaacggatccgcgaaccgtcacgtcatagcttggaaattcttcacgcgcaattttacttgcagagtacaccgaagctccggcttccgaaacaacgaaaacttgtaaaggtttgtcgaatgcaatttttttgatgaaaaactcggtttcgcggcttgcggttccgtttccgatggaaatggcttcaatgttatacgcattcaccatggaacggatttttttcattgccattccgctttcattttgcggagcgtgcggataaatggtctcgttgtggagcaggtcgcctttttcatccaaacagactactttgcaaccgcttctgtagcccggatcaattgcgagaatccttttttctcccaaaggcggagcaagaagaagctgcgtaaggttttcagcgaaaatttcgatggcttttttatcggctttttctttcgcttcctgtaaggtttcgttggagattgcgggttccagtaatcttttgtagctgtctttgatcgccagtgaaatctgttccgatgtttcgttgttggatttaatgatggcattttcaataaaatcaatggcttcttctttatcgatcccgacattggctttcacaaaaccttcagattcggctcttaacatggctaaaagacggtgagaaggcattctgttcaggctttcttcccattcgaaatactgcgagaatttctgtgcttcttcttcgtcttttttggctttcactacttttgaagtaaccattgcttttcgctgaaagaggcggcggagattttttctcacatacatattttcgttgatccattctgccatgatgtctcttgcgccctgcaaagcttcttcttcggaggcaacctgatcgttcaggtattttgaagccaaaaactgtaaatcctgaactttctggctcataatcattttcgctaaaggttccagtcctttttctttcgcggcatcggctttggttttcttcctttttttgaacggcagataaagatcttcaatttcctgaatatcaaaactttcttcaattctctgtttcagttccggcgttaaagcattttgttcttcgatcgattttaagatggattcttttctttttacaatttcttcaaactgtttactgagtttcgaaatctgctcaatctgtgtttcgtcaagatttccggttttatcttttcggtaacgggaaatgaaaggaatggtgcagtcttccgccagtagttctaaagtggcattgatgcttttttcggatatgttgagggattgctgtatgtattgtgttgtgttcattgtaaattttaaacggctaaaataatcaaaatgtcttttgtaaacacattttaaatttaaccatactgtttacaaaagctttactgtcttatttaaatttaataaaaagaaagaagatggatggtttaagattaaaatttttaaccgtgcaatgattaaaactcaaaaaaataaaaaaaatgattgtaattatcttaaagtaagataaatatgctttgcttgaagataaactttaaacttttttaccacaaaagatgcaaaagatttaaacactttagttgtttaaatttaatacataaatggaaaaagagcacgtaagttaaaaaaatcaaagattttttctctttgcagacatttgaaatactttacataaatccgataaagtcttttgtctcttttgtggttaaatttaaaatgagtttaaacttgatataaagattttaattgtatcatgtgtatttaataattcttattttagcggaaaggtcaataatggaaaccctgaaatttgttttcttgatgtatgataagataaaagtgtgggatgttttctatttttggttccggaatttagaaattcagaataaactttaaacaatttaaataatatgaaaaaactaagtgttattgcattggttgcagtaggattgcttgcagcgtcttgtaacaaagaaaaatcggctgaaaatgcagcgacttctactgagcagaaagtagcagaaagcaaaggggaagttttgcctgtagatacggtaggttctgtggtaaactggaaagcattccacaaaggaggaatggctccgcgttggggaactttaatggtaaaatcgggagatctgagcatcgaaaacggtggcgtaacggcaggaaactttgtaatcgacatgaactctattaaagtagatccggcttctgtaacggaaaaagataaaaaaccggcagatcttgaagcgcaccttaaaaaccctgatttcttcgacacggcaaaaaatccgacggctgatttcaaaattacaagcgtaacagatcttaaggaagctccaaaagatgcagtagcaggtgccaacaaaacagtaagcggaaaccttactttatcaggaaaaacaatgaatgtaacgttccctgcaaaagtggatgtaacggaaaattcagcggcaattcaggctaaattcacggtgaacagagcagactggggaattaaattcggaacttccgaagcggatcctgcagaatggatgatcagcaaagacatcgaaatcgctgtagacgtaaaagctaaaaaataatattgttagatatttcagacttgtaaagctgccttttttgaggcggctttttttgtgttggggattttgcatttcccttctgaaatagaaggcgagttgccccgccttaaatgttttagttcacggatttatttataattttaatcgtgtttactgaaaaatttagacataaaaaagccccgaagatagtcgaggcgctaaatgttttcacaacggaataatccttattgtgaattgcttttcaaaattattgatacaaatataaaagaaaaattctttgaatggtttacggaaaacctcatttttaataaattttttcttcttatttttatttacttcaaaaaactgatacttatgattaaaaatatacttggactggacttgggagtttcatcaattggctgggcttatgttcaggaggattctgaaaatttagaaaacagtaaaattatcaaattgggagttcgtgtaaatccgttaactgttgatgaacaattaaattttgaaaaaggaaaaccaattacaaccaatgcaggaagaactttagccagaagtgcaagaaggaatcttcagagatttaagttaagaagagccaatcttattgatgttttaaagaaaaataatattcttaaagaatctgacttacttgccgaagttggcaaaaattcaacatttcaaactcaggaattgagagcaaaggcagcaagagaaaaaatagaactttcagaatttgccagagttttgcttcttatcaataagaaaagaggatataaaagcagccgcaaagctaaaaatgatgaagatggacagattgtagacggaatggctgttgccaaaaaattgtatgaagagaatgtaacccccggagaatattcatatcaacttttacagcagggaaaaaaacaattgcctgatttttaccgttcagatttacaggctgaatttgataaagtatggaattttcagaaacaatattattcagaaatcttaaccgatgacctttataaagaattacaaggcaaaaataaaaatgcaacttgggcagttctaaaagagccattttctctcgttgggattaagcaaaccggaacaatgcaggagaagaaagttgaaaaatacttttggagaagcgaagcggtaaaaagacagttggattttgaaagtctggctgttgtatttcaggaaattaacagcaatctgaataattcgagcggttatttaggtgcgattagtgatcgaagtaaagagctttattttcataatcaaacagttggagagtatttatttcagcagttgaaagtcaactctcatacaaagcttaaaaatcaggttttctacagacaggattacttagatgaatttgagaagatatgggaaactcaatcaaaacattataaagaattaacgaaagaattaaaggaagaaattcgggatattatcattttctatcaaaggaaactcaaatcacagaaaggtttaatcagtatctgtgagtttgaaaacagggaaattgaaattacagaaaatggaaaaacaaaaaagaaaacagttgggctaaaagttgcaccaaaatcatctcctttgtttcaggaatttaaaatctggcaggttctgaataatttacagtttcaaaatgtagatacaaaggaaatattcccagtagatttagatttcaagcaatctatttttgatgaagtcaatataaaaggaaaactttctgcaaaagatgttctagatattgttggatattcaggaaaagaatggaaaactaatttcaaagatattgaaggaaattatactaatgaaaacttatatactgcttttctaaagattattgccaatgaaggaatagaatttccaaaagaatttaaactaacaatagatgaagaaattaaagtttctaaaataaatacttctgcagaaattattaagttgtttgtcagagaaaagttttcaggattaggaattgatacttctattctggattttaatccggagttggaaggaactgattttgaaaaacaggcttcttatcagctatggcatttattatattcctatgaaggcgatgattctccttccggaaacgaaaaattgtatgaattattggagaggaaatttggatttaaaaaagagcattccaaaatattagctgaaattggtttttctcaggattatggaagtttgagctctaaggcaatgcgaaagatttatccttacattaaagaacataaatacagcgtagcatgtaattatgcaggttacaatcattctaaaaattccttgaccaaagagcaattggagaaccggattttgaaagaacaattggatattcttcctaaaaattctttacgaaatccagtcgttgaaaagattttgaatcaaatgattaatctcgtcaatgaagtttcaaaggaatatggaaaaccagatgaaataagaattgaattggcgcgagaactcaaacttaatgcagaagaacgcgctacgatgacttctgaaattaacaaagcgactatacagcatcagaaatatgcagaagttttgcaaagagaatttggcataaaaagtccttcaagaaatgatattattcgctataaattatacttggaactggcaaataacggctttaaagatctgtatacagatgtaaaaattgaaagagaaaatttatttacagataaatacgatattgatcacatcattcctcaatccagattctttgatgatagtttctccaataaagttttagttcccagaagtgctaatcttaaaaaaggaaattttacggctttcgattatcttgagaacgagggaaaggaaaaattagagaaatttcttaatgtcatcacagatctttatgataaaggtattattaccaaagctaaatatgaaaagctacagaaaaaagtctctgaaataggagaaggattcattgaaagagatttgcgcactacacaatacattgccaaaaaagctaaggaaatcctttttggaattactaattctgtggtttctacttcgggaagaattaccgataaacttcgggaagactggaatcttgttaatacaatgaaagaacttaatatcgaaaagtacagaaaattaggtttaacggaattaattgcaaattccaaaggagaggaaaaagaaaggatcattgattggacaaaaaggaacgaccatcgtcaccacgcaatggatgctttaacggttgcttttaccacccacagtcacatccaatatctgaattatttgaatgcaagaaaaaatgaagctcataaagaacataaaataattacaaatattgaaaatagcattacagaaattgtagaaaagaaaaacggatcaaaagaaagaagattcaaattaccgattaaaaatttccgtactgaagccaaaaaacaattggaagaagttttgatttctcataaagctaaaaataaagtagttaccaaaaatataaataaaattaagaaaaagggaagtataattgcaaaaacagaactaaccccgagaggacagcttcataaagaaacaatttacggaagttcgaaatttcttaaaacaaaagaagaaaaaatatctgggaaatttgatttagaaacgattcagaaagttcaaaatgaaaaatacagaaatgctctgttaaaaagattgcacgagtttggcggagattctaaaaaagcattcaccggaaaaaatgttatttctaaaaatccaatatttcttaatgctgaaaaaaaggagcaattgcctgaaaccgtaactttagcttggtatgaaacaggttataccatcagaaaagttgttaatccggataattttaaagattttaaaaatattgaaaaagttattgataaaggagttcgtgatattctaactgaaagattaaaagaatttaacggaaactctaaagaagccttttctaatttggaaaagaatccgatctggattaacaaatcaaaaggaatttcaataaagaccgttactattacaggaattaataatgccgaagctttacattataaaaaagatcatttaggaaaagaaattttagacgaaaatggtcaaaagatagccgttgatttcgtcagtacaggaaataatcatcacgttgcaatttatgaagatgaaaatggaaacctacaggagaaagttgtgagtttttatgaagctgtagaaagagtaaatcagaatttaccaattattgacaaagaatataattctgagttaggttggaaattcttatttacaatgaaacagaatgaaatgtttttatttccatcagacgattttgatccgaaagaagttgatttatttgatgataaaaatctgagtttgatttctaaaaatctttttagagtgcagaagttcggatcattgctttctggattttggtttagacatcatttagaaacaagtgtagatgtaaattctgtgttaagaggtacatcatataaagtaattcaaagctctaataatttgagatctattgtaaaagtaaggcttaaccatttaggtaagatagttcaaataggagaatattaaaacatttatagtatgatcacccgctccatctacatcggcaatcccgcttaccttaagctcaaagacgagcaattgaaaatcctctgtccggaaaccaaaacggaaaaggggagtgttcctgtggaagatttggggttgttgatgctggatcattatcagattaccatttcgcaccatctgattcagaaaatgatgggaaataatgtagtggtggtgagttgtgatgctcatcatttaccgcacggaattatgcttccgctgtatggacataccgaacattccgatcgggtaaaagatcagttggaagccagtgaaccgctgaaaaaacagctttggaaacagactgtggaatgtaagatcgaaaaccagaaaaacgtcctgatgaaactgggagattattacgaaccgatgattgaatatcagagaaatgtaaaatccggcgatataacgaatatggaagggattgcggcgcagcattactggaaatacctcatcagtctggattttttgagacagcgttttggagattcacccaatcagttttttaattttggatatgccgtgctcagaagcattgtggcaagagctattgtagaaaccggactgttgcctgttctcggcatttttcataaaaataaatacaatccgtattgccttgccgatgatttaatggaaccttatcgtccgtttgttgatttactcgtgatacagtggctgaaaattcatccggataccgaagaactgacaaaagaatttaaagcgcatattctccagattgcgaccaaagatgtgcgtattgatgacaaaacaagaccgttgctggttgctgtaaaaacaaccgcttcatcgctttacaaatgctacacaggagaaaaacgactgatttcctatccggaattgatgtaatttttttatggcagctttatccgcctgtagtttatcctgagcggagccgaaggataaaaatctgcaaaaagagctccactcaggtcgggctgcgattattacaataaacaaacaatagtcaccaaaaatgaacgccgaaaggtttaatgcataccgaattatgtgggttttagtattatatgacctcccgaccgaaacgaaagcgaatatgaaagatgcaaaccgttttcggaaagctttgattgatgacggatttactttatttcagttttcgatgtatgtgcgtcattgtccgagccgcgaaaatgcagaagttcatatcaaaagagtaaaatttatgcttccgaaagccggaaaggttgccattatgtgcattacggataaacagtttggagacatcgaaatcttttttgccagaaataaagaagaaccgccaccaaccttccaacagctcgaattgttctgaattttgaatcctgaaaacaaaaataatctactgaaaaccagtaggttattttttgagattgtccttcatcacgaagataataaattttgaaatccgcagccggataagcgtgggcggattcgacgaaaagcgttggattcgagttggctgagccaaagcaattcccaaatagaaaatcaaaaaagataattagagatagattataattaacttttagagattttgttatttttaaaatataaaataatccattgaaaaccaatggattagattttgaggttgttcttcatcacgaagataataatttttgaaagcaattcacaactacaatatctttgtatctttatctatcttagttgttcttcatcacgaagataataatttttgaaagcaattcacaacatgagttcggtatatttatggcaattgctcgttgttcttcatcacgaagataataatttttgaaagcaattcacaactcttacaagagcaaaaatcattaccgaagggttgttcttcatcacgaagataataatttttgaaagcaattcacaacgtggttgcgcaaaagaattacactgaagaggttgttcttcatcacgaagataataatttttgaaagcaattcacaacttggaatatttttgaaattcctcaatttttgttgttcttcatcacgaagataataatttttgaaagcaattcacaactaaacttctcatccttcatcagattctcatgttgttcttcatcacgaagataataatttttgaaagcaattcacaacatttctttacaacattaccttgaaaagctagttgttcttcatcacgaagataataatttttgaaagcaattcacaacgcgcttattcatctttcctgctgagatactgttgttcttcatcacgaagataataatttttgaaagcaattcacaaccgtgtagatacatcggtagaatccttattagttgttcttcatcacgaagataataatttttgaaagcaattcacaacacttgatagattcagtggtgagatgcgttagttgttcttcatcacgaagataataatttttgaaagcaattcacaacaacgttaatgagccagactattcaaagtttgttgttcttcatcacgaagataataatttttgaaagcaattcacaacaagcctattgacttttctggcgctaataatgttgttcttcatcacgaagataataatttttgaaagcaattcacaaccacttttattttggtaatggagtaaccaatgttgttcttcatcacgaagataataatttttgaaagcaattcacaactcccggatatttatacccctactacaggaggttgttcttcatcacgaagataataatttttgaaagcaattcacaacggggatgagtatgaggctttaaaagctagggttgttcttcatcacgaagataataatttttgaaagcaattcacaactaatatgtttataactcaaatatttttcaagttgttcttcatcacgaagataataatttttgaaagcaattcacaactctattagcggatctgctgaggttatttacgttgttcttcatcacgaagataataatttttgaaagcaattcacaaccttccggagtttgggttgtcaagcgataccgttgttcttcatcacgaagataataatttttgaaagcaattcacaacacccttcaataagtcatacttattacctatgttgttcttcatcacgaagataataatttttgaaagcaattcacaacatagtagattatatccccgcaatggctgatgttgttcttcatcacgaagataataatttttgaaagcaattcacaacaggagcttaagatagaagagcaagagtttagttgttcttcatcacgaagataataatttttgaaagcaattcacaacttggaaaattatatcaagtaaattaaatcagttgttcttcatcacgaagataataatttttgaaagcaattcacaacacctaaaaaaaaattatgggaattggagaagttgttcttcatcacgaagataataatttttgaaagcaattcacaacatgaagcatgaagacgtttattactggtacgttgttcttcatcacgaagataataatttttgaaagcaattcacaactaccatccattaacggtactttagtaggaagttgttcttcatcacgaagataataatttttgaaagcaattcacaacgtgctctctcaggtaatcctcaaagccctcgttgttcttcatcacgaagataataatttttgaaagcaattcacaacgtcacagacttaatattaaatcttatgtgcgttgttcttcatcacgaagataataatttttgaaagcaattcacaacaactggcagtaaactcttttattagagctagttgttcttcatcacgaagataataatttttgaaagcaattcacaacagcttgcatcatttcagcttgcagcatattgttgttcttcatcacgaagataataatttttgaaagcaattcacaacttggactgattgtgctaatcaaaatcagcagttgttcttcatcacgaagataataatttttgaaagcaattcacaactctaattcagtgaaatacacggatagaggtgttgttcttcatcacgaagataataatttttgaaagcaattcacaacataacacaggattaagatctcaaaatctaagttgttcttcatcacgaagataataatttttgaaagcaattcacaactctattaaagagctccgtatttttggctctgttgttcttcatcacgaagataataatttttgaaagcaattcacaaccctttagttgtatctcccccatcataactagttgttcttcatcacgaagataataatttttgaaagcaattcacaactggtcgcatgcctcggagtttgtaagccctgttgttcttcatcacgaagataataatttttgaaagcaattcacaacggatactcaggggcagtgtttgatagctctgttgttcttcatcacgaagataataatttttgaaagcaattcacaactacagttaagtactattctattgtattttagttgttcttcatcacgaagataataatttttgaaagcaattcacaaccagatttggctagatcctctaatttagaaagttgttcttcatcacgaagataataatttttgaaagcaattcacaactaacgattccattgccttcacaatctcctcgttgttcttcatcacgaagataataatttttgaaagcaattcacaacaggcaatagtttgttcccggaagatttcccgttgttcttcatcacgaagataataatttttgaaagcaattcacaacgcaagtccggaaatctctttaacggaggatgttgttcttcatcacgaagataataatttttgaaagcaattcacaactacaaactggcggtgttccgttaacaaatggttgttcttcatcacgaagataataatttttgaaagcaattcacaacaggagcattatatcaatttgtgcagagcttgttgttcttcatcacgaagataataatttttgaaagcaattcacaacctttaaaaacaatttaaaacttcagattaagttgttcttcatcacgaagataataatttttgaaagcaattcacaactaaagataaagatacattgtaaagatactggttgttcttcatcacgaagataataatttttgaaagcaattcacaacgcttcaccctttttattgtaattctgccacgttgttcttcatcacgaagataataatttttgaaagcaattcacaacccaatcaagtatcatggagcaggtgagtatgttgttcttcatcacgaagataataatttttgaaagcaattcacaacttactgcaatcgctcttacgaaggcaaaaagttgttcttcatcacgaagataataatttttgaaagcaattcacaacactttgaatagtccggttgattgactttaagttgttcttcatcacgaagataataatttttgaaagcaattcacaacctaactgcaattgctcttacgaaagcaaaagttgttcttcatcacgaagataataatttttgaaagcaattcacaacaccatttttagccagtgctatgaactgttcgttgttcttcatcacgaagataataatttttgaaagcaattcacaacagtttaatttatgccacttataagaatattgttgttcttcatcacgaagataataatttttgaaagcaattcacaaccagaccactaaaaatcttaaagatgctgaagttgttcttcatcacgaagataataatttttgaaagcaattcacaaccttaactgtactattataatacatagggcggttgttcttcatcacgaagataataatttttgaaagcaattcacaacgttacaacaaatgacgaaattaaaggtaaggttgttcttcatcacgaagataataatttttgaaagcaattcacaacgttgctaatttaagtgtaatttatgctaccgttgttcttcatcacgaagataataatttttgaaagcaattcacaacgttaaagatggaggagagttatttagtactgttgttcttcatcacgaagataataatttttgaaagcaattcacaacgtaactacaaacgaagaaattaagggaaaggttgttcttcatcacgaagataataatttttgaaagcaattcacaacaaggctgttgatttttcaagtgcaaaccaagttgttcttcatcacgaagataataatttttgaaagcaattcacaaccttactgctattgctcttaccaaagctaaagttgttcttcatcacgaagataataatttttgaaagcaattcacaacataaaggttaaatatcacgataactataaagttgttcttcatcacgaagataataatttttgaaagcaattcacaacaacttttaagtaatcaagaagaccctgaacgttgttcttcatcacgaagataataatttttgaaagcaattcacaactcttgcagtactgccaacacttccgcgtgagttgttcttcatcacgaagataataatttttgaaagcaattcacaacaaagtagaaataagcaatatgaatctttatgttgttcttcatcacgaagataataatttttgaaagcaattcacaaccagcgatatcgctggggaaaaataacaattgttgttcttcatcacgaagataataatttttgaaagcaattcacaactaagcaggtgtttgttaggcaataaaggtagttgttcttcatcacgaagataataatttttgaaagcaattcacaacagctctgtgctgtctacttcattttcataagttgttcttcatcacgaagataataatttttgaaagcaattcacaacctggcacaatatgggttcactcctgcaggagttgttcttcatcacgaagataataatttttgaaagcaattcacaactaaattgttattgttctattttagttacttgttgttcttcatcacgaagataataatttttgaaagcaattcacaacatctaatctaacataactaacaaatgggaagttgttcttcatcacgaagataataatttttgaaagcaattcacaacttggaggtggtcaaggtgatgagcattcaagttgttcttcatcacgaagataataatttttgaaagcaattcacaactgtatagatcgatgaatgtttcacccatatgttgttcttcatcacgaagataataatttttgaaagcaattcacaaccataatggataaattaaatggtcatataatgttgttcttcatcacgaagataataatttttgaaagcaattcacaacggaccatccggaacgatgatcttttctttagttgttcttcatcacgaagataataatttttgaaagcaattcacaacctctcctctgaatttttcagaaaggctacagttgttcttcatcacgaagataataatttttgaaagcaattcacaacattcgtgccgttcgtatgttatctgcatacgttgttcttcatcacgaagataataatttttgaaagcaattcacaacaaacctatcgatttttcatctgcaaatcaagttgttcttcatcacgaagataataatttttgaaagcaattcacaacagctgtaataactattattaaacttttaaagttgttcttcatcacgaagataataatttttgaaagcaattcacaacgttgtcgctcaaaagtcatacactgaggaggttgttcttcatcacgaagataataatttttgaaagcaattcacaacggatgcggaagttttttcccactctagcctgttgttcttcatcacgaagataataatttttgaaagcaattcacaacacgatgcatgtcggaaggcatacttttgcagttgttcttcatcacgaagataataatttttgaaatcaattcacaacattactgcaattgctcttaccaaagcaaaagttgttcttcatcacgaagataataatttttgaaagcaattcacaacttagatcctcgaattctgaatatgaatttagttgttcttcatcacgaagataataatttttgaaagcaattcacaactatgatctgttttatcaggcaggtattccagttgttcttcatcacgaagataataatttttgaaagcaattcacaacagaaaagaataatgagcaggctgtttgaaagttgttcttcatcacgaagataataatttttgaaagcaattcacaacggacataaaccaaactctttatttaagtgcgttgttcttcatcacgaagataataatttttgaaagcaattcacaactcttcacaagtagagtagttgtctatcagagttgttcttcatcacgaagataataatttttgaaatccgcagcaggaaaagcgtaggcggattcgacgaaaagcatttgattaagctaaggctgagtcaaagcaattcacattaaacttttgctgcccatagataataatttttgaaatccgcagcaggaaaggcgtaggcggattcgacgaaaagcgtttgattaagctaggctgagtcaaagcaattcatataaactcgtcttgtctcaaagataatagttttgaaatccgcagcaggaaaggcgtaggcggattcgacgaaaagaatttgattaagctgagtctgagtcaaagcaatttacatacactcacgttgttttaaagataataattttttgaaatccgctgcaggaaaggcgtaggcggattcgacgaaaagcgtttgattaagctaaggctgagtcaaagcaattcatataaactcatgttgtctcaaaaataataatttttgaaatccgttgcaggaaaagcgtaggcggattcgacgaaaagaatttgattaagctgagtctgagtcaaagcaatttacatacactcacgttgttttaaagataataattttttgaaatccgctgcaggaaaggcgtaggcggattcgacgaaaagtgtttgattaagctaaggctgagtcaaagcaattcatataaactcatgttgtctcaaaaataataatttttgaaatccgttgcaggaaaagcgtaggcagattcaacgaaaagagtttaaataagttaggctgattttacagactataaaaaattagccataaccgaactacactcggctatggctaaaaaatattttagtaaaaacgaaattaaattccgtcgatgatttcatttaaaaccgtacttggtctcatggcagcatacgtcttgtaagtatctgttttatagtaaccgtcaatatcctgaggttttccctgcgcaccaattaattctgcgttaatcacttcttcgttttccttcatcgcctctgcaatcggagcgaattgtgctgctaattctgcatcagcagtctggtttgctaaagcttcagcccagtacattgccagatagaagtgggaacctctgttatcgatttgtcccacttttcttgcaggagacttgtcggtagctaagaatttagcattagcttcatccagtgcgtccgctaacacctgagattttgtattcccctgagtttgtgccaaatgctctaaagaagcctgtaaagcaaggaattcacctaaagaatcccatcttaaatagccttcttcgatgaactgctcaacgtgtttaggagcagaacctcccgcaccggtttcaaaaagaccacctccattcatcaatggaacaatagaaagcattttagcagaagttccaagttcaagaattgggaaaagatcagttaaataatctctcaatacgtttccggatacagaaatggtatcttttccttctctagctctttttaatgtttccgtcatggcgtcttttacatccatgattctgatgtctaatccgttggtatcgtgatcggctaagtatttttcaacttttttgatgatttctttgtcatgtgctcttcctttatctaaccagaaaatagccggagtatcagataatctggatctattt

SEQ ID NO: 2100 - DNA, 24347 bp, synthetic construct
  misc_feature 1..24347: note = Synthetic
  source 1..24347: mol_type = other DNA
cgagaacaaaaaagacaaaaagacccaaacacttgtccagatagaagcttctttaacgctgattatatgggggttcttgttaaaaatccctaaatccaaagctaaaaaaacaagtattcccaataaaaataatccccaaaccaacataagaaaagtactttttaagaaaacgaaaagtaagcaaacagatttacataaaaaaaatgaatgttctaataataaaggtatttaataaaccaccacttctttagaaatttgtaaaatcaagttttttaaaatcctatccttccattaataattattactccaaatagttcctgaatttacgatttaggtgttctaatcattctgttcaacatgtcccatgacgcttttaaaacgatgtgcaaaacaatcaaatgaacacatatataataattgaaaataaggttatatttgatttgtgaaaaataaaatcaagattttaggtagaattattttgacgaccatgtattgcttaatcgcaagcggttttgtcattgatttaccaataaattatgattttaaagatgatcagacctctgaacaaaacagatgtttttcctctgcctcaaccattcttttttgcaatattccgcagcaggaaagtttgatcaaaactccagatagccttccaactttaagctttaaagattcgttttatcccccctttgggttgaacaggaggcccgaacagttctttaagttggaaattaaacggtatgcttacttttcattacattttccaatacaatacgggaacactgatatcattttccctttccattatttctggtaatttttttttcatgatgtgtcttcaatcgaagtacaattgatttgaatctaccggctttgtatcgtatagagccttaattacttgtttataaactttagaaaaaatttgaaatggatataggaaccacaattataggggttgttcttgcagcaatttgtttgctgcctttttttctgatatcaagaggcagaaaaaaaagagaagaaaagacaataaaatcgctaatggatattgccaaacagcaagattgtcaaattaaccaatatgaactttgtaacaacttgataataggaatggacaaaaacaaaaatgtcttattatttaagaaagactacgatgatattccgagggaacagttaatctacttatcagaaatacagagttgtaaagtagttgaaattagtagaaccattaaaaacaagagtgctacaattaaattaatcgatagattggaactaatgttaattcctaacaacaaaagtaaaccggaaattaaattagagtttttcaatgtcgaaaaagactttcaattaaatgggcagcttcaattaattaataaatggtcaaaagagataaaagatcagttgaaaagtaattgaatattaaaaaaacctgttgtccttaacaggtttttttattcttaatgtattaccgaaataattctttaaaatctcatatggatatgtaactatatttcgatattggtgcctacttcaaaaactttttctgctggtaatttaaaataacgagtggcacgttgtgcatttcttgaaagaatggcgaaaatagtttccctccatactggcattcccatcttgccgttaacgataagtgtctcccttcccaaaaagtatgacaactgtgacgtttcgatcttaacgcccttattcttaataaggtctatagcttggggtatattggtcctgtccataaatccataatttatttgtgcagaataaaagcctgcaccaagatttgataaagtgagccttttttccattgggatgcgtggggtagatttaaattgtacggacagtacaataatctgctcatgaatgaccttattatgttttaaattatgtatcaaggcggttggtaccctgtcaaaagttctggtaaaataaatagcggttccagaaactctttggatgtcttcttcatttattttttttataaagctgtcaattggttccataattttggtaagctggacatttaaaatccttcttcctttgtaccaagtggtcataatgaggtaaatggaaccagcgatgaccaatgggaaccacccaccatccggtattttgtcaatatttgcaaaaaagaaggaaaaatcaatgaccaacaatattaatgttatggctatggctattgaaaatctccaatgccagagtttcctcatggcaatgaatgccaaaagggttgtaatgaccatggtagttgtaactgctaccccataggctgctgccaaattaccagaggatttgaacaaaaggactaagctgatggtccctataaaaagaatccagttaacctgtggcatatatatttgcccttcttcattttctgatgtatgcgtaaccgtaagcctaggcaaaaagcccagttgaagtgcttgcagagtaagactgtacgcccctgttataaccgcttgggaggctattacggatgctattgtggctattatgaccaaaggtatcagtccccaagaaggagccaaatggtagaaagggttcagtgccagttcaggacttctcaacattaaagccccttggccaaaatagttcattaccagacagggtaatacaacagagaaccaccccaaacggatcggtttcttgccaaaatggcctatgtcagcatacaaagcctctcctcccgtgaccaccaagaaaaccgctcctagaataaagatgccatgaaaatggtgcagcttgaaaaactcaaaggcgtaataaggatttattgcccaaagtattccaggagtctttaaaattgagtttactcccaatagggctattgttatgaaccataacagtatcaatgggccaaaaacgatccctacacctttggtgcctcttttttgaaatagaaatagacctaacaaaatgacgagggttatcattatgacatatggctcaaaaagaggtgtgacaattttgagcccttcaaccgcacttaaaaccgatatggccggggttatcataccgtcaccataaagcaaagcggcaccaaatagtcccatggcaaggataacaaatcgtcttttgttcttttttttatggataaccaactccatcaatgccaagataccgccctcaccatcattgtccgctcgtaagattataatcaggtattttatgcttatgaccaaaatcagtgcccaaaagatcaaggaaagcgctcccatgatgtttagttcggttggatctactccaaactctccaaaaaagcattccctgacagcataaagtgggctggtgccaatatcaccaaacactactcctatagcggttagactcaatataaacaatcgttttgaagacctgttttttttctgttccataattgattggttctggtttatcttttaaataatttgataattatttggttttaatttttttggatgtctttctttagattccataattttgattcgagcctgtaaagcacagatattatattggatttgtcctttatgtcgatttgtacagccttataaaacgcaataaggccttcaacgtgaattactgcattgtccacatttctaattagctctttgttgctagtcgaacttaaaattttgtctattgactcatcaatatcttcatcagggcaaatcacttttttaatattctcattttgaagagttgttttttgatgcttaaagtcgttggcatcaaaacaaatccgtatgatagcgttaacaatgtcattatttaccattaaagttttttttgagtctttcataaacaattttatttaattcaatcactattattgatgaatttgacatcaagctgaagaataaaaaaactgggcatgggtcaaacaataataaagctcatattgacactgttaaggtttttgttacagtaaacaaacatccgataatattcaatctgcaaagttaaagccaatggggtgtttagaatataaaggttatgtttcgacctataaagattttataaagaaagtgaagtgtgattttaattgcaaagatgcattgcttaacttgaatgggaatctgtatgattatgcttgtttaatataatttatgggagaatcgattttacatcaaccaggattacagtaaataaatgcatacaatcacttgggaccattgttttttctgctcaacacatctttaattgaggcatagaccagaagtatgattatccctgtaagaattatgatgccaaaaagatgcatagtataacagttgtgttattgggtttttcatgttaaagttaagtcaattaccataaacataagataaaagaaatatgatgaacgtaaaaattaaataaagattattgaaatctgtaaccaacgccgctttctgtaataatataattgggattgtttggattgtcttcaatcttttttcttaatgttcctacaaaaacccttaaatattgggtttctgtttgatacccatagccccatatttcttttaagatgtattgatgcgttaacactttaccctcatttttagcaaataatgccaataaattatattctgttgaagtgagcttaataacttgattaagtttttttacggtcctggcgaccaaatctatttcaagatcgtcacagacaattacagcattagattcaatattctgacttcttcttatagctgaacgcagtcgtgccagcaattctcccgttctaaacggtttggtcaaataatctgttgccccattatcaagagcttttataatgtcagcttcattatcctgcacagacaatatgataattggcttattgtaccattcacgtaatccctttagaacgtcatgaccatttctatcgggaaggccaatatccaacaatatggcatctggcaaatagcttgccgacaaggcaaccccttcttttgcgttggaagcctgtacgactctataatcattactttccaggttgatctgtagcaattttctaatttggggctcgtcatctatgatcagtatctgcgctttattcattgtcagtggcttttatggaagatgtctcaacagggattgttatcctgaattgtgctcccttgggttttaggttctttaattcaatagaaccattcaatacctcagtgaaccctttcacaatcgataggcctagtccagtgcctcccgttgtggcattgttcagtttgtagaatttgtagaataaacgctctttttctttttcaggaaacccaagacctgtatcggatacctttaagaccaaatggttggacgctgtagttgccacaatagttatgactgttgctggcggtgtatgctgtatggcattgtgcaagaggttatggagcatggtctctattaggcctccgtccgttttcattaatggcagttcttcgtccggggagaagcttatgatatgtcccgttgggttctttacatactctttaatacagttgaagacaagttcgttgatgtcaaaccaatcataggttatcttgattgtacctgcctctaaacggctcatgctcaatagattttcaacttgacggttcaaacggtttgatgctacctctatttccttataaagctctgacttgttttcttttgatagtttggtttcattatctgtaatggtatctatggcaccaataattgcggctatgggtgttctcaattcgtgggacaatgaatttaaaatagtattgtaaagctgtatggttttattgctttccaattcattttgttttttgcgttcatactgccttatcttaaaagttagaacggcattgataatggctaccacaaaatacatgctaaacataagaacatcctctgccgtgtctatatgaagtgtgaatgtaggtgggataaaaaagaaatttaatatgatggcacttaaaagtgcagctattagtacaggcagaatatcaaataatatagctgatatagatacgaccaaaagcaacaccaatgccaccactcgatatccaatgaactctttgaaagagtatgatatcaatgatgccaaaacaatcaataaaacacttataaggtattgcttggcaatgctaatgcttcttcttgttaaaactcccaatttgatttttttgtaaaattaatgaaagctttataaagattttatataaaacatatggtataaggaaatgtgttacggaggacaataaacgaataaaagataatgatatatcactttcttaatacatctgcttcaatatagcatttacatcatccaaaaactcaccttcatcaaacggcaatagtttatttgccaattccaacgtttttctaatatcaataccattatcatctgttacgttagaggaatcaatatgacttgccatgatacaaacgtttatcaaggattcaatggttataaataaatccaggtaaccatcgaactgtaaaaatgaggctctaaatttatccttctgtacatttgaggggttcaaggttactaatcgacactttgctgattttattaatttattgagctctttcttttttgcactcatagccaatgaagttttagtgttaactttttttatcttctccttcggaaataatttcggtgatcttgtccaagcagaacatttggtcatgtggcaagaggtcgatgaccatttccaataccttggtcacactgtttatcggggttttattgctatgcttgggataaacgaaagtgccattcccatcaagtgcaaaataacacacttccaagagtgcggaaatactgctggtgatgtcttcattatcaaaaacctcgaacccgatggtctttctggtcctgttaccatagggttccatgcttactccagggaagtttttaatgtgtctttttattgtctttaatctgtttttatgtttatttttttctttcatcagctattgtttctggttctaaagctaaatccctaatgacatccaatagctccatttcgttatggggtatcatatccaagatgtatcccaaaacttccctaatattatgttccggttcagggatagagcgggttggaaagtattctacttccatggcaagtatacagaccttcaacagatttgaaatcataaatgaaagatccaaatagccttcggcaactaatccaatcgtataatatccttctttatagggatatggttttaaagccgaaaaatccttttttgatagcgatttaatgaatttaaatatctctttgtcatttgtggaattagattcagtattagaggtacttatttcccttggttgaactgatggcattttgcaagcctctattttagctttagataaagcggtaataatagatgcaatctcattagccttctctaatattttatggatttgttccaaattaatatggtagttgttatcatagcgggtagttatatacgcatcatccaaaatttttaaaagactttgctcctcctctacttcactgctaaaaagattactaagtactggtgaaaatgctgttatatacatttgaagctcctttatgctatggcttttgcgttccttgcccataataagaagagctgcataccgaaaccacagttcaatatattggtgcaacatgtacgccgcatgggacagattgtttttttcgataaaaaatgtagcgccgtctaaaaatgcctcaattttatcatgttccttttcaaaagcggattgtatgttggcaattgttttttcggatatctggtattcataaaaactgtccaattctacatcttgattatggtaaatgacgttatcccaggtacaaccatttacaaaaaacaaattgcctgtatttaattgttgctgtgcatattcacaggaaaatatccgatatagaaaatcagtttcgttctgaaatattttagcgaccattgacgataactctttggttaatgaagtacaattatcttctaaaataacaatcaaaagggatttgctgtaatcttcaaattcaatgtttgacttgtaaatgtactttacctcaagaagagccaggagcctatttatgacctgttccccatttgtactagccttttgaatcatcattttgatagtttaaggttataaaagtttatataatcagatatttatttcttataataagaactaatgtacatatattatgataaaataacaaatttaagtttagaatatcggaataatttatcttaaagattaaatttatgtacacaaaacaggacaaaaacatgactgaattaggactttattttgctaaaaaatctattaatagatcagatgtttctcgaaaaacaggtattagtaaaacacgattaagtgaactttcaaataattctaaaacacaattaaaagtaaatgaactttacttgattgctcttgctgttgatgaagacccgggtgaattgttaaaggaagtgtgtaagaaacttgaactgccgaaagagtaataaccaaaataaatgattttgagctaaataaaatcactatatagctcataaaaatgttatatttgagctataaaactctaaaatatagctcatggaacgtaagatttggaattggcaatccaaagaatggccaaacttctcctataatgaaaatgaattaaaagcactggaaatacaattctctaaaaacagtggcacggtttcgggcgcttttaagcatgttggtgataatgaaaaagagcatcttattattgagatgctttctagtgaagctttaaaaacatcagaaatagagggagagtatttagatagagatagcatccagtcttccattaaaaaaaatctgggattacatgttgataacagaaagatagctccggcagagtatggcatttctgaaatgatggtcgatttatatcgcaattatcaaaaacccttaacgcatgaacaattgtttgattggcacaagatgctaaccaatggtagacgtgacttaactgatgttggtaaatatcgaacacatgaagacgccatgcaggtagtttctggacggttagataaaccttccgttcattttgaagcacctccatctcgtgccatgcaaaatgaaatggaacaatttataacttggtttaatagttgtcatttacaagagactacattattgcccatggcaaaagcaggtatcacgcatctttattttgtaagcatacatccctttgaagatggcaatggacggatttctcgtgcattggctgaaaagtccatatcgcttagtattggtcaagctgccttaatttctttatctaaaaccattgaagccaataaaaagtcctattacgatgctttggagaaaaataataaaacctgtgatattactgactggttgagctattttggaagaaccattttaaatgcacaagaagaaaccatttcgctaattgattttataatagagaaagcaaagtttttagatcgttacgcaaaccaaataaatgagcgacaattaaaagttgtaaatagattattcgcagcgggaccccaaggttttgtaggaggtttaagtgctgaaaactacataagaattgcaaagacatcagcatcaacagccacccgtgacttaaaggatttggtagataagaaagcgctaatgaaaacaggtgcattgaaaggaactcgatattggttgaatattggttgacaaaatgtctcttttgggtaaaaaacaattgtgcctgaacgtctatctgtcaaatatttttggaagatttttcttatttaaaaataaaagaatatatttaaaatcaattgattttaatgaaagtataggtttcaaattgattcatatggaagtacacataaaaaagccccgaagatagtcgaggcgctaaatgttttcacaacggaataatccttattgtgaattgctttcagtgatacaaatataataaaataacttaaagttgaaatacgggtttccgtaaatatcttttggcagttgtttgtaatttttgatttttaaattatttaataaataaaggaaatgaaacgaattttaggactggatttgggaacaaccagtattggttttgcatatattaaagagggtgaaaatgaaaaagaactctcatctattgaaaagattggtgttcgggttaatccattaactacagatgaacagaccaattttgaaaaagggaaaccattaaccaccaatgcagatagaacattaaaacgcggagcaagacgcaatcttgaccgttacaaacagcgcagagaaaacttgattgaggttttaaaaaaatctaatttaatttctgatgatattattttaacggaaaatggaaaaaacacaacttttgaaacatggcatttgcgaacaaaagctgtgaacgaaaaaatagaaaaacacgaattgactcgtgtacttttggcgattaataaaaaacgaggttacaagagcagccgaaaaacaaaaaacgaggaagatggacaagctgttgatggaatgggaattgcaaagcgtttgtatgaagaaaacataacgcccggtcaattggcttttcagtttttgcaaaaaggaaaaacaatgcttcctgatttttaccgttccgatttacaagctgaatttgatacggtttggaactttcaaaagcaattttattctgaaatttttactgatgaattttacaaagaattgcaaggcaaaggacagcgggcaacttctgccttgttttggataacgtgcaaattcaatgttgccgaaataaaagatttggaagatagcctaaaaactgaaaaaacaattaaattcaacaaaaggcagcaaaagaaattacaagcttataaatggagaagtgatgctatttctaagcaactgccaaaggaagaagtcgcttttgtattaactgaaatcaacaacgatttaaataaatcaagtggttatctcggagctatttccgacagaagcaaggaactctatttcaacaaagaaaccgttgggcaatatctatacaagcaattacaacaaaattcacatacacgcttaaaaaaccaagtgttttaccgtcaggattatttggacgagtttgaagcgatatgggaaacgcaagccagatttcattctgaattgacggaagaactgaaagaagaaatccgggatattgttattttctaccaacgaaaactaaagtcacaaaaaggactcatcagtttttgcgagtttgaaagcgaagaaaaacttattgacggcaaaaagaaaaccataggtcgtagagttgcgccaaaatcttcgcctttgtttcaggagtttaagatttggcagaacctgaacaatgttttggtacgaaaaaaaggaagccgaaaacgaatcgttaaaaacaatagccaaaccacactttttgaaggcgaagaagagatttttgaatttgaccttgaaaccaaagaactcctttttgaagaactcaatctaaaaggcaaactaaaggccaatgacatcataaaactgctcggtcataaacccacagaatgggaaatcaactattcgcagttggaaggcaaccataccaataaagccttatatgaagcctattttaaaattttggaaatagaaggctatgatgtaaaagacttgctgaaagcaaaatccactaaagatgaagtagaattggacgacttgaacgttcccgcttcagaaatcaaagagatggtaaaacagattttcgagactttggaaatcaatatcgaaatattggattttgatgcggatttggatggaaaagcctttgaaaaacaagccgcttatcaactgtggcatttgttgtattctgttgaagacgacagcaaaaaattcaatgaagatgatatcttaatctatggaaacgacaacattggtctaaaaaaacagttgtgtaccaaatttggtttcaagcccgaacactctaaggttttggtaaatgttgcttttcaagatgactacggaaatctttccactaaagcaatacgcaaaatttacccgttcattaaagaacataaatattctgatgccagcgaattggcgggttatcgtcattccaaacattcactttccaaagatgaactcaaataccgggatttaaaaccccacttggcattgctcaaaaagaacagtttgcgcaatccggtggtggagaaaatcctgaaccaaatggtgaatgtggtaaacacgctcattgataccgaaagaacaaaagacccgaacttcaaatttgatgaaatccgcattgaacttgctcgtgagttaaagaaaaatgccaaagaacgtgctgaaatgaccaccaatatcaacacagccaaaacacggcacgagaaaatcgtaaaactcttgcaaaacgaatatggcgttgccaatccaaccagaaacgacattattcgctataaactttacgaagaactgaaaaacaacggttacaaagatttatatacgaacaagtatatcccgagaggaaaattgtttaccaaagaaattgatattgagcatatcattccgcaatccaaagcctttgatgacagtttttccaataaaacaatttgttacagagaggaaaatttaaaaaagggcaatagaactgccatagattatattgaaagcgaatatggaagcgaaaaacttgaagaatacttaaacagaattactgtgctgaacaaaagttggggtaaagacaaacaagaagaaggtatcagcaaagccaaattccaaaagttgcaaaaacgggaaagcgaaataggtgaaggttttgccgaaagagatttgcgggatagtcagtacattgccaaaaaagcaaaaagtatgttgtttgaaattacaccttcggttgtttccacttctggaagtattacggaccgtttgcgtgaagattgggatttaatcaacgttatgaaagaactcaatttgcctaaatacaggatgttggggcttacagaaatacaagaacgtaagtttggcaagcaagtagaagtaattaccgattggactaaacgaaacgaccatcgtcaccacgctatggatgcgcttacggtcgcttttaccaaacataatcacattcaatacctaaactatttgaatgccagaaaggacgaaaaccacaaactgcacggaaacataattgccattgaaaaaaaagaaaccgaattggtggaaaatagtaatggcagtaaaaaaagattgtttaaaaaaccattgccaaatttccgccaaatagccaaagagcatttggaaaacgtatttgtttcgcataaagcgaaaaataaagtagttaccaaaaacaagaacaaaaccaaatggggaaaaggggaaaaggttaaagttgaactcacgccaaggggacagctgcacaaagaaaccgtttacggaaagtatcactattacaccagtaaagaagaaaaagtggggacaaaattcgataaggaaatcattcaaaaagtagccaatccgctttataagaaattgttgttacaacgattggaagaaaacaacaatgacccgaaaaaagcttttggagggaaaaatatcttgactaaaaaccctatatatctgaatgaaagtaaaacagaagttttgcctgaaaaagtaaaattggtttggttggaagaggatttttccatccgaaaggatgttacacccgaaaatttcaaagatttaaaaacaattgaaaaaatattggacgagggcgtaaaaaggattttgaaaaaacgtttaaaagactttggtaacgaccctaaaaaagccttctccgatttagataaaaaccccatttggctcaacgaagaaaatggaatttccattaagcgagttaccatttcgggagtgaaaaatgccgaacctttgcattacaaaaaagaccatctcggtaattttatttttgataatgaaagacacaaaatccctgtggattatgtaagtacagggaataaccaccacgtagcaatttatagagatgaaaaaggaaacctacaagaaaatgtagtttcattctatgaagcagtagaacgcataaatcaagaattgccaattatagacaaaacttttaataaacatttagggtgggaatttttgttttccatgaagcaaaacgaatatttcatattcccaaatgaggaggtaggatttgatattaaggatattgatttacttgatccgaaaaataaaaagcaaataagcccaaatttgtttcgggtgcaaaagttcacaattaaggattatttctttcgacatcatttagaaactgatgtcgaaaataattcgaatacaaaaaatgttgcttggaagcgtgaaggtttgtctgggattaatggaattttaaaagttcgccttaaccaccttggtgatattgtaagtgttggggaatattaaaaagaggacaatatgataaaacgcactcttttctttggtagtccagcctatttaagtactcgaaatgagcaactcgtagttaattttccggaggaagataaaggagaaaaaaccattgctattgaagatttgggttatgtggtgttggaagacccccagattaccattaccaatggcttgttgatgaaactggtgcaaaacaaaacagcggtgattacctgcgatagacaacatttgcccaacgggtttttgcaaccactggtagggcatagcgaacagagtgaacgcatacgccatcaacttaatgccagtgtgcctttaaaaaagcaattgtggcaacaaacagtaacggccaaaatagacaatcaggccacccattttttacaaagaggtaaaaatgccttgcgtttaaaacgatatgccaaagacgtgaaaagtggcgattttaataatgaagaagctttggcagcagcgtattatttccagcatttatttaaagaacaagtaccagaattcagtcgtaaccaaaaaggtataccacctaacaacttgttaaattacggctatgccattttgcgtgctgttgcagccagggcattggtaagcagtgggctgttgccatctgttgggattttccatagcaataaatacaatgccttttgtttggccgatgatgtgatggaaccttacaggccttttgtagatgccgtagtgtatgatatggtagaagataacttgggatctgtcgaagaaatgaccaccaacctaaagtctgtattgttgaccattccggcaatggatgtattattggatgataagctaagtccgctcatgaacgcaatgagccgcacaacagccagtttatatgactgttttgaaggaagcaggcgtaaaattttatacccaggctttccataaatgggaagaagatatgaacgaaaatcgtttttctcgcttaaaccaatacagaagtatgtggatacttgtgttttttgatttgccaactgaaaccgctaccgaaagaaaagtagctacaaagtttcgtaaaaacttactggacgatggctttgccatgtttcagtttagtatctatatgcggttttgcgccagtagggaaaacaccgatgtgcatgtaaagcgtacaaaaagaactttgcccaaaaaagggaaaataggtattttgcagattacagataggcaatttggaatgattgaactttttcatggacaaaaagagatagatcccgaaacaccaagccaacaattggagcttttttagaatttcgtgatgctgaatttatttcagcatcacataaagcaattgcatttaaaaaatcaaggtaagtaaattagaaaatccaaaggttaatggatttagtgcattctaacagattttttaaaaaacaggataccagtcttttacaacaagtatcctgtgaattctccataaatttaaagaactgaaagcaattcacaaccgtcaagccctaccattgttttaatagccgcctgtgaattctccataaatttaaagaactgaaagcaattcacaacttgaactcaacgtccgcgtctacggttactcctgtgaattctccataaatttaaagaactgaaagcaattcacaacaacaaatgcagaaggtgtttcccatgctgacctgtgaattctccataaatttaaagaactgaaagcaattcacaactacagtggaaagagcaacataaaaatgaagcctgtgaattctccataaatttaaagaactgaaagcaattcacaacttttgccgaatatggcacacttcaaccaaacctgtgaattctccataaatttaaagaactgaaagcaattcacaacatgatatcatatagtttaaaaattctatatcctgtgaattctccataaatttaaagaactgaaagcaattcacaactgcataatctttctactttactacttattgcctgtgaattctccataaatttaaagaactgaaagcaattcacaacttatgcctaaaagtgcttatcaacaaggtgcctgtgaattctccataaatttaaagaactgaaagcaattcacaacaaaatagcatcctttaaaaagtgtagttcccctgtgaattctccataaatttaaagaactgaaagcaattcacaacaacagggctatcatctacatcaccaacagacctgtgaattctccataaatttaaagaactgaaagcaattcacaactatagaccatgtaggccttggtctgcttttcctgtgaattctccataaatttaaagaactgaaagcaattcacaactagtgatagacgtttggtattatgcccacgcctgtgaattctccataaatttaaagaactgaaagcaattcacaactatagatgagtttttagagaacttgccttccctgtgaattctccataaatttaaagaactgaaagcaattcacaacaccttagatgtgcttaaacagtcaaggactcctgtgaattctccataaatttaaagaactgaaagcaattcacaacaattaaaatattgacaccttttgaaacaccctgtgaattctccataaatttaaagaactgaaagcaattcacaacagtattaagttcaggcaatacatcaccatccctgtgaattctccataaatttaaagaactgaaagcaattcacaacttgtgccttaacgatctcctctacttttttcctgtgaattctccataaatttaaagaactgaaagcaattcacaacaacttggtatcaactatgtctgatacttctcctgtgaattctccataaatttaaagaactgaaagcaattcacaactgataaaatacagagccttacggctgatgacctgtgaattctccataaatttaaagaactgaaagcaattcacaacaatcgtttccatatatagataccagcacttcctgtgaattctccataaatttaaagaactgaaagcaattcacaactgttcctcaaaaatcaaggcttctagcaaacctgtgaattctccataaatttaaagaactgaaagcaattcacaacctgctgatggacttgtaaagtcagccgcagcctgtgaattctccataaatttaaagaactgaaagcaattcacaacctgtggcattgtgcctttcttgtgatttcgcctgtgaattctccataaatttaaagaactgaaagcaattcacaacaggcttggcaatttgccttttttacaatctcctgtgaattctccataaatttaaagaactgaaagcaattcacaacatgaatttaaagcattgaccacttctttcacttgtgaattctccataaatttaaagaactgaaagcaattcacaacctagcttacttttttctgattcaagcatatcctgtgaattctccataaatttaaagaactgaaagcaattcacaacatgtgcaactttccaaacgtggtaaatcaacctgtgaattctccataaatttaaagaactgaaagcaattcacaactagggttttattatcaaaaatacctttaccctgtgaattctccataaatttaaagaactgaaagcaattcacaacaaattgaggtaccctatagcattggacggatacctgtgaattctccataaatttaaagaactgaaagcaattcacaactaagtataaaaatatcaaaactaccattaacctgtgaattctccataaatttaaagaactgaaagcaattcacaactaaacatgaccaaatcaccatctttatttacctgtgaattctccataaatttaaagaactgaaagcaattcacaactgatttgttacgatttgattcctgtgaattctccataaatttaaagaactgaaagcaattcacaacattccattcgtcactcaaaaaagggtcatacctgtgaattctccataaatttaaagaactgaaagcaattcacaacaatggactggagtgtcttaccaaggccttgcctgtgaattctccataaatttaaagaactgaaagcaattcacaacggggtctggtcattttggtacatgggcaaacctgtgaattctccataaatttaaagaactgaaagcaattcacaacttatttgatcaattaaggatcttgattttccctgtgaattctccataaatttaaagaactgaaagcaattcacaactacagccacaaagcttaaaagcaacgcctcctgtgaattctccataaatttaaagaactgaaagcaattcacaacctggtgtaatcgtcattaaaaacatgtggccctgtgaattctccataaatttaaagaactgaaagcaattcacaactatcttaattatttaatgtaaacttcaagacctgtgaattctccataaatttaaagaactgaaagcaattcacaacaccaataaatttgtaacagccactgatgtcctgtgaattctccataaatttaaagaactgaaagcaattcacaacgcgtttggtctttaatattggtttatattccctgtgaattctccataaatttaaagaactgaaagcaattcacaactaagccctctacgtctatcttcaccgttaacctgtgaattctccataaatttaaagaactgaaagcaattcacaacaaaaaagccgttcaagagttcattgatttacctgtgaattctccataaatttaaagaactgaaagcaattcacaacatactgttaatactttgtatgtacatttgtcctgtgaattctccataaatttaaagaactgaaagtataaaaaagtaaatttcaaccttcaccgccttattaaaagttaattaccctatctaaagcatcatccgtatcttttttcataaaactagactgataggcaatcgtagttgtaatagatgaatggcgatataacttttgcaacatttgaattggaattttatctccagaaatatttccaaaactatgtcgcgctatgtgcatacttaacttcttatcaattttcaattttttagccaccaattctaaccttctattaagagttcttgttactgtctttatcctagttaataactccttagaatcattgaagttcgttcctcttaaatatgaaaaaattaagtcattattggcaagactaggcccatcattataaagttttagtaaagtctcggccttttcgggcacttttaaagagactactttttgatttttattcatcctatacaatagcctaccgtcattaaagtcagacttttttaattgtaaaacatcacttacccttatccctgcaaaataaaaactaatcagccaaacattaacggcattctgctgtgcaacagttaaatctttagcgttttctagcatttttacctcttctatggataaacctactttgtctgattctggaattcgaatttgaatctttccttttccaaatggataattattatgctctgccaaaccttcagaaatagcaagattatagattttacgaattaatatcatgtagtttacagctgtccttggttttcttttctcttgattaagaatataaccttcaaaattttttaataggaaaattgttatttccttaaagtgtagcttatccttaccaacaaaatttttaaacttagcaatcctccccttctgcgttaggtactgcgagtgtttttcagcactctttaaattttcaagatgtaaatctgctaaactaaaaaaatcaattttattctttcctttaacactttcacttacctgagatgctgaaataaaatcttcactgatttctgcatccaataacttatcatttgcctcagcaagttttttcaatatcaaacgatttattcttgaagcattaggatgagacttcttaaccttcttattttggtcatcccaaaatttttgagcaatatattgacccgtagaaataaatgaagtttttctgtccttagttatccgaattgtaatggggtataaattttgagaattcccttttttccttaaaactgtctgaactgttgccatactttttgtattatttctaaatatacaaaaaagtgggtacaacataggtacaacatttattgattttaatcgatattaattgattttaatcgatatttaaaaactcataactaattcattttcaattgttttgtgttgttttgatgttcaattgtagattttcataacccggaggtcgcgggatcgtgccccgctctcgctacaaaacataaagtatttaaaaacagcggtttggttttctctaaaccgttttttataaatcaaagccaaaatcaagcctctttcggcttgatataattttcattttattataaatcttaataaagcaacatttttattttctcatttcttttacaagtttaatagtagcacttttaataaaatcttcaagaacatctttttcaacaccttcataaggttttgtgccattctttttgaagagttttaattctttcttaatgtccttgtaagatttagaaatcacacaaccatctacacatggggtataattaaacctataaacccctgcaaattcatttgaattaattaaaactaatttaaactctacagatgccccgtatttctttctgttaccatatttctcaaccttttcattattatttttatcataatatttattagtttgatataatacctgagaatctaattttgttaactcaataatcagatctgtatcagatttttcttttaatttttgataattaatattatttccatcattagcgattatttgattaaaaagttgtctatctttaacaataaatccacttgcaagcaattggttttctatagcattatataaataatcaaagttttcagattgaaggtcttttttatcagtttctgttactgagtaacttgtttggggtattcttaaaacaacttttgggcttttattgttatttaaaaattgttttaaagattctgtttttactatatcatctggtttttgataaaattttagtgttttagttgatgaacaactgaaattaaaagcagcaaaaatgtatggtataaaaattgatcgtttcatgggtcttaaatttaaattacaaacaaacatacttttaaattaaaaagtacccttacggcttatcgtaaagcaaaaaactctgcaccagaacgatgcagagttcagaataaatctccctaagatttaactaattaatagcttaacaagattacaagaagtttgtgaaaaatttttactgttttccgtaaagtggacaaactttaaataagccctaaatctttagctgttgcaaccaaatgaatagcattattggccttaaaatctatacgtagtttatttagcctcttttcaatggagctcaaactactgggcttaatattgttttttgaaaaatacaggctaatatcgtcctgggaaagtccttttgacagttgttcaagcaatagaatatcataatcattgatttctaaatcatttgttggatttagtgcatgagaaacttctggagataaatacggtatgttttcaaacacactggaaatagcattggtcagttcaacaagacctcttctggtcttgcacacatatccgtttattccataacttgtaattaatgatcgaaccttttgtatcctgtcctcaatggaataagctattatcttcatttcagggaattcatttctaatggttctaatgagctcctcgcctgatctaatcttttgttctctccaatctctcttaaaggaaagatcagttatcaacaattcatatggcactccatccaactctgcttttttaattttaaggtaagcatcatcacaatattgcacctgatggatttctttaatacccaattcacaaagagcggcatggatacctttgttgatatcctgcatatcttcagctattaaggtttttgtaaacatgattaaacaattatatgggcactaaagccttcatttgccttagaatcaaaagtaatggttccttttacagattccatacggttttccgtattatggagcccattgttcttgaccaagttgcaaccaataccattatccttgtaggaaactgaaattttgcgattttcttgattaaacttgagaacaactagtgttgctttactgtgtttccgcatattggtcataagttcttgcaagaccctgtataaagcaaacttctttgtttcatgaagttgattccaatttattttatcaatatccctggttatgatgtttaccttatcagatttgtaactcagcagtaaatcttttaaatggtttccatagtcttcgtgaatatcaataatattgttctccttggaaatatctcttgtcttgttgtaaatcccctctaaatcgtccaaaacatcgttagccacttttttattttgttccaacttggtcatgatattgtagacatcattagccacttcgtcatgtactttttttgatatgcgaacctctgtgttgtagacttgctggattttgtcttttttgtgcttggattttagaaatatcattgtgaaaataaaagccaatgttattagacctcctagagacaaataaaataattttaaatttttctgtttctctctttccagttcagcaatttgcaatttatgttccttttcggtataatcatatttgatcttggcatatttattctcttgtacttgtcttgccttaaaaatactgtcagttatttttttatattccaagaaatgagtgctatccccaatatccactaaacgagaaagagcatcttgtaaaaatgaagcactatttattgacttagcaatattatacgatttatcaccataatactttgaagatttaaaatcatccctgtccttataatattccattaagtgtttgtaactagcgtacataccttcataatcattattagttttccttatttgcaaggcaagaagcatattctccaatgcttttggcctattcaatttagattctataaaccctaagttatcaatggctctggaagtttgccttatatcattcttgttaaaactatttctataaacttttaaaaattcctcttcagccaattcatatttgttttgagaaatgtaaattaatgccttattattattaattatatttatttcgctttcattgtcggtaaatgacaaagctgtatcaaaattcttgatcgcagtttcataatctgatagttccatataaatacggcccaactgattatataaacctaccttatgttcattaatactgggggattctttatcttttgacaaatatttaagtgtttcgacaaccgaaacctcacttccatgataatcaccaagtttatactgtatgatcgctatttgtcttaaaaagtaaattattgataaggtatcattagcctttaaactctcttttttctttaaattaaaaaatctaaacgcatccgataagttggaactgttcttaggattattggccacttgataataatatgacaaactatcttttacctgataacttctgttaatgtttgcgtagcaaaaatcagttttaacaataaaaaagaggaatgaaattaaggctattttcattcctctaaaatactaactatttttatttcttagagatattattatccaccagttgtaggaggatgtggaggtggtatatctcctccatcaccgcaacagttaccatcatctgtggccaccggtatattaactgaaattccttgaggcgtacatgaatgtaaagcgatattaaggaaaacagtaattataattaaaactatttttttcattttgtttattattttaaattggacaatagtgttgcaggccgagtttattcggatacttttggtgcattgcaacacctgcttaaatctgtagagacgtctctctttttgtgaagtatggaggacagctgtagagaagtttaattacttcccagagactagacaactcta

SEQ ID NO: 2101 - DNA, 24344 bp, synthetic construct
  source 1..24344: mol_type = other DNA
  misc_feature 1..24344: note = Synthetic
aggaattacttacacgcaattacgatttgaacgtgatttgaatagttttaggatgagttttcacttcacacccattggatataggaattcttggtatttcttcataggaataaaatcctcaatgctgtctgacttgaagtgggataagagcaaagaaccggacagaagattacgttaatattttgtgaataatttaaagaggagccttttcttatattcaaaattatgatttttttaattttgaaagtgtatttttatgaaaaattttaaattttgtttatattttttattgaataaataattacctttgcatctcgaaaatgaatatatctactaataacaacatataatttcttatgaaaaaattttttgcttatgtagctgttgcattgatgattgtaatgacagctacaaattgttccaaaaaggatgaggttacctatgatgaccttaaattgagtgtagcaggtcaaaatcttgctgttagggaaggggagaatatttcctttgatattaaagctggcagtggagagtatgaagtgctgagttccaataatgccgtaataaaaccttctctttcacaaactaaagtagttttgactggggtagccgaaggagaggcaacagtaacggtacttgataaaaaaactaatcaaagggcaactgtgaagattgccgttagtgaaggtttggtggatttagctcttgatgtaaatgagttgactttgtatttaggagaaaacaaagttgcaaacatttcttcaggaaacggagattacgaagtttcggtatccgattctaccattgctactgcaactttatcgcaaacaacagtggttgttggtggtgtgtcatcaggtacaacaacggttaaggttaaagataaagcaagtagtaaagaagttactttcaatgtgattgtgacagagaaacagattattgggctaaatattgaaggaaatgatttgattgttagagcttttacagatattgaaagggatcaagctgcggtaaaaggagagaaattagaaaatacgaaaatacaaattacttcaggtgcaggaaattacacagtgacatcaagtgatgagaccatagccaaggtgaaagtggaaggagatatggttcatattgatggttataagacaggagtagtgactattacaatatctaatgaggtaaatgaacctagagtgattacagcaaatgtatacgcactaagtcttgaagtgagtaatatcagtttgaaggttaatgaatcagttgaagttcaggtgattgacggtagtggtcaatatgagctgttggataatttaccaaatgatgtgaatgcaacaattcgcgaaaacaaaatcataattacgggtcttgctaccacgaaggctgatattatcttaaaagacaaagtctcaggtaaagaggctgttttgggagtttacgtggttgaaaatatcataaaacctgaagaaatggatactgtattggttgaaggtgggagttttttgatgggaagtgatgatggagatcctgatgaaagagttagaaatactgtgactttgagtagctacagaatcagtaaatatgaggttaccaatgcacaatttgctaagttcttaaacgaaaagggtaataaagtagaacaagggatgttttactattatggtgctgataaagagagagaaagaggtattgttaaaaatggaaatacttatgaagtcgtaaaggggcgtgaaaattatcctgtaacttacgtttcttggtatggagcaaatgcttatgcagaatgggtaggtggcaaattgccaacagaagcccaatgggaattcgcttctttggggggagttaaaagtaataagtttaaattttcaggaagcaatattgttaatgaagtagggtatcatttaggaaattcaaaaggacttaatcctgttggaacattgaaagctaatgaattaggtattcacgatatgagtggaaatgcttgggaatggacattggatgagtatagttcaagatatacgccagaggcaaaagtaaacccagaaccatataaaacggataatcctaaaaaagtgtttgttcgtcgcggtgctagtgtgtattgcaaaccaaattattgtcgttcagcaaatcgtggagcgaatggttcttatcaaaataacataggtttccgtgttgtatttaaagagtaataaagatttaaaatgaaacttttacaaacatcctttcttttctgagaggatgtttttttatttaaatttagaaaattttaaaaagagagtatgtgtttacgattgaataattgctacaattgacgattttagaactcgaaatacaacaaaaaaaacttttttatcttcttttataaatataaagtattatatttgtaccgaattttaataaaactaactaacaataatttaacagatatgtcaaacgacatccgcattcgaaaggggttggacatacacttggaaggggaggctgagaagattactcggcagcttccgcttgcgaaagtgtatggtcttaaaccctctgattttcattctgttgtgccgaagcttatcgcaaaggagggcacagaagttaaagccggagaagccgtttttcacgacaaaaaagatgagcgggttgttttcccttctcctgtgagtgggaaaatcgccgaagttgttcgtggggaacgtcgtaagattttagaaatcaaaatcttaccggatacgcaacaagtgtttaaggacttcggaagcaaagaccctgcaaaaatgtcagcagacgaaatcaagaatttcttgcttgaaagtggggcttggactttcattaagcaacgtccgtacgacattatcgcaggggctgacactaccccaaaagcgatttttgtttcggcttgcaaaaccaatccgcttgctcccgattacagctatgtgcttaacggaaaagagaaattcttacaagtggcactgactgccttagccaaactcactacgggcaaggtacacgtatcagtcttcaaaaatgacccgcaatcgccactcagaaatcttaaagacatcgtgattcacaacgtttcaggtccacatcctgctggaaatgtaagtacacaaattgctaaaattgacccgattaacaagggcgaagtggtttgggtggtaaccccgcaagatttggtggttatcggtgaactttttgtaactggaaagctcaaccttactcgcactgtggctcttacgggggcttgtgtggaaaaaccgcaatacttttcggcagttgctggtgctcagatggatagccttgtttccggaaatcttaaaaaggagaaatcacgtatcatcagtggtgatgtgcttacgggagaaaaagtttcggaaggcggatttttagggtattacgatgaccaaatcacggtaattcccgaaggagacgactacgagtttttcggttggaacaaacctatttttaataaagtttcaaccacgagggcaatgactttctcttggctgaatccgaagaaaaaatacaacctaaacaccaacaccaatggcgaacatcgtgcctttgtgatgacgggtatgtacgaagaagtttttccgttggacatctatccgatgcaacttttaaaagcgtgtttgtacaaagatttggacgagttggaaaacttgggagcttacgaaattgcccctgaggattttgccttgaccgagtttgtttgcgtttctaaacaaccacatcaaaagattatccgcgaaggattggatttgatgatgcaagagttaggataagttgggctgatgatttttcatttttcagatgaaatacattgccatcgttcttttaaaaactgaaaaataagcaatttttaccaaaacttattgggaggtaattttttagagtaaatcataatttttgaatatacaagtattgtaaatgattaaacttaaatcagaattatatggatgagttatcagactttgattttctgaatttgatagaaaaatcaagagcaagtgctcaaagagagatacaacaaaaaaagtatttatctcccgagaagctattgtataatgaaattcgatctaatttgttttaccttaataatcacaatgctccatattattgccagataggaaatttagaaaataaaacttctaattttcaagaagaaagttttttgataaacattcaaagggaatggtaggagcagggatggtagctttgggaagtcccattatacgaaaaaaatttgttacgaaaggagctgttggagcaacttcaattgcatcaagttttttgtcaaagactttccctcaaaaattgcctttccgtgtttacactattaatgcaaagtttagattagtttcaactaaaacgatggggagggctcttggcagattgatacccaatgtcggaatggttttactggtaattgatgcagtgaacattttggtagaggtgtataaagataatgataagagggatgctttttctcctttttttggaggaggctcaggtggaggtggaggatcttctcataattggtaataaatatcgtactttatgttaagtgaggaattgcaagagtttttacgaaaagaatttcggtatgaatcccgcaaaatggtcttcactcctgaaatgaaactttacaaaaatttcaagatggcgggcgaagatttggatgatttcgtggggcgatttatgaagcgatttaatgtaaaacttggcgaagcgttcaattacgaagaacgtttttaccccgaaggaagtccgattttggaactaataaaaaacatctttttagggaagaaacaggaaaaggaagaacgcaaagacctgagttttgccgaattagatgaggctatcaaaagcgggattttggagtaaacacgaaatatcctatgacttataaaggtggatggtgattagaaaaactaatccctattccctaataactaattgtttaagtaatcattctttattataagaaaaatgagtttaaaaagtaaattacatacgttaaaagaaaagtataagggaacgaagctggaaacgacgttcaatgctttgcatacgttcctttatttgcctaatgaaacgacccacggcggtacgcacattaaggcagctgacgacctcaaacgtacgatgaataccgtgattatggcactggttccgtgtcttatcttcgggatttttaacgtggggtatcagcattatgtagctacgggagctttatcgcacgccgtagggctacctttttttagtcccgaattttggtcgtggcaaaacttctctttcggagctataaaagtgcttccgttggtgatagtttcttacgccgttggtttgggaattgaatttatcttcgctacacttcgtggacacgaagttgaggaaggatatttggtaactggaatgcttgttccgcttatcgttcctgttgatttaccactttggatgcttgctgttgcggtggctttcggggtaattatcgggaaagaagtttttggaggaacgggaatgaatatcttaaatccggcacttactatccgtgcgtttttgttcttcgcttatccgacttcgatgagtggcgacaaaatttgggtagaaggggctactaaacgcgctcaggaaatcgcttccggagcaaatttagacgctatttccggagaaactattcttgggcatttggctcagcaacacaacattgccgataaattttcggtttcggatatgttcttcgggtttactccgggttcaatcggtgaaacttctactttgcttataattttagcagctttgttcttgattttcactaagataggaagttggagaattatgctaagtatggtacttggaggtttggcaatgggatatattttcaacgcttttgctccgtcaatggaaggaacgcaatttttcaccctgtggagtatgccggcttggcaacacttgctcatcggaggatttgctttcggtacggtgtttatggcgacagaccccgttacagcatcgcaaaccaatacgggtaaatatatttacggatttttggcaggtttcatttcgataatgattcgttgcttcaatcctgcttatcctgagggagttatgttggcaatcttgttgatgaacgtatttgctccaactatcgaccattacgtggttcaggcaaatgtggcaagaagaaaaaaacgtctaaaagctaaaactgcataggtatgtcaaatagaactgaaagtaattcatatacagtgatttttgccattattatggtaattatcgtaggagcgttgcttgcgggagtttcttcggcgttgagtgataaaatcagcgagaacaagaagtttgaaaagcagcaaaacgtactttacgcaatgggcgtaaatagaaatcagaatactaatttgggtgagggcgatgtaactttcgttcctacttctgaggtaaaagccgagtttaacaagtacatcaaacaacaattggtgattgaaaacggacaggcatcggagcgtgatttgattgaaaatccgcttaaaaaaggcgaaaacggtctgccgctttttgtaggtgagaaagacagcaaaaccttctacatcattcctgtttccggaaaaggactttgggatgctatttggggatatgtagctgtggataagaatcttatcgttcagggagttttcttcgaccacaaaggagaaactgccggattgggttcaaacatcaaagagcgtttctttatggacgatttcatcggggagcatttgttggacgcttcggggcatttccaaagtgttgaaggttcaaaatcaaacagcgaccctgaaaacaaacgtaaagaagacggaaaagttgatgccattgccggagcaactcttaccgtaaatggtgtaaatgagatggttaaaacaggcgttggtgcgtatgttgattatattaaaaacttaaaaaactaatattatgggactatcaaaaaaagacgtaaaattggttacagacccgctatgggataacaacccgattaccgtacaagtattggggatttgttccgcgttggcgattacggcacagcttaaagcggctatcgttatgggattgtccgtaatatttgtactcagtgtggggaacgtggtaatttctttaatcagaaacgttattcctggtaaaattcgtattatcgtgcaattgttggtggttgcggcgttggtaatcattgttgaccaagtgctgaaagccttttcgtatgagttaagtaagcaactttctgtattcgtggggcttatcatcacgaactgtatcattatgggacgttttgaggctttcgctttggggaacacgccttggaaatcgttcttggatggtatcggaaacgcaggaggttacgccattgctcttgtgattgtggctttcttccgtgaacttttgggttcgggaacgcttttcggaatccaagtattgggcgaccctatcaaaaagacaggtttgtacgcattaggatacgaaaataacggatttatgctacttgctccaatggcacttatcacttacggaatcgtgatttggattcagcgtacacgtaacaaatcattaattgaggaataattggttaactttataaagattataaaatggaatatattgaactgatttttaaatcgatattcgtagataatatggtattcgctaccttcttgggtatgtgttcttaccttgcggtatccaaaaaagtatctacggcagttggtttaggagcggcggttatcttcgttttggcggtaacggtgcctatcaactggttgcttaacgaatatttgctcaaagaaggagctttggcttggttgggtgaagagtatgcaagctatgatttgagctttttgacctacattttgttcatcgcaacggtggctacaatggttcagttagtagaaatcattgttgaaaaatttgctcctgcattgtacaactctttggggattttcttaccgcttattgctgtaaactgtgcgattttgggaggctcgctttttatgcaatctcgtgaaattccgtctattggtttggcggctacttacggattggcttcgggaattggttggttcttggcaattgttgccattgctgccattcgcgagaaaatccgttattcgaacgttccgcctgcacttcgtggattagggattaccttcatcatcacggggcttatggctatcgggtttatgagtttcggtggtatgcttacaggcggtaccaaaaaagctgaagacgagcagactaaagcgatgatggagcaaaaagtggagaaaaaggaaaaattagcccataacacaaaagatttttaagaaatgatattatcaagcagtatattagtaacagtagcagtaacggtgattgctttgctggtcattacgttattgttggtagctttgttgttggtagttaagcagaaattagccccgtcgggtcctgtgaaaatcaccatcaacaaagaaaaagtaattgaagttccttcgggaggttcattgctttctaccttaggaaatcaaaagatatttttgccttcggcttgcggtggtggaggttcttgtatccaatgtgaatgccacgtgctttcaggtggaggagaggcacttcctaccgaaacacctcacttcactaaaaaagaattgaaagaaggagctcgtttggcttgccaagtgaaggtaaaacaagatatggaaatttcaattcctgaagaaatttttggtatcaaaaaatgggaagctgtggtggtacgtaactacaacgtggcttcttttattaaagaatttgtggtagaaattcctgaggatatggattataaaccgggaggatatattcagattgaaattccgccgtgcgaaatcaaatattcggatattgatattacagcacatcctgctgaacaccctggcgagcctgacaaattcaaaatggagtgggataaattcaacctttggcctttggtgatgaaaaatacagaaagcgtagagcgtgcttactcaatggcttcgtatcctgccgaaggacgcgaaattatgttgaatgttcgtatcgctacgccaccttgggacagagctaaaaacggctggatgagcgtgaaccctggggtagcttcttcatacattttctctcgtaagaaaggggacaaagtggtaatttcaggaccttacggagagttctttatcaacgaatccaacgccgaaatgttgtatgtaggtggtggagctggtatggctccgatgcgttcgcacctgtatcatttgttcaaaacattgaaaacaggacgtaaggtaacgtattggtacggaggtcgttccaaacgagaattgttctacttggagcatttctgggaattggagcgtgagttcccgaactttaagttcttcattgtactttccgagccgcttcctgaggataattggaaagtgaaaaaagacattcacgatacggaaggagacggatttacagggtttgttcacaatgcggtaattgaccaatatttgagcaaacacgatgcccccgaagatattgagttgtacttctgcggacctccgatgatgaacaaagcggtacaaaaaatgggtcaggacttcggcttgcccgatgaaaatatccgcttcgatgactttggtggataataaaaaccgaaagcggttagaaatattaaatgaaaaatcctttctcaaatttgagaaaggatttttttgattttatactcaatcagtaaggattaaaaatcctagatttattaaaattagccctattagctatatttttgaagaagattttgaggtaaaacattttcagagagcttatttaaagtaaaaagccccgcagataggcgaggcactagatgttttcacaacggaataatccttattgtaaattgcttactgccacaaaggtaaaaaaaaaatagatactgtaaaaatatttaactttttatttgtacttttacacttgtaaatttttaaaagctataaatatgaaacacatacttggtcttgatttagggacaaactccattggttgggcagttgtaaaagaagctcaaaacgataatgaacaatcagaaattttggatgttggtgttcgggttaatccgctaacaaccgatgaaaaaacaaatttcgagaaagggaagcccatttctaccaatgccgatagaaccctgaaacgaagtgctagacgcaacctgcaacgctataagctccgtagaaaagaactcatcgaacttttgaaagatcatcaactcatttctgaaaatacaattttaacagaaaacggtaaaggaaccaccttccaaacattagaattacgagcaaaatcggctaaagaaaaaatatctttggaagagttggctcgtgtttttttaacgattaataaaaaaagaggttataaaagcagtcgaaaggcaaaaaacgaagacgaagggcaactgattgacggaatggaagttgcaaaacgactttatgaagaaaacctaaccacagggcaattgtctttacaacttttgaaagaaggtaaaaaatccttacctgactactatcgttctgatttacagatagaaatggacaaagtgtgggattttcaaaagcagtttcattcggatattttgaccgatgaattttacgctcaacttaaaggtaaaggacaaagggcaaccagtgctttgtttttggcaaaataccaaatctataccgctgaaaataaaggaagtagagaagataaaaaattacaagcctatcaatggcgagtagatgctctctcaaaggaattgacaagggaagaattggcttttgtcatcaccgaaatcaataataatttaaataattccagtggttatttgggagcaatttcagaccgaagcaaggaactttacttcaataatgaaaccgtaggcgagtatctttggaagcaaattgcagcaaatccacatacttcgttgaaaaatcaggtgttttatcgccaagattatttagatgaatttgaacaaatttggaatacccaagctcaattttatccacagattttgaccgacgaactaaaaaaagaacttcgagatgtagtaattttctaccaaagaaaactgaaatcgcaaaaatcattggtgagtttctgtgaatttgaaaataaggaaatagagattaaaaaagaagatggaacgagtaccaaaaaagtaatcggtcttaaagtagctccaaaatcatcgcctctgtttcaagagtttaaaatttggcagaatttaaacaatgtcttgattcgtaaaaaaggaagtaaaacgaaaaaagtagctaaaaatcaacaagcagttctttttgaagaagagaaaacaattttcgaattggatttggaagcaaaacaagtattatttaatgagttaaatctcaaaggaaatctcaaagcggattattgcttggaaattttagggtattctcccaaagaatgggagatgaattatcctgaattagagggtagtagaacaaataaagcattatacgaagcatatttgaaaattactgatttagagggatatgatgcaaaaaatcacctcaaagtaaaattgaataaagatgaagtggaacttgatgatttgaaagttcctgcatcggaaatcaaggatatggttcaagcgatttttaaagaggcaggtatcaacacggatattctgcatttcaatgctgaattagacggtaaagattttgaaaatcaagcaagttatcagctttggcatttgctgtattcttatgaaggcgatgattctaaaagtggtaacgaattgctttataaattgttagaaacaaaattcggttttaaaaaagagtatgctcaaattttagcgaatgtttctctgtcagatgattatggtaatctttctaccaaagcgatgcggaaaatttatccatatattaaggaaaataaattcagtaccgcctgtgaattagcaggttaccgccattctaaacattcattgaccaaagaagaaaacgataatcgtgtgctgaaagatagtttggaagtcttgaaaaagaatagtttgcgtcaaccggtagtagaaaagattctaaatcagatgattaacttggtcaatgcgcttttaaagaaataccgaacagaaaaccctaactttaaattcgatgaaattcgtatagaattggctcgtgaactgaaaaaaaatgcggaagaaagagccaatatgacggcaaacatcaataaagcgaaaaccgaacacgagaaaatcattaagattttgaagaatgagtttggtttaccaaatccaacaagaaatgatattatccgttatcgcttgtatgaagagttgaaagataatggatataaagatttgtataaaggagattacattccaagagagaaattatttagtaaagaaattgatatagagcatattatacctaaagcaagagtgtttgatgatagtttttcaaataaaacgattatttatagaaaaacgaatttagaaaaaggtgagcgaactgcgtatgattatatagaaagtttgggtgaaaagcaattggaagagtttctttctagaatagaaaatttatacgaaataggaaaacctagtagattgcataataggagaaatccattgaaaaaagttgaggaaaaaggaatatctgattctaagtataaaaaattattgaaaaaagaaagtgaaatcggagatggttttgtggaaagagatttgcgtgaaacacaatacattgctaaaaaagccaaagaaatacttttgcaaattactcgaaatgtgctttctacatcggggggtattacggatagattgagggaagattgggatttggtcaatgtgatgaaagaactcaacttgccgaaatacagagccttggggcttaccgaaatggaagatcgtaagtatggtcagcaagtggaagttatcattgattggacaaaacgaaatgaccatcgccatcacgcaatggatgctcttacggtggcttttaccaaatacaatcatattcaatatcttaattatctgaatgctcgtaaaaatgaaaaacataaggaacatagcaatattatgggtattcagcaattggaaaccataaaagtaaccgataaaaatggtaatgaaaaaagagtttttaaagcaccaatgcccaatttccgtcaggtaaccaaagcctttttggaaaatgttttaatttctcataaggctaaaaataaggtagttaccaaaaacaagaataaagttgcgggaagtaacaaagttcaggaagttttaactcctcgtggacaattgcataaagaaacagtttatgggaaataccagtattatgtacaaaaagaggaaaaaattggagggaaatttgatttggaaaccatcaaaaaagtagccaatccactgtatcaatccttgttgaaaaagagattagaagaaaatggcggcgatccgaaaaaggcttttacaggtaaaaattcattggcgaaaaatcctatttatttagatgatacccaaacagaacaactgcctgaaaaagtgaaattggtatggttagaaaatagtttttccatccgaaaagacattactcctgaaaactttaaagatgaaaagttaatcgacaaaatattagacgaaggggtaaaaagaattttgaaagaacgactacaatcttttggaaacgatgctaaaaaagccttttcagatttagacaaaaatccgatatggctcaataaagaaaagggaattgcgataaagcgtgtaaccataagcggtgtagcaaatgccgagcctttgcatacgaaaaaagaccatttaggaaaagaaattttggataaagaaggtaagcctattcctgtggactttatcagtacaggaaacaatcatcatgtagcggtttactctgatgataaagggaatttacaagaaaaagtagtatcagtttttgaagctgtcgtaagagccaatcaaggattacctattatagacaaaacatacaatcagcatttgggttgggaatttttgttcacaatgaaacagaatgaaatgtttgtttttccgaatgaatcaacaggatttaatcctaacgatattgatttattggatcctaaaaacaagaaaataataagcccaaatttatttagggtgcaaactatatctgttgtgaaatatggtaatgcgatagttcgtgattttaaattcagacatcatctagaaacgacagtagaagataaaaaagagttgcaaggaaaaacttaccaacaaattaaaagtttgtcacctttgaatgatatcataaaggttagaatcaatcatttaggagatattgttagtgtaggagaatattaattaaaaacgatgaaattatgctctaccgctccatttatattggtaatccagcgtatctgaagttgaaagaccaacagatgaaaatcgtttgtcccgaaaccaaagcagagaaagggagcgttccggtagaagatttgggtttgttgatgctcgaccactttcagattaccatttcccatcagctgatacagtggctgatgggaaacaatgtggtgattatcagttgcgatgcccatcatctcccacacggacaaatgctaccgctccacggaaatgcgatttattcccaacgcataaaagaccagatagaagccagcgaaccgctcaaaaaacagctgtggaaacaaaccatagaatgcaaaatagccaatcaagccgctgttttggaacgacttggaacttacgccagtccgatgtatgagtatctcagccaagtgaaatcgggcgacaccagcaatatggaaggcatcgctgcacagcactattggaaatacctcattcaccccgattttttacgcgaacgctacggcgattcgcccaatcagtttttcaattttggttattccgtattgagaagtatcgtggcaagagccattgtagaaacaggtttactgcccgttttggggatttttcacaaaaacaaatacaatgcttattgtttggcagatgacctaatggaaccttaccgtccttttgtggatttattggtcatccgatggttggaaaagaatcctgaagccgaagaactgaccaaagaagcgaaagcctattttttacaaatcgctaccaaagatgtgaaaatagacgagcaggtgcgtccgctattagtcgcggtaaaatctaccgtttcctctctgtacaaatgctatacgggcgaaaaaagacaaatttcttatcctaaaatgttatgaattccgaacgatttaacgcttatagaattatgtgggtaatggttttatacgatttgccaaccgaaactaaggcaatgcaaaaagcagccaatctcttccgaaaacgcttggaagatgatggattttctttatttcagttttctatctatttgaggcactgtccgagtagagaaaatgcagaagtgcataaaaaacgagtaaaaatgatgcttcccaaatacgggaaagtagccgtaatgacgattacagataagcagtttggtgatatggaaatatttcattctaaagtacgcgaagatccgccacctacttttcagcagctcgagttattttagaaatagaatgaaaaaaatggatttatccaatccagtttattctttttttgctcaattttttatttctaaaaataaaaataatcccctgaaaaacaggggattattttttgaggttgtaaccaatcacaaagttacgaaaatttgaaagcaatttacaacaaagaattacgcattgaaaatttcaaaggcgttgtaaccaatcacaaagttacgaaaatttgaaagcaatttacaactgttttgtttaaatttatttctaatcctttgttgtaaccaatcacaaagttacgaaaatttgaaagcaatttacaacccacgaaatacccgttccgataaatttcacgttgtaaccaatcacaaagttacgaaaatttgaaagcaatttacaactcaatatagttagttaaaaataaaaaaaacgttgtaaccaatcacaaagttacgaaaatttgaaagcaatttacaactgcagaagaaaaagtacaagcaccagcagagttgtaaccaatcacaaagttacgaaaatttgaaagcaatttacaacgttccatacgtcataataaattatccgattgttgtaaccaatcacaaagttacgaaaatttgaaagcaatttacaaccccgttcgtgctactgacaaaaattattctgttgtaaccaatcacaaagttacgaaaatttgaaagcaatttacaactgtaggatttgtaggaaaattttttgtcttgttgtaaccaatcacaaagttacgaaaatttgaaagcaatttacaactatatcgctagcggcatcatctctgctgacgttgtaaccaatcacaaagttacgaaaatttgaaagcaatttacaacgagtgcggaggcttgattcatcgtcaagtcgttgtaaccaatcacaaagttacgaaaatttgaaagcaatttacaacatttagtaaggacaaatgaaagtaaaacccgttgtaaccaatcacaaagttacgaaaatttgaaagcaatttacaacttctacacttagtccattaaaagtatgttcgttgtaaccaatcacaaagttacgaaaatttgaaagcaatttacaacggagatatggagattatagatttataaattgttgtaaccaatcacaaagttacgaaaatttgaaagcaatttacaacaaacattcatataatcaacgaagcggccttgttgtaaccaatcacaaagttacgaaaatttgaaagcaatttacaacggccgggacgccttctttagtcacggctgcgttgtaaccaatcacaaagttacgaaaatttgaaagcaatttacaacgaaaatcagcctgtacctatacaagattccgttgtaaccaatcacaaagttacgaaaatttgaaagcaatttacaacgatttatatcagttacacttttattttcttgttgtaaccaatcacaaagttacgaaaatttgaaagcaatttacaactaggattttaaaagaggaatttgagcggcggttgtaaccaatcacaaagttacgaaaatttgaaagcaatttacaaccccatcggctctggtaagttgtcaacaactgttgtaaccaatcacaaagttacgaaaatttgaaagcaatttacaacgaagagcaacaaaagcaattacaaattcaggttgtaaccaatcacaaagttacgaaaatttgaaagcaatttacaactatttattttcgcattaattgcgattgttggttgtaaccaatcacaaagttacgaaaatttgaaagcaatttacaacgaagcacaattagttaataaaccaacaaaagttgtaaccaatcacaaagttacgaaaatttgaaagcaatttacaactgccttatttaaaaaattactttgagcttggttgtaaccaatcacaaagttacgaaaatttgaaagcaatttacaacgaagcacaattagttaataaaccaacaaaagttgtaaccaatcacaaagttacgaaaatttgaaagcaatttacaactgccttatttaaaaaattactttgagcttggttgtaaccaatcacaaagttacgaaaatttgaaagcaatttacaacgaaatgattttctgttttttagataccccagttgtaaccaatcacaaagttacgaaaatttgaaagcaatttacaacgactttggcgtacggcaagcctgaacgtatgttgtaaccaatcacaaagttacgaaaatttgaaagcaatttacaacatgtaaaatgtgtggtaataaaaaaacacagttgtaaccaatcacaaagttacgaaaatttgaaagcaatttacaacgactttggcgtacggcaagcctgaacgtatgttgtaaccaatcacaaagttacgaaaatttgaaagcaatttacaacatgtaaaatgtgtggtaataaaaaaacacagttgtaaccaatcacaaagttacgaaaatttgaaagcaatttacaacaagtatcttaattatgacagactttttttagttgtaaccaatcacaaagttacgaaaatttgaaagcaatttacaacttacttatacgtgttctttatacactatttgttgtaaccaatcacaaagttacgaaaatttgaaagcaatttacaacaaataatatacttgcgtctatttcggatttgttgtaaccaatcacaaagttacgaaaatttgaaagcaatttacaacattcaaaattaaaggatacatttaacaatcgttgtaaccaatcacaaagttacgaaaatttgaaagcaatttacaacggaagtgctatacacgtttacgctggtaatgttgtaaccaatcacaaagttacgaaaatttgaaagcaatttacaacggaagtgctatacacgtttacgctggtaatgttgtaaccaatcacaaagttacgaaaatttgaaagcaatttacaacgccaatgatttacatcaagaacttgtgtaagttgtaaccaatcacaaagttacgaaaatttgaaagcaatttacaacgagatattaatagcaaaaaaaacaatcaacgttgtaaccaatcacaaagttacgaaaatttgaaagcaatttacaacatgtgcctcgtgcgtcttcaaatcctcgtcgttgtaaccaatcacaaagttacgaaaatttgaaagcaatttacaacccggaacttcactaacagcaagccccataagttgtaaccaatcacaaagttacgaaaatttgaaagcaatttacaactaattactctttcagattggtctttgagatgttgtaaccaatcacaaagttacgaaaatttgaaagcaatttacaacttataaactcacggcgtgagggtgtcgtatgttgtaaccaatcacaaagttacgaaaatttgaaagcaatttacaactaacaatacccgctaatgcgcacataattcgttgtaaccaatcacaaagttacgaaaatttgaaagcaatttacaactagcgaacaagaatttcgataaagaacgtggttgtaaccaatcacaaagttacgaaaatttgaaagcaatttacaaccttctttagcttctaaatattcgccttcgtgttgtaaccaatcacaaagttacgaaaatttgaaagcaatttacaactgtccgtagtttctctaattgtatgccaacgttgtaaccaatcacaaagttacgaaaatttgaaagcaatttacaactaaagaactaattgataagttaaaagaaaagttgtaaccaatcacaaagttacgaaaatttgaaagcaatttacaacattcaggagcaggataagaaacataaagaagttgtaaccaatcacaaagttacgaaaatttgaaagcaatttacaaccacgatgttctccttaccgaactgctcctcgttgtaaccaatcacaaagttacgaaaatttgaaagcaatttacaacattgggcgttgttggttctggcgaaaagtggttgtaaccaatcacaaagttacgaaaatttgaaagcaatttacaacagaaaaaaaatatggacttgcagctcccatgttgtaaccaatcacaaagttacgaaaatttgaaagcaatttacaacagaaaaaaaatatggacttgcagctcccatgttgtaaccaatcacaaagttacgaaaatttgaaagcaatttacaacctacatcttttctactcaaaaataacttacgttgtaaccaatcacaaagttacgaaaatttgaaagcaatttacaacatctccagcaggacaaaaaagcacatatttgttgtaaccaatcacaaagttacgaaaatttgaaagcaatttacaaccacgatgttctccttaccgaactgctcctcgttgtaaccaatcacaaagttacgaaaatttgaaagcaatttacaacattgggcgttgttggttctggcgaaaagtggttgtaaccaatcacaaagttacgaaaatttgaaagcaatttacaacttataaactcacggcgtgagggtgtcgtatgttgtaaccaatcacaaagttacgaaaatttgaaagcaatttacaactttattttgcattgtttttaaggcgttttggttgtaaccaatcacaaagttacgaaaatttgaaagcaatttacaaccacgatgttctccttaccgaactgctcctcgttgtaaccaatcacaaagttacgaaaatttgaaagccgttacaataatttttgtcaatctacaaatactttatatcttcgcgtagttttggtggggaatttgtattttcgttaaaaataatcggaaaggcacaaatttaaaaaatgtagaaaaatgtattcaacaactaaggcaattgtaatttcagctttgaaatatggagataatagcttgatagttaaatgttttaccgaagatttgggtgttcgttcgtacttgcttcaaggcgttttatcctcaaaaaaaacaacattaaaaccagctctttttcagccttttatgcaactggaattggtggtaagtaacagaaacacagcctctttggaacgcatcaaggaagcaaaagtaaccaaagtttatcagtccatacacacagatatttacaaaagttccgtaacaatgctcttagccgaaatttgttcttttgcctgtgctaatgagtatgcagaacctgatttgtatcaatttttagaggaaaaattatgtttttttgatgaaaatgatttcttgcccaactttcatttaaaatttttgattgatttaacacgatttttaggattttatcccgatacttccaatgaggataatttatttttcagtttggaggaaggaactttcagtcattccgatgaaacaaaacattctatttcgggcaaagaacttattttttttaaaaatattatttcttgtgaatattctgatttatatgaaattaaatcttcaaaaaatgaaagaaatattcttttaaatcatcttttaaaatattatcagtggcactttcccggttttagaaagccaaaatctttggaagttttgcaagttttattttgatttgaagttctttcaaaaaaatccttcttagtcagcaaattcaaaaagtttaatactaaaaatagcttaaaattttatatagttcattttttaatcttaactttgccagttgagaggtgaatttttcggatattggattttcagctgattttctgatgtttgtaatttttcagctttatatttaaattttttaaatgttaattcgaatatgaatatattaatcaaatctgcaaaaattttagataaactaagtgctttccataaaactactaaagatattttaatttctgatggaattattacaaaaatttcagatgccattacagctgaaaatgtagataaaatcattgaaaatgtgtatgtttcgcaaggttgggcggatagtagcgtttgttttggtgagccgggatttgaagaacgagaaactctggaaaatggaatgaaaacagccgaaaaaagcggttttacgcacgtgcttgttaatccattaacgaatccggtgacagacacaaaggcttccgtattgtatatcaagaatcaaacgaaaaattttgcagcaacagcacaccccatcggagctttgacagagcaaagtaaaggagaggctttggctgaattattcgatatgaaaagtggtggagctgtggcttttggcgattataaaaaagcaatagcaaataataatttattgaaaatagcgttgcaatatgtacagaatttcggaggaatagtaatttctttccccaatgattcaaaaataatgggaaaaggagttgttaatgagcatatttccgcaaccaaattagggctaaagggaattcctgccttagccgaagaactttgcgttgctcgtgatttggcggtattggaatatacgggcggtaagttgcacattccaaccatttcaacggcgaaatctgtggaattgattcgtgaagcaaagaacaaaggacttgatgtaacttgcagtgttgcagttcataatattcattttactgatgagattttggacggatttgataccaattttaaagtattaccgccattacgtgataaagaaaatgttgaagccttacgtaaagctctgaaagaaggagtgattgactttgtgacttccgaccataatccgttagatattgaattgaaattcaaggagtttgattatgcatcatttggtactatcggtttggaaaatgtttttggtattgtaaatcagtatgttgatttggaaacaacagtagaattactgacttctgcccgcaagcgatttggaataaaaacggagccaatttcagagaatattcaagcggatttaacgctattcactccggaaagaaattatgtatttgaaaaagaaaatatcttatcaacttcaaaaaattcggcttttatcggagaaactttaaaaggaaaagttgttggaattatagctaataatcagtttgttatgaatgattaatttttcaaaatgtgaatttataaatcgttgtaaaattctgattataagcaattaatctttgtaagtaaaaataataaaatagagaacaaaaatatggaaacaaacaactctttaccattaaggtatgttatgcgtgaacctttggtgaaagtcaagcgttcgccggttatttttatgcttcacggctatggaagcaatgaagaagatttattttcttttgcgggagaattaccgaaagaatatacaatcatctcattaagagctccgtacaggcttcctgagtttggatatgcttggtattcaatcaattttgatgaggaacaagataggtggagcaataatgagcaagctataaaatcacgtgatttggtggtagatttcatcgatgaagcgtgcaaattgtttaatttggatacgaaaaatattactttgttgggattcagccaaggaagcattctcagtatgtcaattgcaatttcatatcctcgtaaaatacggaatgtgatagctttaagcggatatttaaatacagaaattttgaaagaggactacaatgaggagaatcattctgctttgcatttttatgtttcgcacggcacaagcgatcaagtaattccgattgaatgggcaagaaaaactccggaatttttaaaaaacttaggaattgagtgcgtgtatgaggaatttcctgttggtcacggagtggctccacagaatttctattcctttagaaattggctttcaaataattaaaaatataaaaatttagtgctatattgaaaattttgatgagaaatttcaaacaaaacctttaaaattatgcgaggtgtaataaaatcaaaatacgatattttaaaacaacaggcgtacgttatcatttatggtacaaatacgcctttgggtaagctttttgatattgttctgctgatacttattttcctcagtgtaattatggtaatgcttgaaactgtgaaagatatagaccatcaagctcacggaattttagtgtttttagagtggttcatcacagttttctttacacttgaatacattttgagaattatttctaacagaaaaccgttacaatacatatttagtttttacggaataatcgacttgatttctattctaccgatgtacttatcgttttttattcccggttcaaaagctctttcagtggttcgggctttgcgtctgttgcgtgtttttcgtattttggaactcgcaaactttatgaatcaaggggaagaattaaaaatggcactgcgaaccagccgaaccaaaataatggtttttatctattttgttttggtgatttgtattttgttaggttctttaatgtatgttattgaaagtgaggaaagtggatttaccagcattcctcgaagtatctattggtgtatagttaccttaaccacagtgggttacggagatattgctccggcaacgacactcggacaaatggtagcttcgtttgtaatggttttgggatatggtatcattgccgttccaacgggaattgtcacagctgaatattcacgagtaaaaaggaaaaattttgatgttagggaaagcgaggaataccaaaaagaacaagatgtaaacgcagttgtttgcccgaattgcagcaatgaaaatcatcaggaaggagctaaattttgctgcaaatgtggagttttattaggaagagaaaaagatgatagaagaacataacaatttgttaataactgttgtaggtcctaccgctattggcaaaacgcgtttggcaa

SEQ ID NO: 2102 - DNA, 24344 bp, synthetic construct
  source 1..24344: mol_type = other DNA
  misc_feature 1..24344: note = Synthetic
aattttcttctattggtaatattgttggcaggttgtaataaagccgatgacccggcaggtttgataattgatgtttcccagcaatggagttttgatgaacagggttatcctatagttggtctgcttgatggtcagtggcagtcaaaaacctttaataaagcggagatttcattgttcaatagtattgatacggctgaccttcaaaacacaagcacaccagcttcggtgtcagacaatccaccgggtagaaacgcttgctttcccaatccatttaaggatacacatgccttgtatgttggatttaatagtgatttctctagcgaagtagttgtcaaggcagtaattgtagatagtacaatgacggccaaatcaaagctggtatcccgacttaaaggacaaaacggaacattatttaaacccaatatacctgccggcaaatatcgcttgtattattccttgagttctgcggctaacccacatttttataggacctggggcaatatttataaaaaagattaagccttccgatcctactgaacccgcaactaatatctttttcagtatgtctgggtttaacaaatttttttgaagactattctatcctcaccatcgggtatgccttagattttagaataccttctgctctacctgaaatttcagctaccattgaatctgttgttattttagtgtaagaaatgatctgcggaaaatcatgttgatcattgtggaaaaccattttttcatttgtaataatggtggccgtgaagattacaggctgttcatcattttggtattttacctttggtatatataataggctgtcattttgttctgttaaatgtatcgtttcgaacactattgtatcaccttccttgaccgtatagctcatgccgacaagcgagttctcgctttcttttttccagctttcgtatattgctccatccgtagaagtatgtttccaagtacctgtcagccatgcaactttcgaaagttttcctgaaggtaaaaccagacacaaacaagtgaaaatcaaatatcgcattagactctttactgcaaataattattacttcaaatccattgcaaaagctcaaaatcacagtttattatgcttttatcactttttcattgattttttgtactaatcattttcgttgaaattaattttgtgtaagctggggtaaagataagcagcagtatttgattatttcggtaagatcaagataaaagtacagtactttggtctgttgttaataatattttatatgggtagtgttaacatccaaagctgtaaccatacattatatgtggtatgttcaataataaaatcttttaagttttaaaaactgcttttcgaacaaatgatatgaagcgctgctgataatacaggtgatgataagggagatcaacgtaaggatacaccagctaatgatagaatagggcttaaaaatatggagtgccagcagcagtactatagtatggtataaatataaaccataggtatatttgcccaatctgctataccacaaatcgtcttgaatataaatgttgtttttgcttaaggtgaaaagaatgagtgtagagaacagcaggcagaaaagagttggtgcccaaaaatacgcagtatcaaggtctgcaacattcggaataatgaaaacaaaacatgttgtaagcaatagaaaggtgtgttttgtcaaaacaggtattttgtcgatggctaccataaacttatttttaaataaaagtatatatgccggtaacgctccgaatgcaaaatagtcgaaatttgaaaacacatcgagatgttttataccaactgtgctgtatataggtcttgcgatgttggcaatgacaattgctgcgaaaatgagtaggggaacattttttactgaaatgaaatagagcaatattccccaaagcaaataaaaatgttcttctatacagagtgtccacatgatccttaatggtgctccgtcaggaaatgtgtcggttagcatcattctgtaattttcgacaaacagcatcgatacaaggagattcggcttgtaaccattgttggcagaattaataccaaagagttgaagtaaatatggtgacagaaaggcgaatgctatcatgagataaaacaaaggccagatgcgcaatatacggcggataaaaaattttttgaatgaaatggtctgccggtttttcttttcgtacaataaaatataagtaatcagaaagccactcaacacaaagaaaaagctgaccccaatgcctccgcttttgagaaaaaaatcaatccaaatattaccggttttgggtaaatgatgcaagaaaaccaagaggaaggaagaaaacctcagagcatcgaatgtatggaaatgttgtctgcccatgttgtggttttattggattgtcataattattatgtcaaaacgaatccggccggtactatacatatttccaaagataagaaatatttttctataatatgatggcttatttaacactatttaacattaatttggtcaaatgtccggttttcttaaagtagattaagcaaaaacacttttgtatcggcctaactttgcagtaaattatttaatcaaccataaaacaataaacacgaaagatgaaaaaattagttttattatttgctgtatcgggtctttttcttacatcatgcgttgacaatccgcagggcgataaggctgctactactgaagcacagcaggcaccatctgatgctagcggaatggcttacacactaaatccacaggaatcaactctacgctgggaaggtcgcaaagtatccgctacacaccatggtacagttcagtttaagtcaggcaaagtacagatgtcaggtaatcaactcaccggtggcgaattcgcagctgatatgggcaccttagtgaacgaagaccttcagggcgagtggaatactaaactagtaacacaccttaagggagctgacttctttgatatcgaaaaacatccggaagctacatttcagataacaggagtaaagccgggcagcagtccgaatcaggtagtagtgtctggtaaccttgtgataagaggtgtttcgaaaaatattactttcaatgctgatgtagtagaggctggtgacaagaaagtacagataaaggctgatttcaacattgctagagaagactggggaattacttacactggtatggccgatgacctgatatcaaaggaaatcaacttcaaaatcaacattgtggcatacgcctaaatctaatggacacaatataattctataaaagggaaggcctgtgctttcccttttttgttgcgtgagcggtttgtcagtacctgatattgacgaatatttacacagaattaacctaattctattttgactgtactaaaatattgcagataaaaattttgttggtttggaaaaattattaattttaccgattaatcattaaaaccaacaatatgaatatccttaagaagattctcatcgctattgctattctaatagctgctgtactgctcgctgcattatttattaaaaaagattatgcggtagaaaagcagatagtcatcaataagccaaaacagacggtattcgattatatcaaactgttaaagaatcaagacaactacagtaagtgggcaatgatggaccccaacatgaccaaaacttatcgcggcacggatggcactgtcggattcgtatctgcctgggacagcaaacaggaaaatgtaggtgcaggtgagcaggaaatcaaaaaaatcatagaaggcgaaagaatagatctggcactcaggttcaccaaaccattcgaagcgcatgacgatgcctatttggtaacagaggctgtgaatgacagcaccacgaatgtcaagtggggctttacaggcgccttcccttatccgatgaatgtgatgaacctgttcatggatatggaaaaagctgtaggcggcgatctgcagaccggccttgaaaatcttaaaaaagtacttgaaaaatagtcttattgatactgaaatacgctgaatattttagtcatcagcttcacttttgatgaatggcagcgaacacaatttcattcaaacaaaaacaaacacaattataaaatggtaagaacttctgtaaaaatagatgcctggatagcctctgatatcaaaaaagtgtgggactgttggacaaaaccggaacacataacaaagtggaattttgcatctgaagactggtactgcccctcagcgtccaatgagttaaccgttggtggtaaatatactgccagaatggaggcacgtgacggtagcttcggttttgacttcgaagcaatatatgatgagatagtcgaacacaataaaattagctacactatgcccgatggcagaaaggtgactacaacatttgaagcagataatggcgcaacaaatgtgacaacagtctttgatgctgaaagtatgaatccggtagaaatgcagcaggcagggtggcaggccatactcaataattttaaaaagtatgttgaagcaaactgaacccttggtctattttacttgcataaaggctgcttttttggggaaaattaatgttaagcacgttaacagaattcattaacaacaatcataatctacgatggtaaaaatcaatccatacatcaattttaacggtaatgctgaagaggcatttaatttttataaatcagtttttggtggagagttcagcgctttagtgcggtttaaggatatggaaataccgggctttgatgtaccggagcacgaggccgataagatcatgcacattgccttgccaataggcggcaatgaactacttgctaatgatgtgccggagatgatgggccgggtaaatgaacacgaaaaccgcagcaagatagccgtgagtgttagtagccgcgaagaagccgaccaaatatacgccggactcaccgtaggtgctgatatagaaatgcccattggcgatagcccctggggaggatattttgccatgttcagagatcggtatggtatcgaatggaccattgactacgacccgtggaaataaacgcgcatattgtattcacggcttgatgtcaggatggtttatattagaattctgtagaaataagattgttgtgttacaaattgcgtttggtagccattatttttatttaaaaatttaagtattcgccctaagaatgatgaaaaatataaagaattccctgatttgggttgtctgtagcttcgtagcagtatccatttcagcttgcacattcacctcccatacatctctgacaaaaaataatataaatatggaaaatattccttcagaagatcaaactacaccaaaagtaaccggcattggtggcatattctttttctccgaaaatcctgaaacaaccagaaattggtatgcaaagcatctgggtcttgaagtgaatgagtggggctcatcatttgagtttaggaatgcacaccgcccggaagaaatcaactacctgcagtggagtcctttcaaaaaaggcagtgactattttgcgccttcaaagaaggaatttatgatcaactaccgcgtgcagaatatagaaggcctggtagctaaactcaaggctgatggtgtcactgtcgtggacagcatcgagacattcgagtacggaaaattcgtccatattatggatgcagagggcaataaaattgaactatgggaaccggtggacagcgtactgacaaaacttggaacgaagacgaccaaatgatattgcacggccattgtcacagcatttatttatataagtattcaaccaacacagtgaatgatagaagtaagaaacctaaggaaaaattacggtaagctcgaagcactcaagggaatatcattttctatcgatgaaggtgaattctacggtctgctcgggcccaacggtgcaggcaaaacgaccaccatctccattatgagctccatactcgtgccggatggtggagaagtgagcatcaatggtaagaatatctacacacatagccgcgagagtaaacagataattggtgtagtgccacaggaaatagcactgtacagtgatttttcggcaatggaaaacctgatattctggggcggactctatggtgtgcctgataatgagctaaaaagacgtgccaaagaactcctgcaaatggtcggcctgtcggatagggcaaacgataaggtaagcagctactctggcggtatgaaacgccgtatcaatatagcggcagcattattgcaccggcctaaggttctgtttatggacgaacccacggtgggcatcgatccacagagccgcaacctgatatttgaagtgctcgaaaaactgcaccacaatgggatgaccttcatttatacaacgcattatatggaagaggccgaacgtttttgcgaccgcataggcatcatcgaccatggacagattatagcacagggcaagcttgacgaactgaggaatgcaaatggtacaaaagatgccatagccatcacactcaatcatgccgacgaacgccaaatcagtgctttgcagacattctggttcgattcgaaggtggcagacatgaatctttatttttattcacaagatgtaaaaactgaccttccgctcatcatcagaaaatgcagtgaagctgaaacagacatccggagtatagaaatacagaagacaaacctcgaaaccatttttcttaacctgaccggaagacaattaagagactgaccatgataaaaatagccataaaagacctaatgcagttttttaagcaaaagcgtaccatgctgctaacatttctgctgcccattgtgctcataacgctcttcgcatttgccttcggtggtataggtggtggaagcggcgattcaagaatttcactacagattagcgatcttgaccaaacccaaacctcgaagaaggcagctgtgctttttgattcgctcaaaggccttgaaataaagcccactgagttaggtattgcacaggataacatcaagaaaggcaaagaatcattcgtattgatattcaaaaaaggatttgcagattctgtcaatgccgggtataatccaccactggagctccagtatgatgaagcaaaggaaactgaggtcggattgctccaacaatcactcattcctaccatagctatgatgccattcagccttggcgatccaaagactaccatggcgaacagattcaataacatggcaggcacaaaggacaatacagaacgagccatcatcaaggagaggtcagataaactgtttgatgatctttctgccgccatgtccagaagcaactcttcaggtggttcggcagctgattttctgggtggaaatatcaagatgaccaaacttatagccgccaacaatgacaatgagcttggcctcattcaggcagtagcaggtactgcagtgatgatgctgttgttctcggtagttggtatcgggtctggattgttagacgaaaagcaggaagggacattaaaaaggctcttatacgcgcccatcaatccgttgaatatactttttggtaagatgatttcggccaatgtcatctctattctccagctgttggttatgtttgtgtttgctgcgctgtgttttgggctcagccttacagagcatttgcccggcacacttataacgatagctgctactgcttttgcttgtagtgcatttggagttttccttgcttcatttgccaaaactcgccagcaggtgcaaggcctatctaccatggtagtactcgttatgagtgccataggtggtagcatgatgcccctgttctttatgccggcacttatgcaaaaagctgctgtattatcggtcaattattggagcatacagattttttatgatgttttttggcgtaatctatccataactgacccatcttttttgaaaaaaatcgtagtattagtattcattggccttatattgaatgcactggcagttatcatgttcagaaaaaatattctgaagctcagccgaggcaattttttttaaatccgcgaatgcttaatcttgcagacgaaagtaagccgaaaataaaaaaattaaaatgaaaataattgtcactacgccaagattgtacctacgcgaactcgaacatgacgatgttgaagacttattcgaaatggatgctgaccctgctgtacatcggtacatcgaaaacaaaccggttcaaacaagagatgagataagtagagtcatcagtatgctcaaagagcaatacagggcattcggcatagcaagatgggcagttattgataaagtgaacaatgaatgtattgggtgggcaggtttgaaatattttaatgaacctatcaataaccactgcaatatctatgaacttgggtacagattcaagcaaaagcattggggcaaaggatttgcaacagaatctgcaggagctgttctcaaatatggctttaacattttgggtttagaaacaatctatgctattacccatcccgacaacgacaactctaagagagtattgacaaaacttggttttgaatataaagaaagatttgactacgatggcgaccctacagactggtttgtactgcagaaacaaaactgtacttcctgctcgcccgaataatgcaaaacaagtatagcccaccatttttccgggtttaagccgacgcagagtaatggagcttataactatttgcagtaaaagagaataatttctaagccgggcttatcgggctaaaaatgtcttgtgcagatacagaataaacattatatagtcagctgaatgccatcatcttcctgacaaacatctgaatatgccggacagaatgcccctgacagatgacaactccagtcaggggtacctgtatcctgccaacatactacgtaatgtactatttcttttttgaaaaatactcaacgaatgacgggtttgagtctttgcttaatatcttgctaaaattccttctggccatcctgtcttctgcaaacatagttgagatgccttcacttgttttggcaaatgccagcgtgttgttgatggcaagagatgaagcaattttttctacatcatgatccgtacccatgtaggtgaaagtccatttgttttctttcagcctttctactagatttttgatgtcgttgcctgagtattcacgtgaagcattttcttcaccgtcggtaaggattgtcaccaagacattgtagtcagtttttcctttcaggtgatcctccatcttagtaagggcaagacccatagcatcaaacaaaggtgtagaagcatcaggcttgtaagtctcgttgttgattgcatgtagcttatcggccttatcggcaaaatgcagaattttggtgcctaagccgttaaatgtgaaaaacgagatgaaatgttcctgattcgggaactctctactgatgccttggatggtctgcaccagctcattgaagccgctcatgatgatagattggatagagttcatagaaccgctttcgtccagaatgatcaggttatgtacctgatgtggggttgcattcatatttgtaaaatttttagatacagttttttttgtttttagcaatagaatagatgctgaaaaccataatggtattacacagtaagtattacttcggggtaataatgatgaagcaatgaaaaaagtcagatatgattatgtatcaaatacagtacaaaactgcgcgtctgacaggcattgtcggttttgcatcttcggttttggctgctggtatgcagaaatatgataatatgacaatgcggagcagaaataagttccacaagcaaggattttttttagagaaacaggagtatgccaggaaaaaaataaaggtatgtaaaaaaaatgctccctgattatggacaaggagcaacccaaatgtttccacaacggaataatccttattgtgaattgctttcatttgatgcaaaattaaaagatttcatcataaaaagcaagagagtttaacttttcttttccgtacggttgacttttaaagtattttgttgctatatttatgggcataaaaaaatggagcataatgaaaagaaatattttagggcttgatttagggacgaatagtattgggtgggcttatgttaaggaaggtgagagtcctgagcaatcctctattgaacagattggtgttcgtgttaatcctctaaccgttgatgaacaaactaattttgagaaaggcaaaccactaactacaaatgctgatagaacactaaaacgaggtgcaagacgaaatttagaccgctttaaactaagacgtgaacaattgctggagattttaaaggcttcaaaaattattaatgcggaaacaaaattaaccgaagttggtgctaataccacacactcaacttggaagttaagagcaaatgctgctatcgaaaaaattgaattggatgagtttgccagagtgctttttgctattaattcaaaaagaggttataaaagcagccgtaaagccaaaaatgaagatgagggacaagccattgacggcatggcaattgcaaaacgattgtatgaagaaaatcttactccgggacaattgacctatcaattattacaaaaagggaaaatgaccattccagatttttatagatctgatttgcaaactgagtttgataaagtttgggcaatacaaaagcaaacccattctgacattcttaccgatgaattttataaagaattacaaggtaaagggcaaagggctactgctgctttgttttggacaaaacataaatttaatactgccgatataaaggacttagaagatagcttaaaaaacgaaaaaaccatcaagctgtccaaccgggagaagaaaagattgcaggcatatagatggagaagtgatgctgtttccatcccattagaaaaagaacaaatggcttatgtgcttaccgaaataaacaacaacctcaataattcaagtggttatttgggagctatatccgacagaagcaaagagttatactttaataaagaaaccataggtcagtatttatatcatcagctcaagaaaaacccacacagcagtttaaagaatcaggttttttataggcaggattatttagatgaatttgaaaaaatatgggaaacccaggctcaatatcacccacaattgactaaggaactaaaagaagagataagggatgtgattattttttaccaacgaaaattaaaatctcaaaagggattgataagtttctgtgagttggaaagtaaagaaatagaattaaataaaaacggacaaatagtaaaaaagaccattgggtttcgagttgtaccaaaatcatcacctttatttcaggaatttaagatctggcagatgctccataatgttattatccgtagaaaaggcgcatcaaagaagcggtcaagcaaaaatagttctcaacaagtgttgttcgctgatgaaaatgaatttgttttcgaccaagaagccaagcaaatattatttgatgaattgaacctgaaagggaaccttactgcctctgctgtcattgaacttttaggctataaagccaatgaatgggaaatgaattataccaccttagaaggcaatagaacacaacaatccttatatgaagcctacttaaaaattattgaaatatcggggcatgatttacgagattttttaaaaattaaatcaaacaaagacgaaatagagttaaaagatatagatgtatcggcagccggaataaaaaaagtagtaaaagatattttttcaactattggtattaatactgctatactggattttgatgctatgctggaaggtaaggcttttgaacaacaagcttcttatcaattatggcatttgttgtacgcttacgaaggcgacaattctacctcgggtaatgaaacactatataagcttttacaagaaaaatttggctttagcaaggagtatgccagcgtgttggctaatattaatttgcagaacgattacgggaatttatcagccaaagccatgcgccaaatatttcctcaaataaaggaaaagaaatttagtgaggcttgtgagttagccggctaccgccattccaaacattcgcttactaaagaggaattagaaaacagaaagctgaatgatacattggatttgctcccaaaaaacagtttgcgaaatccggtggttgaaaaaatattgaatcaaatgattaatgtagtgaatactttaatcctcaaaaattcggagaaagatgctgatggcaacataaccaagtatttccattttgatgaaattaggatagaattggcacgtgaactaaagaaaaatgccaaagaaagagcggagatgaccagcaatattaatgctgcaaaaattgaacgcgaaaaaattgtaaaactattgcaaaaggaatttggtgttgccaatcctacccgcaacgatattatccgctaccgcttatacgaagaactgaaaaacacggggtacaaagatctatataccgacacctacattcccaaggagttgctatttagcaaacaaattgacatcgaacatatcattccccagtcacggctttttgatgacagcttttccaacaaaactgtagtgtatagaaaggataatttagataaaggcaatcaaactgcttttgattacattgatagaaaatttggagcagcgggcttaaccgcttaccaaacaagagtggaagaattatttaaaacaaaagttatcactaaagccaagtacaaaaaattattaatgcccgaatccgaaattggcgatggatttatagaaagagatttaagagacagccagtatatagctaaaaaagcaaaagaaatattatttaccataaccaaagcagtagtatccacctccggtcaaataaccgatcgacttagagaagattggggcttaatgaatgtgatgaaagaactgaatttgccaaagtatagggcattaggacttaccgagatggaagagagaaaatatgggcagaaagtagaagtaataaaagattggacaaaaagaaacgaccatcgccaccatgccatggatgctttaacggtagcttttaccaaacatagctatattcaatacctcaattacttgaatgccagaaaaaacgagaaacacaaattgcatggaaatattattggcattgaaacaaaggaaaccgaattgcagatagacgacaatggagataaaaaacgagtgtttaagcagccctttcctaatttcaggcaggtggcaaaggagcatttagagcatgtgattatttctcacaaagccaaaaataaagttgtaagtaagggaaaaaacaagatagtcggtaaacaaaccgtacagcaaacacttacgccacgaggacaactacacaaagaaacggtgtatggacgctaccaatattacgaacaaaaagaagtaaaaataactgcttcgtttgataaagaaatggcacaaaaggtatccaatcctcttttcagaaaattgttattagataggttggaagctaataacaacgaccccaaaaaagcctttgtcggcaaaaatgcattaagtaaacaacccatttatttagatgaatctaaaacctctactttgcctgaaacggttaagatggtatggcttgaggaagatttttcgattcgcaaggatataactcctgaaaattttaaggatgaaaaaacaattgacaaagtattagaccaaggggttaaacgattgcttaaagccagactaaatgcttatggtggcgatgctaaaaaagctttttctgatttagagaaaaatccaatttggctaaacaaggaaaaaggtatttctataaagcgggtaaccattagtggggttaataatgccgaagccttgcatttcaaaaagaatcactttggagaatttattttagacagcaatgggaaaaaaataccggtagattttgtaagcaccggcaataatcatcacattgccatttacatggatcaaaatggtgtactccaagaacaagctgtttcattttatgaagccgtagctcgcgtcaatcagggtctccctgtcatagataaagaatataaccacgaccttggatggcattttttattctcaatgaagcaaaatgagctctttgttttccccaatgaaaaaactggatttaatccggcagagatggatttgcttgaccccaaaaacagaaaactgataagtccgaatttgtttagagtacagaaaattgcaacaagagattatgttttcagacatcatcttgaaacaaccgttgaaaatgtaaatgaattaaaggaaactacatggaaaagagtaggggtaaatggaataagccaaatagtaaaagtacgcacaaatcatcttggagacattatttgggtaggagaatattaaaaaaatgacaggtaaccctgtatcgaaattggaaagcctgcaggtcggaaatgaaaaatttgtaaaaaatgattacatataaaatgtaacaatatataatatgctgtagttaaatagtttataacaattaagctattagttatggtaaagcgtactttgcattttagcaatccggcacacctgagtgtgcaaaacagccagctgatagtagagctgaaggatgaaggccgtacccggcacaccgtacccatcatggatcttggcatggtagtgctcgaaaacccgcagataaccatatcatctgcagtattagaggcatttatggaagagaatgtggcactcatatcctgcaatagcaagtatatgcccagcggtatgtttctgccatttgatgccaatactacccagaccaaggttatgacaacacaggtggaggcaagcatgccgcttaaaaaacaactttggcagcagaccgtaaaggccaagatagccaaccaggcgatattgctcgataagctaaacctaaatagcaggcgactgcatgtactcaaagagcaggtactgagtggcgatactaccaactgcgaagcacaggcagccggacattattggaaccaactctacggtactgaatttatacgatcgcaggagcgcgatacgcccaatgcccagctcaattatggctatgccatacttcgttcggtgatagcccgtgcacttgccgctaccggtctgcatccgtcactcggcctttttcataagaacaagtacaatgctttctgcctggcagacgacatcatggagccatacagaccttatgttgactggctggtgtttgggttgataaagcaacatccatcagatggcctcacccgggagcagaagatagaattattaaaactgccacagatagatgtaaccatcggcaagattacacggcccctctttcatgctgtgagtatgaccaccgccggactcaatcgttgtttcgccggcgatatcagaaaaattcccttccccgtgttcaaataacctcgccaatggatagtttgcgatttaatgcttatagaaacatgtggatattcgtattatttgacctgccgactgagaccaaaaaagagcggagcgatgcagccaaatttcgtaaagaattgctggagcgcggcttcaatatgttccagttctcgatttaccttcgtttttgccaaagcatggaaaatgccgaaacgcataaaaaatatgtaaagagcatactacccgaaaagggcaaggtaggtgtgctcaccatcaccgacaaacagtttggctgtatggagttatttttcggtactaaaaaagaatctgtaacaccaccaccacagcaattgacgcttttttagagctgtcagaaaaataaaaataaaaaaataccggaacaaaaatcagcttgggttctgtttttcaattcctgaacaacagaacccaaagccttacaaacagtacgtttcaaccctgtgacgctgtttgtgaatccaaaattaaaagaactttttgataaatgaaagcaattcacaactcaggagagtctggcatgtttaatcgttttgctgtttgtgaatccaaaattaaaagaactttttgataaatgaaagcaattcacaacagggctgtttatattgcaaaatggggctgtgctgtttgtgaatccaaaattaaaagaactttttgataaatgaaagcaattcacaaccatgaccgtgatggtatctggtatgtcgccgctgtttgtgaatccaaaattaaaagaactttttgataaatgaaagcaattcacaacaaacaaacctcaacgcaatcaacctccttagctgtttgtgaatccaaaattaaaagaactttttgataaatgaaagcaattcacaacgattagacaaactgacactgttaagtgatcgctgtttgtgaatccaaaattaaaagaactttttgataaatgaaagcaattcacaacatgtttttcaacggagatttatggtaccaagctgtttgtgaatccaaaattaaaagaactttttgataaatgaaagcaattcacaactgtatcacacattacggttattagtcctacgctgtttgtgaatccaaaattaaaagaactttttgataaatgaaagcaattcacaacaaagacgttccttgcttggacaacggatgcgctgtttgtgaatccaaaattaaaagaactttttgataaatgaaagcaattcacaacctccttagcaaacttaactgttcagctaaagctgtttgtgaatccaaaattaaaagaactttttgataaatgaaagcaattcacaacactgcggcggaacgaccacgctcaggatggctgtttgtgaatccaaaattaaaagaactttttgataaatgaaagcaattcacaactccccatcttgtctgccatcgccatcatctgctgtttgtgaatccaaaattaaaagaactttttgataaatgaaagcaattcacaactatgtgtgcaggttgatgtgtttggcgagtgctgtttgtgaatccaaaattaaaagaactttttgataaatgaaagcaattcacaactacgaacttcgacatatacaaggctgacgcgctgtttgtgaatccaaaattaaaagaactttttgataaatgaaagcaattcacaacgaatataattatattacaattaaacagtttgctgtttgtgaatccaaaattaaaagaactttttgataaatgaaagcaattcacaacaaacaaacttttttccaaatacttcacaaggctgtttgtgaatccaaaattaaaagaactttttgataaatgaaagcaattcacaactgacacaggagcaggaactgttgaaggcgagctgtttgtgaatccaaaattaaaagaactttttgataaatgaaagcaattcacaacgggtttcaaaataactttcagtttgttggtgctgtttgtgaatccaaaattaaaagaactttttgataaatgaaagcaattcacaacaccggtattttgccctttgctcggaaatggctgtttgtgaatccaaaattaaaagaactttttgataaatgaaagcaattcacaacgatccaataaaggatttacgattgcttcttgctgtttgtgaatccaaaattaaaagaactttttgataaatgaaagcaattcacaacctgtgtgttggattgcaatgccgattttttgctgtttgtgaatccaaaattaaaagaactttttgataaatgaaagcaattcacaaccgcagggtcgtacagcaacagcttcatctggctgtttgtgaatccaaaattaaaagaactttttgataaatgaaagcaattcacaactctatattcactcattgaaccatttattttgctgtttgtgaatccaaaattaaaagaactttttgataaatgaaagcaattcacaacaatgataaaccgtttcaggtctttgtgaatgctgtttgtgaatccaaaattaaaagaactttttgataaatgaaagcaattcacaactcaagcgaagttcttgtgtttaattcctttgctgtttgtgaatccaaaattaaaagaactttttgataaatgaaagcaattcacaactatcggcagttaaatgcgcagttggttgtagctgtttgtgaatccaaaattaaaagaactttttgataaatgaaagcaattcacaactgccgcctcgcagttcaattgtaggagtgcgctgtttgtgaatccaaaattaaaagaactttttgataaatgaaagcaattcacaacttgcgcctgtgccgcctgttacatcgcctggctgtttgtgaatccaaaattaaaagaactttttgataaatgaaagcaattcacaaccatcggcagcgtataatgcttcgcttgcgggctgtttgtgaatccaaaattaaaagaactttttgataaatgaaagcaattcacaactcgtgaatcgggagcgatagagcaggatgcgctgtttgtgaatccaaaattaaaagaactttttgataaatgaaagcaattcacaaccctgcggcggaacgaccacgctcaggatgcgctgtttgtgaatccaaaattaaaagaactttttgataaatgaaagcaattcacaacaggcatcatctacgcttgcaggtcacgtcagctgtttgtgaatccaaaattaaaagaactttttgataaatgaaagcaattcacaacgattaattacgttaccaacattgcggacggctgtttgtgaatccaaaattaaaagaactttttgataaatgaaagcaattcacaactacgcaggccttcaccttcgtggacgactagctgtttgtgaatccaaaattaaaagaactttttgataaatgaaagcaattcacaacggatgacctctgcgtttcgttgatccacgagctgtttgtgaatccaaaattaaaagaactttttgataaatgaaagcaattcacaacgtgcggcatcacgcaaggacacggaaacatgctgtttgtgaatccaaaattaaaagaactttttgataaatgaaagcaattcacaacctgtacttcgtgttttgaagtacgtgagaagctgtttgtgaatccaaaattaaaagaactttttgataaatgaaagcaattcacaacaggggcaaagatgtattttattagaaacgggctgtttgtgaatccaaaattaaaagaactttttgataaatgaaagcaattcacaacacaatggtgttgtcaccaatgcgaaacttggctgtttgtgaatccaaaattaaaagaactttttgataaatgaaagcaattcacaacacgtgttacgacataagaaccttcacgcaagctgtttgtgaatccaaaattaaaagaactttttgataaatgaaagcaattcacaacgcaaagacaggatgttaagaagtacttattgctgtttgtgaatccaaaattaaaagaactttttgataaatgaaagcaattcacaaccatatcttaccgatacccgtattgattctggctgtttgtgaatccaaaattaaaagaactttttgataaatgaaagcaattcacaacttgcaattcagaccatttgccggccgatgaagcaacttgggcaattgtatcgtctcaccggcgtatctgaatttttgaatccggtagccactattcctctgcctttgattatgcattattctcggcattaaccttgtcttaacacatcgtatagccatatttcaggtctttgaacgtaaaataccataattttgtccgtaattataaaccaatacttttgtttatgaaaaagattaaatttcttgttctgctttgctttgtcacttctattacattcgcccaacagacaaagctggctaccatacgctatgacatcgttagggagactggcatacccggtcgcaaggctgctgaaggtacagagaaactgtccaataccatcacggaagaccgttttgtgtatttcaaggatacgctcgcttattacgaacgcacaaaaggcggaggcaaaatgtttaaaaaccagccgggcgttaagttcaaactgccatttgaagaatatactttcacggatatgaaaaatcataaagagattatctctctgacagtactgaatgaatctaatgaaatgtattactcggtagaggcgctgcccagaccaaaatcgtggaaagataccggcaaaacccagaaaatgcttggattgaaatgctataacgccaaggtcgtgaatgaaatgggtgaatacgatatctggtacaccaaggaactggattttaacttctctcctctacccggcatacagcctgccaaaggtcttgtattgaagatcgaaggcccacaggtatattacaatgcacgaataattgaaaagaagctcgataatccgggcgtttttaacaaaatttacaaaggcgaacaggtgaccaaagaagatttgcttaaggtaagaagtcattcgtcgggcaaactacggcctgcaaaatcaaaataattaaaccttaattcagtctgaacgtttttgcctttatgaaaaaattaattgtactttgcctcatggcttttgtaactacgaatgtcattgcccaaaaccaagataaaactaccattctcgatgcgcagacaggcgaacctttggcacttgtactcggcggccttctcaatccggttgatagcaccatcatccgtgccattcaggctgatgacaacggtgtcattcaccataatgctaccgaaaaaacagatgtcatcatccagatgaaatatcttggttatgacacgtattctatgtttttggcaaaagacacaccatggcctgctaccatccggctcaacaaatcgggtattacgcttaaagacgtacaggtcaccggtgaaaaagtggctgttcaggttaaaaatgatacggtcgaattcaatgcaagtactttcaagacacggccgaatgacatggccgaagatctgttgaaaaagttgcccggcgtacaggtggaaaacgacgggacagtgaaaaatcaaggcgaacaggtgaccaaaataaccattgacggcaaacctttcttcggcaatgaccctaagctggcaactaagaatattccggctgatgccatcgataaggttcaggtgttcgagcgaaaatctgaccagtcaacattctccggttttgatgatggaaatacagagcggtcaattaattttacacttaaacccgacaaaaggaaagccaggtttggaagggtagaggcaggtgtcggtaccgaagaacgttatgaatcttcaggtactttatttgattttaatcaggggcgacaattgtctgtcctggccatgagcaacaatgccaacaaatcgggttttacgtctgaagatgcaatgtcgttttctaatgcaagcgggggcagtcagggtggtggtccgggtggtcccggcatgcgggggccgagtattggcggacagagcatttttagcctgcttggttctagtaacctgggtattaaccgaaatacaaccattggtacaaattttcgcgacacatggggtaaggtagaatttaccggcagttatttctttgccaacaccggcaacagaagcgaaagtcagacgcacaggcagacattccttgaaggcaataccttgctgtcggatggatcgggtaatgctaacacgaacggcaataaccacagagtaaacctcggatttgattatgcaatcaataagaataattccattaagttcgaaccaaacctatctttttctgacaacaattccagtagcttgtcattgtcaaaacaaagaaattctgacggtgccagtcttaatgacgtaaatgcaaaggttgatgcggcttcaaaaaatttcagaataagtggcgacctgttgtacaggcataagttcgcacaggaaggacgaacattatcgctcagtgtaagcccgaaatattcttcaaataataatacaacaaataatcagtctgtttctcagatatttactgatttgagctatacgacagacagtctgaatcaaaaggtagtcaacaaccaaaacggcaatggacttggctctaatctgagttatactgaaccattaagcaaggccatcagcgtggaactatcgtataattataatattgaaaagaatgcaagaaaccgcgaatcatttgaatataatcctgctacgggtgcgtacgatatttttcaggatacattgagcaatgattttaacaatacatacgaaacccaccggccacagataagcctccaatataagctggaaaaactgtcggtgacggtatcaggttctgtacagcgtgcctcactccgaagcgagagcgtaagcgacaatctaccatttagtaagagctttaccaactttttacccggattgcacgcacgttataccttgtcaaagaataagtctatcatgttgttttacagaacatctacacgacagccggctattgatgacatccagcctgtgccagacctgtcagatccattgcgtatcaaacttggtaaccctaatcttgggcaagaataccggcataatatgaggttaagttaccgtatttttgatatggtgagcaataccttcctgagttttggtgtccgtggtgaatataccggcgacaaaattgtatctaatgtgttcattgaccagtctggtgtcgaaattaccaataaagagaacgaggatggtgtctattcgggatcattcttcgccaactatggaagaccattcagaaaaataaacctgaatgtgtcttcatctaccaactatcgacgcgatatatcgttcgtcaacaaagaacgcaataatggcgatgtgtggtcaacaagtggcaggctgtatgtcaattacaacatcaccgatgcctgggattttgatctgggaggttcggttgcgtataatgaagccaagtattcactcaacccacgcctcaataataactacaccgacatcaatactgagtttaacaccacagccgacctaccattcaggttcagagtttcgacgaatatcaatttcacacaaagacaaggtttggcaggcgatttaaccaaaaatttcaccatctggaatgcttctctcaccaagacttttttgccgaacaacagttttgaactgagtttatcggcttatgatattctcaaacaaaacacagccgtcaacagagaagtcacttcttcatacattgaagattatcaggcactgtcattatcacagtattttatgcttactgccagatactatctcaacaagcaggcaccgactatgagcaagaccggaaaaagatttttcaggatgatgcattaagaacgatattttccttttcagaataaaattttaaattgggcatattttacaaataaaatactgcccaatttttttttattcattttctgacatttttctgctgaatactaggagagaaatttgttattttccgtttcgaaatgaagattgtaattttatttgacaaattaaccaatgcgtaaaaacaggaaataatgaaaattctagaaatcaatgccatgcgcggacctaattactggtccattcgaagacacaaactcatcgtcatgaggctcgaccttgaagatcttgaagaccgaccaacaaacaagataccgggttttctcgaccgtctgaaagaattgcttcccagtctttatgagcaccgctgttcggaaggttatgcaggcggattttaccatcgcatagaagaagggacgtggatggggcacgtaatcgaacacatcgcactcgagatacaaacgctcgctggtatggatgtaggttttggccgcacacgtgagaccggagtgcctggccagtatcatgtggtgtttgcctatcttgaagaagaagtaggacgttttgcagccagggcagccgtgaggttagctcaggcactagtagatggcgaaaaatacgaccttgcatccgacgtccaggatatgagagagcttcgtgagcgcaacagacttggcccaagtaccgattctatagttcaagaagccatttcaagaggcattccgtggatacggctcaataaatattcactttgccagcttggttatggtgccaatcagaaacgcatacaggccactgtcaccagccagaccagcagcatcgccgttgaaatagcctgtgataaagaagataccaaaaccttgctcgaagcagcagaagtacctgtgccgcgtggcgaaatcatcaaaactgaggcaggtctgaaagatgccgtgagttatgtaaaatatccgctggtgataaaacccatcaatggcaatcacggtcgtggcataacggtcaatatcaacagctgggaagaggcagttactgcattcgaagccgccaaacgtgtcagcaactccgtcatcgttgaaaaatttgtaaccggcgaagattacagacttctggtcatagactacaaactag

SEQ ID NO: 2103 - DNA, 24341 bp, synthetic construct
  misc_feature 1..24341: note = Synthetic
  source 1..24341: mol_type = other DNA
cattttatatcagccattatggtcgtcacggttcacgctatcattatagtcaggaggactataaatatatagttgacatatttgagaaagccgctgcagagtctggacttactccgtttggtcagcagttgcttgtagagatgaaacagatatgtgaagatgccgacaaacgtgctggtgatcttactcctttaggtcgagagcaacatcgagggattgcaagacgaatggttaagaatttcccttccgtcttctcgggagataataagaaaatatatgccaaaagtacggtggtcgtgcgttgcgctttgagtatgaccgcattttgccaggaactgagtaagctgtgtccgaacctttacattgataatgatgcgagtgcacgataccagaattatatgtgtcatggaaaggtggtcggagatttttcgggagataaaggcaatccggaattgactgctttttatgagaagcgagatacaggaaaggaagtgctaaacaaaatcttttcaaataaaaatgtcataaagaaatatgtaaatagggacaggtttgtgaaaactctttattatatgcttatttctttgcagggagtagacgtggataatctggatgaacgtaattgctctttgactaaggtgtttacttccaatgagttggctgctcaatggcaggctcaaaacttatattggtataaggattatgcaaattgtccgctaaatggtggagtaggaaagaactcagcgagattcttagtggagcagatcagaaaggaagccgacgctgcaattgctggcaatggtgtggctgctaatttacgttttggccacgatactggtttattgccacttgtcgctcttctcaaccttgatggaataggtgagtcgtatacagatttggagttgcttcacaattattggcaggatttttctgtgattccgatggccggaaacttacagattgtcttctaccgtaaaaacaaacctaatgtttctggtagccaatatttggtgaaatttcttttgaacgaacgtgaagttaaacttcctgtatcaaagtcgcctgtcgttggcaactattatgactggaatttggtacgggattattttagtgagatagaacggacagttcaaccataaatatgttgtggaacatcttattccgctttttacaacgatatttaactaaattagataaaataaaggctgattttttttgtcagcaaactaaatgttttacttttgttatttgaaaaatttaaaagaattttggatatgaaaaagataataatggctgctttgacatgcctttgctctatttctggtatcaactcacaggaatttatgaaggtgagtgctgaaaaggttcttacagaagacaatcagcgttgttatcagatccgtcgcggttacagccgtaaggataagactcagtgggagccattctgtggtggattccgtaacttctattacgagagtggatacgagtatacaatgcatgttgaaaagtacgatccaacattggatacaatcgttgtgatcaagacaattggtcgtgataactcagactcttaccgtaagcagcaggagatgaagagaaaagctgcagaggcacgtgctgctaaggctgcccgtgatcaggagaatggtgctgctaccaagaaaaaataattggatatcagtttcaaactttatagagagacgcgatattttcgcgtctcttttgtttttgttatggataagttggacttgataaatatagacactaaatcgtctgaatatcatttcgttgagacgctgatgctctcgtctttcccttctgatgaaaggcgtgatgagtctctgcaacgtcggattgtggatgatgatcgtatgcgatgcctggtgattaaagatggcgacgtgagtgtcggctttatcacagtatggacattgacggaaatcatctatgtggagcattttgctatagccgaggcattccgtcgacgtggatatggaaaacttgcactggctgaactaatccgtatgtcgaacgtcggaagattgattttggaggttgaacttccgtcgacagaagaggctgtcagaagaatctcattctacgaaaaatgcggatttgaactgtctgcaagaccatatgtccagccatcttattcgccaagcaaacaaagtgtgcctatgtcgttgatgacctatggaaaggttggcaaacaagagattgaaaatgcggtgaaagagatttataagatggtctacaacgtgtagctgtcatttcaccggataaattttggtgatgaaatccaatattttttatacctttgcaccgtataatgaacttacagattatgagcagaataaaatttgttttgacggttttgttgacaatgcttttttttgcagtgtcggcacagtcgcagaaggtgaaacacgaggatattttcaaagacttggctaagacaaagcctggctatggcactgtgaaattacagcagaatccaaaggtcaaccttttggtaaacagaaagatcaaagagggtgagtcaaaaaaatatatcactttttccggttatcgaattcaggtgtatatggataataaccagaagaaatcaaaggatgaggcttacgcaagagagaaaaagctaaaagaaaaatacgaaaatcttacaacatatatcagcttctcatctccattctggaaacttcgtgtgggtgactatcgcactcatgcagacgctcttgtgatggctaagaaacttcgtgaggatttcccagagttgagttcggagatccttattgtaaaagatgatgaggtgagagacacgtctttggaagcggatgcgtctgcttcggcaacaacaaacaaaaaagaagagaaaaaaagtaaaaaataaaaagggctaaaatgaaaagatttattacacttgcagcagctgttgcaacattgttttctgcgtcggcaaaaatcgaaaaaagtaacgaacgtactgccgatcacaagaagtttgacaactattcatacgctatcattccacctgcaggctacgagctgacagataatggaactgcgttcagaaatccagagaagaagtccagcatctcaatttctcaccttaacatgatcctcgacgcatcaagtgagaacgagcttttgaaggtgactttccagaatttcgtttcaggctaccagactaacgagtctgtctatatcaacgatgctgagcactatttggtgagcaagactgagaacggccgtatcttcacaactcttgttgtgccagaggataacggatcagtgatgatcacagcgtcgtctccagtggacgatttggctgagattgagaagacaaaggaggctcttttgtcggtagtgtatgttgatcctgctgatatggcaagcaatccgatctttgagaattcactttatagcatcgccaaccagggcttccgcgctcaaccagaaggttcgactcttgttgcgttctgtgagtcgggtgattttgcaaaagagcaggcaacaggccgcttggtttatttcaaggtgttgatgaacgaggatgccgttaagccaaaggagcagaaaatgtttgcaacagaggtcgttaaggcgttggtttccgaccacgagactatcacatctgagaatgcggtggaggtgaacggccttccaggttatgaatttttcattactgagacagtcaatggtgaggtgaagtcgaagtcttatgctatggtggtgttcacatcaggcaagtattattgcttcacatctaaggcaaatcaggaaatagatatgtatttgcagaagttccaagctgctgcaaagagttttcaggcaaagaaataaatgaacgaggatttagagataaaaccatgggatatcgcgaagtatcccgataagaatttgacagccaagctcgcgcctcttgttaggcaagagcttgagttgttgggtgaggacgtcaaccgtgagggattgctaaagactccagacagagtggcaaaggcaatgcagtttatgacctacggttataagattgatccgtgtgacgtcttgaagagcgcgatgtttgaggaagactacagccagatggtgattgtgagagacattgatttctactctctctgcgagcaccacatgcttccattcttcggcaaggctcacgtggcatacattccgaacggcaagataactggtttgagcaagatagctagagtagtggaaatcctttcgcgtcgacttcagattcaggaacgactcactacacagattaaggattgtattcaggagacgttgcaacctctgggtgtgatggttgtgatcgaggctcaacacatgtgtatgcagatgcgtggtgtgcagaaaatgcattcagtcaccaccacatcagattttaccggagcttttgagacagcaaagacaagagaagagtttatcagcttgatcaccgtcaacagatgacagaatcaaaactttcattcggcaagattcgcgacttggttaaggcggaatgcttgtctgaccttggtaaggaaaagtgcgacaagatgtcgttccttaccaatttcgacactatattggaagaggcaaaccgcactaatgagtttgtccgtatacttcaggaagaggatttccctaccgacggcttttacgatgtcagggaggcaatccaaagaatcaaggtggtcggtacctatatcgaaccagctgaactgtttgatttgagccgtgttgttgaagcaatcggcagtatcgtcagctttttttccaaccgtgaggagggcacatattattatctgcaggagttgtcgagagatgtcttcacgtttcccgatattcagcgtgcaatcgcaagaattctagataaatatggtcagataaaggacaccgcgtcttcgaaactcggtgagattcgtcgtgagaaatcagctacggaaggcagtatttcaagaaatatgtcgtcgatccttcgtaaggcggtggaagacggaattgttgagaagggtacgactccggctgtgcgtgacggtcgactggtgattcccatctctccctttttcaagaagaaactgcgtggtattgtccacgatgagtccgccacaggtaagacggtgttcatcgagccggaggtgattgttgaagccaacaataaattgcgtgaactggaggctgaggagcagcgagaaatcgtaagaatccttactgagttcactactgaaatattgcgtccacgtacggatgaactgctgttttcagttgattatctgtcggttgtggattttacaagagcaaaagcattgtttgcgttgaagacaaacagtgtgatgccaaaattacgtaatgagcaggtgatcgactggcgtgaagccatccatccgttgcttttcttatcccatcaagcgtcgggcaaggagattgttccgctcgacatccatctcgacaaaaacaacagaatactgcttatttccggcccgaatgccggaggtaagagtgtatgtttgaagagcgtcggactgatccagtatatggtgcagtgcggaatgcttgtgccgatgcatgccgacagtgaagtgggaatcttcaacgacattctgatcaacatcggtgatgagcagagcatcgagaacgacttgagtacatacagttcgcatctttcttatatgaaggagtttgcgaaaaaatgtaatggaaagacgattctgctcattgatgagtttggtggcggcacagagccacgaatcggtggagctattgcggaagccttgctcgaccatttcaaccgtcagaaatcgtttggagtcatcactacgcatttcactaatcttaagcagtttgccacagatacggatggtattgtgaatggcgcgatgctctacgaccgccacgaaatgaggccgctattccgtcttgagataggaaatcctggaagctcgttcgcccttgagatcgcaagaaaaatcggtttgcctgagagcgtcatcgcccgtgctacggagattgtcggtagcgactatgtgaatatggagaagtatctccaggatatcgtgcgagacaaacgttattgggagaacaaacgccagaatatacgtcagaaagagaagcatatcgaggaacttgaggagaaactcaccgtcgacgtcaataatatcaacgcagagcgaaagagaatcctcagcgaggcgaaagccaaatccaaggagatgctcgacggcgcgaacgccaagattgaacgtacgatcaagttgatcaaggaggcaaaggcagagaaggatgccacacgtcaggcacgtgaggatctgacaaagtttaagaatgattttgttgatggcgacgagaatgacgctttcgcaaagaaggtggagaggcttaacgccaagagccagcagaagggtggggcacctgcacagcagaagcaggaaaaaccaatctctgtgggagacacggtgaagataaaaacaagtggagcgaaaggtaaagtgttggaaatcaagggtaatagtgtggatgtcgcattgggaaatctccgcaccaccgtcaaactgaaagatcttcaattgactcaggaagctacacagaaaacacaaaaattcagtttcaacatagtttcgtccaacaattcagacattgtccacgagcgttccaagaatttcaagctgcagatagatgtgcgaggaatgcgtgccgacgaggctctgcaggcggtcagctattatatagaagatgcgataatgcttgatgccggcacagtgcgaatcctgcacggcacaggtacaggcgtgctacgacaggtgatccgtgagtatctgaagacggtgccacaggttaaaacattccgtgacgaacatgtcgatttcggtggagccggaatcaccgtggtggaagttgggtgaaattataaattcgaaatgcaaaatgctaaattgtggggacacgccatatatctggtgattcaccccttctcgtagagacgcacggacgtgcgtgtcattggacgtacgtgacgtaataattcataatgcataattgtgggtacgtgccagcaccgtaggtgcgacataacatagggtcgggtgtaaacctgatcctgatgatgaattcgctccgagagagagaccaatccgtgtgtaaatccatttgagacgccgcaatgcgacgtctccacaaccattgttcataccttgtgaaaaaactactaataacatttgttgtctttctgtggcttttgcctttagattgtctatctttgcagacgaaaaacaaaaagtggacaattaaacaatggctatcggcgaatctaaatcaacaaagaaatcaaagaagggtgtggctcctgacattatcgaggtcagagacatgggtggcgttgtgcctcctcaggcaccggagatcgaaaactctgtgatcggagctatcctgacaaatccgggatgcttctctgaaatatgtacgatcctgaagaaggagactttctatgtgcctaaaaatgctcttgtctacgagacaatctcctacttgggcagtacacagcagtctatcgaccttttcaccgtctctgaggagcttaagaaacgtgacctcttcgatacaatcggcggaatgccggtgcttatcgagtacactcagaatgtgatttccgtcgccaacgtctatgaacattccaagattcttgcggctaaggctcttgaacgagaactgatcaaatattccactgagattcagcgtcgcgctttcagtgaagacgaggatgtcgacaaactgatccaggctgctgaggctatgctctacgatatctcacagcataatattgagaaggattttacgcctatcagcgacgtccttccaaccgtcaaagccaattatgaggcggcttccaacaataaggagggtgtcggtggtgtgccgagcggattcaccaaactcgacaatatgaccaacggctggcagaaatccgaccttattattatcgccgcacgtcctgccatgggtaagacagccttcgtgctctctatggcaagaaacatcgcagacaaagatatacctgtcgccgtcttctcccttgagatgagcaacgaccagcttgccactcgtatgctggtgaatgtcacagaactcccgtcggagaagatcaagaagggtcagcttacgattgatgagagcaagaaaatgaaccaaggtctggattatcttgcccagaaaccaatctatctcgacgatacaccgagtctgtccgtgtttgagtttgccacaaaagcacgacgtctggtgcgagacaagggagtgaagatcatcgtcatcgactacttgcagctgatgaacgccagcggtatggcatacggaagccgtgagcaggaggtcagcacgatctcacgttcgttgaagcagttggcgaaggaattgatggtgccgatcattgcgttgtcgcagttgaaccgtagtgtggagagccgagacaaacaggataagcgtccgcagttgtccgacttgcgtgagtctggagccatcgagcaggatgccgacatggtgttgttcatccaccgtccggagtattataaattggaattcatgtccgacaacaccacaccagccgcgggacttgccgaaatcatcatcgccaagcatcgtaacggatctgtgggcgacgtgattcttcgattcatgggcgcgcagacgaaattctgcaactacgacgatggaggaatcgtgtcgacagaccagtatgtggaggtgcagtccaacatcaatcccggctatgcgtcgggcaatgatgctgtcaatgtggattcatctgtgccggcattcatggattcagccccagcaccgttttaataattcataatgcataattgtgtggaaatctatccatcatcaaccatccatcatcaaccatcaaccatcaatcgaatcgtggaagtaagaatagagcaatcatggaaagaagtattggcagacgaatttgaaaagccatatttctcattgttagcgtcatttataagaaaagagtatcaggagacggaagtgtatccgcccggaagcaagatattttcagcgttcgacctcacgccattccgcgacgtgaaggtggtgatacttggtcaggatccctaccacgaacccggccaggctcatggtttggcattttctgtgcaaccgggagtgcagataccaccgtcgctacagaatatatataaggagattgccgacgatgtgcactctccatatcccaattcaggattccttgagcggtgggcgaagcaaggcgtattgcttttgaacaatgtgttgacggtgcgacgagcagctccgttgagccatcaggggaaaggctgggaggagtttacagacagagtggtggaactgctctcgtcgaaacgggagaatcttgtcttcatgttgtggggatcgcaagcgcagaggaaaggccttgtgatagacacaaagaaacatcttgtgttgaaagcgccacatccgtcgccactatccgcctaccgaggcttcttcggctgcaaacatttcagcaaagcgaacgaatatctgatacaacacggaaaaaccccaatcgtgtggtgatgggtaattcataattcataatgcataatgcataattgtggggatatgccagtgctgtatgtgcgatatattctagggtagggtgtgaatcccaatcgtgttttattaatatagacgttgcattgccaacgtcttttttgatttttaggaatgtaatttttcctatcaaatgctatttacctgcgaaatttcagttttttgttattttttttcaaaaaaaagtgtaagctatgccagaattttacatacctacgtgctatttttgtggttgtgtaaggatgaagagcaaaaaaagccaccgttaaggacgatggcaacctaatgttttcacaacggaataatccttattgtgaattgcttcaattttgttctgcaaatgtagataatatttcttaaattgcaaaccgaatttataaataaaaaaataaactataatatgaaaaaaatattaggcctagatctcggcactaacagtataggttgggctgtagtgaatgaagcagagaaagaaggagaacaatcctcaattgttaaacttggagtaagagtgaatcctcttaccgttgacgaacagcaaaactttgaaaaaggaaaaagtatcacgacaaatgcaaatcgaacgttaaaacgtagtatgcgtcgtaatcttcaacgttataaacttcgtcgtgaaaatctgatttctattctgaaagagaatggattcatcagcgatgatacaattctttcagaaaatgggaatcgtacaacttttgaaacatatcgtcttcgtgccaaagctgcatcagaagaaatatcattgcaagattttgctcgtgtgcttttgatgataaataaaaaacgtggttacaaaagtagtcgcaaggcaaaatcgacggaagaggggcaattgattgatggaatggaagtcgccaaacgtctttatgatgaatgtttgactccaggacagctttcatacgaaataatcaaaggtggaaaaaaacatttgccagatttttatagctctgatttacaggatgaatttgataaaatatggaatgtgcaaaaaacattttatcatgaattgctaactgataatctaagagaaaatctaaaaggaaagaataaaactcagacatgggctatttgtgcaaaaccatttggtatagagggaatcaagcgtacaaccaagggcgttgaacagaaattagaaaactataaatggcgtgttactgccctcaatgaaaaattggatttggaagagttggcagttgtattacaagagattaatggacaaataagtaattctagtggctatttaggtggtataagcgaccgtagtaaggaactctattttaacaaacagactgttggtcagtacttgatggaaaatttggatgcagactccaattatagtttgaaaaatcaggtgttctatcgccaagattatcttaatgaatttgaaaaaatctgggaaacgcaggcccaataccacaaagaactacttacacctaaactaaaaaaagagattcgtgatgttgttattttttaccaacgttcgttgaaatcacaaaaagggttgatttctgtatgtgaattagaaggaaaacaagtcgagtctgaaaagaatggaaagaaatatataaagacaattggaccgaaagtgtgtccgaaatcatctccattgtttcaagaatttaagatttggcagatgctgaacaatgtacaaatctcttgtaagtctgtccctgataagcaaaaaaacatttggaatgataaccaaggaaaacgatttttatctcaagaggagaaagaaaaattgtttgttgagctgagttataaagaaagtttatcgaaagcggatgctttaaaactgttgtttaataatagtaaagattatgatttgaattacaaaatactggaaggaaatcgcactcaatccgaccttttcaaagcatatcaaactattatcgaaatgagtggttacgacgagtatgatctttcaataatgaactcagaaaaggctgttcacaaattgaaagaaattttcgatggtttgggttacaatagcgatattcttatgtttgactcttctttggaaggtcacaaattagaacaacaatcaatgttccgattatggcatttgatttattcttttgaaggtgataattctgttatcggtaacgaaaaattaattgaaaagatacaagatacatttggatttgagagagaatatgccactgtaattgctaacgttgtatttaaggatgcaggagaatatagtagccttagtgctaaagctatccgcaaaatattacctcatcttaaagatggcaatgattatagtgtggcatgtgagtacgcaggctataatcattctaagagctcgcttacaaaagaagagatcgagaataaggtattgaaagacaagttggatttattgccacgaaacagtttacgcaatcctgtggttgaaaagattctcaatcagatgattaatgtagttaattcaattgtagatacgtatggtaagccagatgaaatacgtatagaattggcaagagagttaaaaaagtcggctaaggaacgagaagaattaacaaaatcaataaatagtacgactaaactacacgaagaatatgtcactatattaaaaaatgaatttggattatctcgtgttagtcgaaacgatatcatacgatacaagttgtataaggaacttgaatgtaatggatacaaaactctttatactaatacttatatacctaaggaaaaactttttagtaaagagtttgatattgaacatattatccctcaagcaaaactgtttgacgactcattttcaaataaaacgcttgaatctcgtcaggctaatttggacaagtctaacacaacagcttatgattttgtggcggctaaatatggagatgattatgccaacggagagtataaatcgcgtatcgaaaaattgtataaagatggtataatcaccaaaacaaaacgcgataaacttttgatgaaagaggcagatattccaagtggatttatcaatcgtgatttacgagattcgcaatatattgctaagaaagcacgagagattttggaagatttggttcattttgttgttccaacaactggtagtgtcacagatcgtctacgtgaagattggcagcttgtaaatgtgatgcaggaactcaattggaataaattcaatcaattgggcatgacctattatgagcaggatcgtgatggacgacaaatacctaaaataaaggattggacaaagcgtaatgaccatcgtcatcacgctatggacgctcttactattgctttcaccaaacgtagttttatccaatatctaaacaatttgaatgctcgtgtagagaaaggcgttgaggactggattgatttagatatggttgacgtttccaaattggataaagaaaaacgaacttcggtggtgtactctattgaaaaaaaagaactttatcgtgacaaaaaaggtaaattgcgtttctgcccacctatgccattgcacgaattccgtgcagaagtaaaacgccagttggaaagcatccttgtttctaataaagcgaaaaataaggttgtgacaaataatgtgaataaagcaaaaaataatgtcgaatcgtttattcaaaccaaagacggggaggtaaggaagataaaaggtcaggtagtaaaaacgccacgtggacagttgcataacgaaactgtttatggttgttcaaagcgatacgaggcaaaagaagaaaaagttaatgcttcttttgatgcagagaaaataaaaacagtagcatgtaagcgttatcgagaagcactgatggaacaattaaacaaatttggaggagatgctaagaaagcgtttactggtaaaaatgctatagataaagctccaatttggctggatgctctgcatacagaaaaagttccagagaaagtaaaaacggttggctttgtctatatatacacaatcagaaaggaagttggtccagatttgaaagttgataaagttgtagacacacgcattaagaaaatattagaatctcgtcttaatgagtttggtggtgatgctaagaaagccttttcaaatcttgatgaaaatccaatttggctcaacaaggaaaaaggtatttccatcaagcgtgtgacaattacaggcgttagcaatgcagaggctttacacgacaagagagataaagacggaaatttaatttttggagatgatggacaaaagcaacctgtagattttgtaagtacaagcaataatcatcatgttgccatttatcgtaaaccaaaattggacaaaaataatcagcctatgcttgatgaaaaaggcaacatcctatatgaacttgacgagaaaattgtttcattctatgaagcaacatcacgtgcggtgcaacatttgcctattatcgacaagacatataaaaaggatgaagactggcaatttctatttactatgaagcagaatgaatattttgtgttccctcgctatgacgaaaatggaaatatgatttttaatccattggattatgatgagtcatggtatagaaatccggacaattatgcagagattagccctaatttgttcagagtacagaaaatagcaacaaagaattatttttttaggcatcatttggaaacgacggtcgaaacaccaaaggcgttagctggtattacatacaagccacaattaggcttgaatggaattgttggtatcgtaaaagtacgtgtaaatcatattggacaaattgttgctgttggagaatactgattgttgtgagtcagatataaaactattgcaatcaaagaaattcattatgtatggaaagaagttgacgagcgatgacgatttgtgatgctggttgctatagtattgatgtaaaatagattgagaaatacaacgtagcgatgatgtgatgacaggaatagctcgaatgtgatttctggcgtgaggcttttatgctgatagcttttgtctaaaacaattaaatgctaataatatatggtaaaacgcacactattcttcgaaaattctgcttatttgtcgttacgcaacagacagttggtaataaaacgaacagatcctactaatggtgaggaaatgataaccactacacctgttgaggatttaggagtcgttttgttggaaaacagacaaataaccattacaaatggattattagacgcattgttagctaacaattgtgctgtgataacttgcgatgaacgacacatgccttctggaatgatgctccctctcgagggcaacactatacaaagtgagcgtttccgcaatcaaatagaagcatctcaacctctcaaaaaacagttgtggcaacaaaccattcaagttaaaatacacaatcaggcatcggtattaaaacgttgccgaaatgctattattgggaatatgttgtcatgggagaaaaatgtaaaaagtggagatagcgacaatcttgaagggagagcggctgtttattattggcaaaagatgtttcctgaacaagatgatttcaagcgagacagagaaggagaaggtccaaacaatttgcttaattatggctatgccatccttcgtgctgttgtcgcacgtgctttagtctccagtggaatgttgccgacatttggtattcaccatcgtaaccggtacaatgcatactgtctcgccgatgacattatggaaccttatcgtccgtatgttgatgaattggttgtaaaaattgttggcacaacggacgattacaatactttgacaacagacttgaaacgacagttgttaacaattcctacaattgaggttgtgattggaggacaacggagtccgcttatggtagctgcaacgcaaacgacggcatctctatataaatgttatagtggggaaatgcgtaaaattgtgtatccgataatggagatttagaatggaacggattagcgagtatagaattatgtggctatttgttttttttgatcttcccacggagacgaagaaggaacgcaaaatttatgcggatttccgaaaacggttgcagggcgatggctttacgatgatgcaatattctgtctatgtgcgtcattgtgcaagttcagaaagtgcggatgtccatactcaacgagtgaaaaacattttgccagaatgtggacaagtaagtattttacgaattactgataaacagtttggcaatatgcaaaattatattggtcaaaaaaagaagagtaaatcagaaggaggacaaatacttgttcagctatcaattttttgacctatatgccaattttttccgtatatagaaattgaaaatgacaaaagaaataaaaaatcgcattttttaatgcgatttttttatttctaaaaacagcgtgtaataaaatgaattacagtgagttgtgagtgtcgcgctgtttttatagactcaaaattacaaaattgaaagcaattcacaaccgtttatgagttgtattcattgggggcagagctgtttttatagactcaaaattacaaaattgaaagcaattcacaactagtctgaaactcacgctgacgaacttgtggctgtttttatagactcaaaattacaaaattgaaagcaattcacaactacaaaggattttaagcttaatgaccgcatgctgtttttatagactcaaaattacaaaattgaaagcaattcacaacgtctaacacgaaaagttggaaagcccgcagctgtttttatagactcaaaattacaaaattgaaagcaattcacaaccaagagagacatttttaatagtctgctcaagctgtttttatagactcaaaattacaaaattgaaagcaattcacaacggttgatttcctcaaccacatcccaacctagctgtttttatagactcaaaattacaaaattgaaagcaattcacaacggaaagcgagttgcaaccctctccaaaattgctgtttttatagactcaaaattacaaaattgaaagcaattcacaacactttatgcgttcactgacagattcacatggctgtttttatagactcaaaattacaaaattgaaagcaattcacaacggaaagctaatgtttcctttatccacatagctgtttttatagactcaaaattacaaaattgaaagcaattcacaacctcaacccctgcccattccttctcctgacgctgtttttatagactcaaaattacaaaattgaaagcaattcacaactattgcacccactcgcaattattaacaaaagctgtttttatagactcaaaattacaaaattgaaagcaattcacaactgccaccgtggaaaagtgtaatgaatgtgcgctgtttttatagactcaaaattacaaaattgaaagcaattcacaacaatacattttgacatattttagtactatgagctgtttttatagactcaaaattacaaaattgaaagcaattcacaacacagagcgagttttgaaaagcaactttcgggctgtttttatagactcaaaattacaaaattgaaagcaattcacaaccctttgcaatacaaaacaaaatggtcaagggctgtttttatagactcaaaattacaaaattgaaagcaattcacaactaccaactcacgcaacaccccaatcattatgctgtttttatagactcaaaattacaaaattgaaagcaattcacaacataaggcaaatagttattttgatatttacggctgtttttatagactcaaaattacaaaattgaaagcaattcacaactccgcattgtacaaactgaatgtcgggggagctgtttttatagactcaaaattacaaaattgaaagcaattcacaacttgcgagctgttgcggataaacagaaagtgctgtttttatagactcaaaattacaaaattgaaagcaattcacaactaatgagctcaatttgcgagaagcggatagctgtttttatagactcaaaattacaaaattgaaagcaattcacaacacgtgtgatcgaatctggtgctaatgtgacgctgtttttatagactcaaaattacaaaattgaaagcaattcacaacgtctgtctctcttcttcctctccttgctttgctgtttttatagactcaaaattacaaaattgaaagcaattcacaactaatagaaaaataggaagagtacgatgaaagctgtttttatagactcaaaattacaaaattgaaagcaattcacaacttaagataataagtcctggtgatcgatctgctgtttttatagactcaaaattacaaaattgaaagcaattcacaacagtagaatatggcaaaattagatttaatagctgtttttatagactcaaaattacaaaattgaaagcaattcacaactgggaaagacggtttttttgccactcaaagctgtttttatagactcaaaattacaaaattgaaagcaattcacaacgggtagccatatccaatacgcagatccttcgctgtttttatagactcaaaattacaaaattgaaagcaattcacaactcgctgtgcttcaaggagttgctgctttagctgtttttatagactcaaaattacaaaattgaaagcaattcacaacaagatctcagctggctcttttcctagatcggctgtttttatagactcaaaattacaaaattgaaagcaattcacaaccaccgcttgcaatcgcaaaatccattccctgctgtttttatagactcaaaattacaaaattgaaagcaattcacaactaatgagttcaatttgagagaagcggataggctgtttttatagactcaaaattacaaaattgaaagcaattcacaactcattataataaaatctatgattggattttgctgtttttatagactcaaaattacaaaattgaaagcaattcacaactactcttgtttttgagagacgtaagtctttgctgtttttatagactcaaaattacaaaattgaaagcaattcacaactgtaaacggtagcgaaagaaacgatggtcggctgtttttatagactcaaaattacaaaattgaaagcaattcacaaccacatggcgaaaattgtcacttgtcatgaagctgtttttatagactcaaaattacaaaattgaaagcaattcacaaccgtttacgcgcttccgctttcagaatcttcgctgtttttatagactcaaaattacaaaattgaaagcaattcacaacatcggtaatgtttgtggcattacggaaaggctgtttttatagactcaaaattacaaaattgaaagcaattcacaacaatgatgatgaattagttgaaaaggttgctgctgtttttatagactcaaaattacaaaattgaaagcaattcacaactcgtatgttacccgttgctgattcctttggctgtttttatagactcaaaattacaaaattgaaagcaattcacaactgtgcgtgtgtgcgtttacgcgcgcgcgtagctgtttttatagactcaaaattacaaaattgaaagcaattcacaacatggagaaccaagtggagaatttccagctgctgtttttatagactcaaaattacaaaattgaaagcaattcacaactgtcagatttgataaatacggattgaaaggctgtttttatagactcaaaattacaaaattgaaagcaattcacaacgaaaaaaactattttctatattttattgatgatttatgccataatattttcgaacctatacgaaaagaatttttttaatatcactaattgattgagtttgtgtgatttgaacatgcagattttaacaatgagttgtcaaagattttttgacagctcattgattgcaattgattgagtttgtagaaataagatcagtttttaagtattgcttaataactgaaaaggatgtaatcgtttgaatatcatagaaaggaatatatgcgattgtagaggtgacaaaattcttttacattaaaaagtatttacaaagtaagactttttatgtacattcgcattacattaataatatgaatatgagtacacagattacaataaagacggatgaaactctcaaacaagaattcgcaaaatttgtggcagagttaggcatgtctgtctcaacagcgttcaatttgttcatgaaagattgtgtgagaaacaaacgtatgaacatatctttggatttgaatgacgaaaaccgtcaagcacgaaagaatgtggaggatggtgattttgcccatacattcaaatcagaggaagaattctctaaattcatgaaagagttatgagacatcttgtcaggtatattatcatcgcaatattgatgattgcagggatccattctggcgtggcgcagacggtggggtatctgcacaaaccgttgtcgccggaaggttgtcatgtggaatacaatgtttcgaagcaagacagctcgtattttatcattgctactgtgacttcggaccgtttgatctttctcgacaatcctacaatgaaaatcagaacattcaatgatgatgtgattacgttggagggcgacgcgattggaaacagaaatggcgtgtcgttcggctattcgataggttatgtgggcgtttcagagtcggagataaaatctacagctcagttttatattactccggatgtttttttgttgctgaaggatggtgtggcgaaggtgagattgtcgatgaggccgatgaatcatgaacgtgaattcaagaaggacaagattggattcgccctctaccaattgtatcttgacgccaaaaacaaagacgaaaatttctaactctaacctccccaccgtcgaccctccatcatccgccttctatcgaaaaaagctccgattggtaatgtggattctttttaaaaagttgcgattgttaatcgtgattcttatttttgcattgtaaataaagaaagaagatatgatatcaaaagagcagttaagacaggtcgtatatgaccaacgaaatctatattatgatcttggaatagagagaaatatagatcggacacttgtcgactgcccggaagtgttggtgcttactggtgtcagacgttgtggaaaatcggtgttgatgcaacagattcgagcccgacgggaagaaaaggattattttataagttttgatgatgatcgtctgcttcatttcacaattgaggattttcaattgctttatgatgtctttgtagaggattttggccttcagcatacattctatttcgatgaaatacagatggttgatggttgggaacgtttcgtcgacagattatataagcatggaaataaggtttttataactggaagcaatgctaaaatgttaagcagagaattaggcactcttcttactggacgtcatgtcagtaaagaggtttatccattctctatgagtgagtatatggaattgttgggagttaaagtgacacgtgattcgttttacacaacagaaggacgtgccatgttgcaaaatgttcagaaagattaccttaaagatggcggatttccccaatatctcagaagcaagaatgtggagtatttgaaatcattgtacaacgacatcatatatcgtgatatcatagtaagatacaggttgatgtctgataaaccattgaaggagacggtttattacttgataagcaatgcaacacatctgtttacatataattccgtggcaaaatctgttggattgaagagttcggagactgtaaaagactatatttcttatctggaggagacatatttggttggtttgttgccgaaatatgatgtcaaggtgggagagcagataaaaagtcctaagaaaatatattttatagacaatgcacttgttggcattatagggttcagtttcagtggaaatgaaggaagccgacttgaaaatgctgtgtatatagagttgcgacgtcggggaaaagagctgttttatcataatgacagaaatgaatgcgatttcattgtgcgtgaaggacttcgtataacggaggcttatcaggtttgtgtgtcgatgcaggaagagaagacgcgtcagagagaattggaaggcatccgttccgcaatgaaagcatattcattgtcagaaggttatatcataacacgtgaagagacagaagatgtaaaagtggaagaaggagttgtacatttggtgtcgtttgccagatgggccctataaaatttcgggctgattgggtgaagcattttcaaaactcaaatgttttttgtagttttgcggatatttttgtgaaaattcaacaattaagatatgaaagtagcacttgttacaggaggttcgagaggtatcggtagagcttgttcggtcaagttggcggagcagggatactacgtgctgatcaactatcaatcaaatgaggccgaggcattgaatactttggctatggttagagaaaagggtagcgacggtgagatcatcaagttcaacgttgctgattgtgaggcaacagagtctgctatcactgcatggcaggaggctcacaaggatgaatatattgaggtgttggtcaacaacgctggtatccgccgcgaccagatcatggtgttcatgactaatgaggactggagaaacgttatcgacattacagtcaacggtttcctttacgtcactcgtgctcttcttcagccaatggtgagaaagaaattcggacgtatcgtcaatatggtgtctctgtcaggattgaagggtcttcctggccagactaactactctttggctaagggaggtatcatcgccgcaactaaggctttggctcaggaggttgcgaagaagaacgtcactgtcaacgctgtggctccaggattcatccgcactgatatgactaaggatttggatgaggctgagttgaagaagcagatccctgccaaccgtttcggtgagcctgaagaggtggctgctgtcgtaggtttcttgtgtacaaaggaggctgcttacgttacaggtcagacaatctctgtaaacggtggtctttacacataatcggattattcaatcaaatctatattagggcagacggatgttctgcccttttttataactctgggctgtggggtgccatcgaaatcccgtgggtgatgccattggattcccgtgggttgccattggattccgtgtgatgccattggattcccgagggttgccattggattcccgtgggttgccattggatttccgtggtgatgccattggattcccgtgggtgttgccattggattccgtgtgatgccattggattccgtgtgatgccattggattcccgtggtgatgccattggattccgtgtgatgccattggattccgtgtgatgccattggattccgtgtgacgccattggattcccgtgggttgccattggattcccgtgtgtgttgccatcgaaatcccatggttacgctacgctcatcctgggctgtggtatgtcgcctaatcctagggttacgctacgctcaccctaggctgtggactatcgccctttcagggcgtggtggatttttcatttttaattctacatttttaattttaaccattatgccctgttggaatggcaagacacgtggaggttcgttcggatacggattcttcatctttttgatcaaacatttaggattgaacgcagcgtatgcgttcttgtttgtcgtcgtgccatatttcgtgccgttcgcgccgaaagccacagccgcaagctggaaatattggcgtaagattcacaataaatcggtgttgtgcaccatcggtaaaatcttccaacactactatcgcttcggacaggtgataatcgataagatcgcagcgtcgtcgggactggaaaaggagttctctttctcgttcgacggaatggattgcctgattgatcatttgaaacgaggggagaagggcgctgtgatgatcggggctcatgttggaaactgggaggtgagcagagtgtttatgaaggagtatggcaccaaactgaatgttgtgatgctcgacgctgaatatcagaagattaaggataaattggagtcgacgatgggagccaatacatttggtgtcattcccgtctccacggagaatatcgaccatattttcaaaatacaatcggcattggcatccaatgaggtggtatgttttcagggcgacagatatatcagggaggaagatgcgaagacggtgcaattccttggccacgacgctccatttccacccggacctcaccagatcgccacaatgacgggtgccgacacatttttctttttcgctgtcagggagtccggcaaaaaataccgttttatctgccgaaaagcggaggctgccgcacaggagacgaaccgaaagatgaagacatccgcgtcgatgcaggaatatattgattttctggaaacaatcgtacgccaatatccagaacaatggtttaatttctacgatttttggtcgtagagacggttgaaggttgaaggttgatggttgatggttgatgattgatgattgaaggttgaaggttgatgattgatggttgatggttgaaggttgatggttgaaggttgagggttgatggttgagggttgaaggttgagggttcgtccaatattcgttggcataaaaaagggcgagcataaagcatcgccctatatcattcaaaatgcgaaattattggaaaacacaacgatggaatatctcagatgagcatcttaatttagcatttcgcatttataatttttaattttatctcttgtcaacgtttccctcgtagaaattgatgaatgcgtttgtcaccagacgattgccgccaggagt

SEQ ID NO: 2104 - DNA, 24338 bp, synthetic construct
  misc_feature 1..24338: note = Synthetic
  source 1..24338: mol_type = other DNA
caccccaaatgccgttcacatcaagggtcggacgaattcccacgcgctcaagggtggtaaatcctttttctccccacacctctttgatatccagtgcttttttatattcatccagactgaatggcgctttattcatctcggcacgctcggtggggttaacctctaaaacatcgtcgtaaaagccggggatggtgatatggttattctcgtcgtgcaacgacgcaatcattttggctaatatgttggctggattggctacggcgccgccaaagagacctgaatggagatcgcgattgggcccggtaacctcaacctcaacataggccagaccacgcaaacccgtggtaatcgatggctcatccttgcctaacaaagaggtatccgaaaccagtatgacatccgctttcagcatctccttatgctggtccaaccacttgcccagattgggcgagcccatctcttcctcgccttcaatcataaacttcacgttgcagggaagggttttggttttcaccatcagttcaaaagccttggcatgcataaatccctggcccttgtcgtcgtcggcaccgcgagcaaaaatcttaccatccctgataacgggctcaaagggctgcgacttccactcctcaatggggtcaacaggcatcacatcgtagtgggcatataccagcaccgtaggtgctttggggtcgatgatcttttctccgtaaaccaccggatgcccatcggtgggcataacctcggccttatcggcaccggccttcagcatctgatcgcgccagtactcggcacacttcaccatatcgggtttgtgttcagatagggagctgatggaaggaattcttatcaaaccgaaaagctcatccaaaaaacgatccttgttgtcgtcaatgtacttcttaatgtaactcatgtttttgtatttatgattagtattcgttttatcgcggtataaatatagcttaaaaacgggaattcaacccattggccagcaagaaaaacggctcaatcgtgccttagggacagggcgaattaccgattaaataaaggctattgctgactttcgttttgagaatcggccctctgctcctctaacatttgggctgccacctccatttcatgataaaactccttgccataggctcgtgtgatggcctccttcaaaaatttatatacgagtatgccgtttttcaaacccagatcccttgccggctgacaaatgctccactggtcgtaattgatggccgtgaatgtcgaatatttctttaccctgatggggtacaaatggcacgaaatgggcttacgaaaccctaccttcccctgtagccacgccttctcgatggcacacatggcaatgccattctcctcaatgcagaatgcgcactcctctccctcgataaggggagtaaccatatccccgtcgaaatccctgatggccacaccctgtttcctaacagcctcaatgccaccgggttttaaaaactgttctatgatgccaatttcttttttaagtatatctatctcctcaggttccagtggagctcccgaaaggccatgcacgcaacatgcgcctaagcattggggaaggtcgcaacagaaatgcttttcaaaaacatcgaagctgatgagcttatcatcaatctgaatcatacaacgttggcggttatcctgcacttatctttcgggcagggttgattatcggcaaagcactttcccggtcatctcctctggaatgggaagacccatgatactgagtatggttggcgccacatcggccagaatgccattctccaccctttcgcacttatcgctcaccagtatgatgggaacgggattgagcgagtgtgccgtattgggcgatccatcggcgttaatggcattgtcggcgttgccatggtcggcaatgatgatcacggtatagccattgttgcgggctgctgtaactacctcgcccacacattgatccacggcctttacagccgtctgtatggcgctatacacgccggtgtgcccaaccatatcgccgttggcaaagttgagacagataaaatcgtgagtgcgatggttgagttcatccacaatggcagccttcacctcgaaggcactcatctcgggcttcaaatcgtaggttgccaccttgggcgaggggatcagaattctgctctcgcctttgaactcggcctcgcgccctcctgagaagaagaaggttacatgggcatacttctcggtttcagcaatcctcagctgtttaagtcctgccttcgaaaccacttcgcccagcgtattcttaaggttatccttttcgtaggccacgtgtacacctttgaaggtatcgtcgtagcgggtcatggtaacgtagtgcagcggtatggtgtgcataccgtgctcgggcatatccttttgcgtaagtgctatggttatctcgcgcagcctgtcggtgcggaagttgaagcagataaccacatcgcccttcctgatcaacccaacgggttgaccgccgtcgtccaccctgacaatgggtttgatgaactcatcggtaatgccctcggcatacgactcctccatggccttggtgatgttttgggtaggcttccctatgccgctcaccatcaggtcgtaaccgaccttgatgcgctcccaccgcttatcgcgatccatggtgtagtacctgccggttagcgaggctataaccccattgctgtgttgaaggtgctcctccaggttgcgtacaaaacccaacccgctctgcggatcggtatcgcggccatcggtgagggcgtggatgtaaaccttttccagcccgtacccttttgtcatgtcgcacagcttgtaaaggtgggtatccatggagtgcaccccgccatcggaaaccaagccgatgaagtgaactgcaacgtctttttcgcgggcatatgtaaaagcctttgttaacacggggttgctctcaattttcccatcccttatctccatgttaatccgcaccaggtcctgatacactaccctccctgcgccgatattcaggtgtcctacctcggagttgcccatttgcccggcgggcaaacccacatcctcgccacaggtgagcagctgcgcattggggtagctgttttttaggtctgtcatattctttggctgcgtggtggcaatggcatcgctcctgtcgcccttgcctattccccaaccatcgaggatcataagcagcactttactattattggtcataaggcattctcctccactatggtatagtatgttggaacaaatccggtgtaaaaaggtttaacgcgaaacggcttcaaaggtatcttttttttggaattttttgggggcactgcaaatcaaagatttttcaggaacaacagggacaaaccacaacgctgtacctatgttatggtagataaaaaagagggtgcccaccagaggcaccctcaatatggcgttattgctttatgaattttcgaagttcaacggaatcttctgtttctattcggataaaatagatacccgcattaaaagaacgggtgttgatgtaaactctatctaccagagtacccctgtaaacaaccactcctgcagaatttataatctcaaaagttaactctgttttattatcctgaaactcaactattaattcatccgaaacggggtttggatatactttgataattttactaaaatcaatatccccgatgcctgttaaatctacttcaattgagtttgacggatccgaactacatccgttaatagtaacgattacaaagtaagtactgctgtacgttacggtgtattgtggatcagttgcccctgcaattgccccttccagatcgtaccattgattgccaacgggagcatcagagtacaatgttttatcaataagagttattgtaggcttgggtggtttcatattcacagtgatagcaagagctgaatgtaccccatggccacaatcgttgacaccgtacaccgagatatcacccgatacggcatcattgccaaaactcacggtaatgctattggtagtgctctgacccgttgctccgtcgggtagcgtccacacataggaactggcgtgggcaatgggctctacgctgtacacctgggtctcgccctggcaaacgctggtgatgccggagatggtcccggcagcgccgggtatgggattcacggtgatagcaagggttgcgggagttcctcctccgcaatcgttgactccgtataccgagatattacccgatacggcatcaacaccaaagtccacggtgatgctattggtactgctctgacccgttgcgccgttgggtaacgtccacgtataggaggtggcatgaacaatgggctctacgctatacaccaccgaggtctccccctgacaaacgtaggtgataccggagatggccccggctgcatcgggtaaggggttcacagtgatggcaagggttgcggaagcaccatcaccacagtagttggtaccataaaccgaaatatcacccgatacggcattattgctaaagctcacgctgatgctgttgctgctgctctgacccgttgcgccgttgggcagcccccaaacgtaggatgtggcgtgggcaatgggttccacgctgtacgccaccgaggtctccccctggcatatactagtgctacccataatggatcccgccacaccgggcagggtgttcacggtgatggcaagggttgcgggagttcctgcgccgcaattgttgactccgtaaaccgagatattccccgatacggcatcaacaccaaagtccacggtgatactattggtgctgctctgacccgttgctccgttgggtagcgtccactcataggagttggcgtaagcaatgggttgtacgctgtacaccactgaggtctcgccctggcaaatgctggtgataccggagatggccccggctgcattgggtatggggctcacagtgatggcaagggttgcaggaatcccattaccacaatcgttggtaccataaaccgaaatatcacccgatacggcatcattgccaaagttcacgctgatgctgttgctgctgctctgacccgttgccccgttgggcagcccccaaacgtaggatgtagcgttggcaatgggatctacgctgtacaccaccgatgcttcgccctggcaaaccacggtgcttcccgaaattgtacctgctgcatcagggaggtcgtatgcggtgatggcaagggttgcggaagctccttcgccgcaatagttgaccccgtaaaccgagatattgcccgaaacgaactcattgtcaaagtttacagtgatgctattggtgctgctctggcccgttgcaccgtcgggcagcgtccacacgtaagagttggcataagaaatgggctgaacggtgtacaccacccccgattctccctgacacacaccggttcttcccgaaatgggcccggctgcaccgggcagaggatctatgttgactgttacgctgccatgcatttgagcggtgcatcccgaacccggagtttcactccaaatggtataaataccttccgcctgttgcagtccgaaagaaatttcctcacccgtacccaccacagtagagacgagaacaacgccatttctatataatctgtaattgaagccgctttgcgaattgctaagttttacttccactccatcacctcctgcacagtaacttccacctcccataacaaagtaaacaacgggtagagggtgaactgttatgctcacagcagaagaatagtcttcatcgcaagctccattcctgacaaccgctctgtaatgccaaattccgggagtattaacaatttcggaataggtataagaagtatgagtaatagaagtccatccctccgaattgaactgtttctcccaccttataatgcttccgttaaaattggtaagggttaatgttcccgtggaactaccttcgcatatctgactgttattagaggttacaatgccacctaccgaggcagaggaaaccgtaatatccagccattgagaataatcaccctcacattgtgggttaattcccctcacgcgtacctgtgcagttccggtaaaaccatcagcccactcaaccgtaccgattgtaccgctgccgcctatggttcctgcttcatcggggcttagctcccactcatagctggtggaattgtcagcacctgttgtggagtagctcgtggtgggcgtccccacacaaaggtttgttgaacctgttggggtatcaggaattcccggcgaagcattgatagttaccggcttggtaacaaaatcgatgcactcagcgctattccgcacctcaagggttacatcgtaaacccctgcggtggcaaagatatgctcaatatcgcccctgtcggcaacgacaatcggagttccatcgccaaaatcccagtgatactctgccaaaggataaacaccggttgagttatcggatatcaaatgtggatggcctgaacatccctcaccggaggtgaaatcaaccaccaaatcgtcacaatgcatatcaaaagccttgatatttgtaatgctccatttgccgttccgatcctgtacccttacatagaggtaatgcgtacccaatgaaagtcccgaagcatcggcaattatttccagtgtgcctgtatcgggattgggtatgatgggataatcaaccccattcccaaaacccggatcggtatcaaaaaagtactcaaccttaactatgtccggtaattccgtactaacctgatccttgtaaaatgacttcacgttggtcataccccacttgccattggcatccataacccgtgtaaataggctatggaagccattatccagcgaggatatatccactgtgaacgatatgtcggtgatatcctgcccgggggttatgggtatattggttgcactgccaaatccgggatcggtattcacaaagtactctgccttaactatatcaggcgattggatgggaatcgtttccttgaaaaaagagttcacattggtcatactccacttgccattggcatccttaacccgtgtatatagataatggaagccattgcccaacgaggataaatccactgtgaatgatatatcggtgatatcctgcccgggggttatgggtatatcggttgcatcgccaaatccgggatcggtattcacaaagtactctgccttaataatatttggcaattggatgagaactgtttctttgtagaaggatttggaattggtttggctccaattaccattggcatccttaaccctaacatatagataatgagtacccctatccaaccaggataaatccactgtgaatgatacatcggtgatatcctgcccgggggttatgggaatatcggttgcgatgccaaatccggggtcttcattcacaaagtactctgccttaattatatcaggcgaatggatgggcaccgtttccttgaaaaaaggcttcacattggtcatactccacctgccattggcatccttaacccgggtatatagatgatggaagccattgcccaacgaggataaatccactgtgaatgatacgtcggtgatatcctgcccgggggttatgggaatatcggttgcgctgccaaatccggggtcttcattcacaaagtactctgcttgctctatatcaggcgaatgaatgggcaccgtttccttgaaaaaaggcttcacattggtaatactccacctaccattggcatccttaaccctggcgtatagatgatggaagccattgcccaacgaagataaatccacgacaaatgatatatcggtgatatcttgccctggggttatggggatattggttgcgctgccaaatccggggtcgtcattcacaaaatactctgccttaactatatcaggcgattggatgaataccgtttcctttagaaaaggcttcacattgatcatactccacttgccattggcatccttaacccgtgtgtatagattatggaagccattgcccaacgaggatacatccaccgcaaatgatataccggtgatatccggcccggggattatggggatattggttgcgctgccaaatccggggtcggtattcacaaagtactctgccttaattatatctggcgactggatgaataccctttccttgcagaagggtttgttgttggttaaactccaccttccgttttcgtccttaacccgcacaaacagattgtgaaagcccctgccaagaccctctatatcaaccacgaagttgatatcctccacattgggtgcagggccgaaggctaactctgttgcattgccgtatcccggatcggtgttgatgaaatattcagcataaaccacgttctgagacaggcccactgccgccctgcatagcaggagcagcagcagaattgctttccatctcatgcttagttatggcttttggctttgatagttacgttgagctgctgattaacgttgtctatggtctgctcatggtagtaaatagccggtacgcttggcagacctgatagtttataggggtaatcgccgccaaacattccgcaatccacaccgtcaacccctgctccaagggcaggtgaaccggcgctaagctgccactgcccatcggtacttcccgttccgacaaacacggtagtcatattcacattctgctgattgccattggctgtaccaaactgggtagagtttccaatattattgttgaaagaggagtttgtatgggtaaatacccccattgttagaatattattattaaaaattgtattgttgatggttacgtatccctcgataacattatttgaaatctcaccggcaaaatttgattgcacatcaatggcataacgagaactggtgtaagaagccattccgatgaaattgccgcaaataagcacattattggctgaacccgaacagtttatcgccctttgggtatagcctgtcgggaaatttcttgggataatatagttatttctaattatggtattattggtacttcctgtgaacaaaatggaagaatcgtaattggtgtggtagtggttaacaaaattcctttctatcagaatgcccgatgcattaatggtgattctgcccgtggtgcatccgcacaacaccgagccatcgctgccgctattaaattcaatggtgccaatggtgcttgaagtatgattcgcctgcaaaccctcattttctgcaaggaaatagcccgggccaataattaccagacgcttggtagcggtaaggtttccatagtttccggccgagggctcaaggtaaatggtgtcgcctgcatttgcagcattgtgcgctgcctgtatggttgtaaaatcggcattaacaccggctatgttgtttacgcgccatatggcggcattcaggtttactgacatggcaacgattactgttgctacaagaaaaagttttttcatggcaatgggattttttgtttatttagattagggttaattcctgagttttaataacaatggagtatattaatttaaaaatcagcaagtttcacattaggcatgcaacttacatattgaacaaatataaaacaaatcatttgggtaaaaggaatcccgtttaatcataggaacattgcatggcgtgtaccgtcacatggtccatatctctttctgattgcgccctatggggaatatttcattgctgttccgctgagggttaatggtcaacttcgtgccatgaggctcccgaaggatacttttatttcaactccatagtgtaatgaccgctaggcctacaacccctgcatttgaaagaataacttttgttgtagcgttacttattttagtatagtgatggataaccgatagcaatatagaatcttaggtgattttttattaaatttgttgaaaacaaaaatgcccccgtattgtaagacgagggcggcttaatgttttcacaacggaataatccttattgtgattttcttacaaaatgtaattacaaatttaactcataaacacatagaatccaaatattatgaaaaaaattttagggttagatctaggtaccacttctatagggtgggcctacgtaattgaggatgataattacgaaaaatctgaaataaaacagattggagtgcgtgtgaatccacttactgtggatgagcaaacaaactttgagaaagggcgcccattttctgttaatgctgaaagaacgcttaaacgcggggcccgaagaaatttggatagatataaagaccgtagagagaacttgaataaaattctcaagaagcataatatattgaatgagagtaccatattgacagaagatgggaaaaacacaacccatagtacatgggccataaggtcgaaggctaccacagaacgcattgaattggacgaatttgcaagggttctgctggctataaataagaaacgcggatataaaagcaaccgtaaagctaaggatgacgacgaggggcaggctattgatggaatggctattgcaaaaaaactttacgaagagaacctaacgccaggtcaatatgtatttcaactattgaaagaagggaaaaaagcagtgcccgatttttatcgctccgacctgcaagccgaatttgatagggtgtggcaaaagcagaagcagtactatccagatgtatttactgatactttttacgaggaagtcaaaggtaaggggcaacgtgctactgcagcaattttttggaatagatatggctttaatactgccgatattaaagaccttgaggatagtttaaaaactgagaaaaccattaaactaaatctaacggaaaggaaaaggttgcaggcatataagtggcgaaatgatgccattaacttacagctagcaaaggaagaagcagcatatgtaattgctgaaattaataagaatctgagcagttccagtggctatttgggcagtatttcagatagaagcaaggaactctatttcaataagcaaaccgtagggcagtatttatacaaacaattacaggaaaacagacacacacgtcttaagaatcaagttttttacaggcaggattatttagatgaatttgaaaaaatttgggaaacccaagccaaatatcacactgtacttacccccgaattgaaaagtgaaattcgcgataccattattttctatcagcgaagacttaaatcgcaaaaagaactcatcagtttctgcgaatttgaaagcaaagttattgaggttgaaaaggatggaaagaaaacaaccaaaaccataggcgcaagggttgctcctaggtcatcgccactattccaagaatttaagatttggcagattctaaataatatggttgtaaaaaagaagggaagcaaaaagagaaagccagttggagatgttaaacaaaccacgttgtttgaacaggaaaaagaaatattctcccttaatcttgaagaaaagcagctgttatttgatgagttgaatataaagggcacgcttaaagatgatgctattcttgaaatgttgggatgcaacaccaaagagtgggagatgaattacaagtctattgatggaaatcgtaccaacagggcactatacgatgcgtatctaaaaataattgaattatcagggcacgatgtaagggattaccttagggttaaaacatcgaaggatgagatagaattggatgacctaaaagttccagcttcgcagattaaggagatggtagttgctgtgttcgaaacccttggtattgatacaagtatcctagattttaatgcagaacttgagggcaaagcatttgagcagcagcctttctaccaattgtggcatttgctttattcctatgaaggtgataattctaaaagcggaaatgaacggttgtacaaactactggaggagaaatttggtttctcggaagagtatggtcgtatattggctaatgttccactactcgacgattatggcaacctttcaactaaggccattcgtagaattcttccttatataaaggagcatcaatatgatgaagcttgtagtttggcaggttataggcactctaaacattcgtttacaaaggatgaattggagaacaggattcttaagcgacgcctcgaacttcttaaaaagaatagtttaagacaaccagtagtggagaaggtacttaaccaaatggtgaacgtggtaaatacccttatcgacatagagaataaaaaactaaaggcaaagggaaaacccgaagattttcattttgatgagatacgtattgagttggcaagagaactgaagaatagtgcagaaaaacgtaaacagataaccgagggtattaataaggccaaaggtcaacatgagcaaattgccaaactactgcaaaatgaatttggcattaaaaatcccacccgaaatgatattattcgatacaaactatatgaagaacttaaggataatggttacaaggatttatacacaaatacctatattccgagagaaaaattatacagcaaagagatagatatagagcacattatccctcaatctaggctttttgacgatagtttttcaaacaaaacagtagtatatagagatgaaaatttaaaaaaaggtaatagaacagcctacgattacattttggaagattatggcgagggaaaattggacgagtttgtggtaagaatagagaaactttttcaacttggacaaaagtcaaaagaaggtggattgtccaaagccaagtatagaaaactgctgaaaagtgagagtgaaattgaagatggattaattgagcgcgacttgcgtgagacccagtatattgccaaaaaggctaaggagatgctatttaccattaccagaagggtagtcactaccacagggcaggttacagataagttacgcgaagattgggggctaataaatgtgatgaaagaactaaatctgcccaaatatcgtgcattagggcttaccgaaatggaggagcgcaagtatggacaacaagtggaagtgattaaggattggaccaagcgcaatgatcaccgccatcatgctatggatgctcttactgttgcattcaccaagcacagccatatacaatatctcaactacctgaatgcgagaaataaccccacccataaacttcatggcaatatcatagccatagagaaaaaagagttggaagagcatgtaaataaaaatggtacaaaaaccaggttatttaaagagccaatgcccaactttagactcgaggctaaaaaacatttggaaaacgtaatcatttcgcataagagtaaaaataaggtggttactaagaacaagaatagaatttccggaaaaagtcaaccacaaattacccttacgccccgagggcagctacacaaagaaacggtatatggcttataccactactacgaaaccaaaatggaaaaggtgggcacaaagtttgatttggaaaccatagcaaaagtcgccaatcctgtatatcgtaacgctttgctccaaagacttgctgagtataacaacgaccccaaaaaagcatttggtggtgccaattcgccctccaaaaaaccaatatataccgatgaaacgcaaactaaaaaggtacctgaacaggtaaaactatcatgttcggcaaccgattactctgttagaaaagatgtaacccccgaaaactttaaagaagacaaggacattgacaaagtacttgacaaggggattgtaaaattactgagggaaaggctacaggagtttgggggcgatgccaaaaaggctttctccgaccttgatttaaatcccatatggcaaaacaaggaaaaagggatagccattaagcgggttaccataagcggggtgaagaacgccgagccacttcactataaaaaggaccatcatggtaagctgatacttgataagcacggcaatcccataccagttgattttgtgagtacaggcaataaccaccatgtggccatttaccgcgacgagcagggagcactacaggaaaaagtggtttcgttttttgaagcggtaacccgtgtaaaccaagggctacccataattgataaggggtataactcttatttaggttggaaattccttttcaccatgaagcagaatgaactttttgtttttcccaataagaaaactgggttcgacccttctgaaattgatttgctcgaccccgctaacaaggctcttattagtccaaacctttttagggtgcaaaaaattgctacaaaagattatttcttcagacatcaccttgaaacgagtgttgacaacctttcaggcactaaaaatttcttttggaaaagagaaggtttgaaaggcatcgatggtattgttaaagttcgaaccaaccaccttggtgatatagttggagtgggggagtattgaataaaaccacttaggggttgactttgagtcaacccctaagtaacctcataatttgttgtaatgattatcgagcagggtcatctataccatatctacaatcagggcaacaaccgccagcacatcttttttgaaagggatattacctcgtttcaaaatgaataaattaggaaatatttttaaagcataagtatgaacagatatatacaacaactcctcgaaatgctgcgcgaagcgcagaggaatcgcccttcacctcgccttatggaattgccagaggatatggaagtgctacgggatgtgattgacttggaagtatcgcttgaggaggaacaccaaaccatggagagcatatttggcgtgccccacatctattttccacccgaagatcgcttaactgaccaacaggttagtttattgaaacaaagtattcttgaactttggcgtgcatttaattacgaggccgactttagaaaaggtgagtttaatgaacgccaacagtacaccaaattggtagaatattggaaacaagaggttccggttcttagaggtaccaatggtacttggcatatggaaatgttcgattacgaaaagtattgggacgaagagaagatgcgatatctgtcggatgaagaaataaatgcaaaatacaactatgatgactaaaatgaaagatttgcctccactaaagggttgtctccaaggcaacccttcagtaacatgatacgttatgatttttgaggaagggcatctatatcatatctataatcagggcaacaaccacgggcgtatcttttttagcagggagaactacctgttcttcctaaaaaagattgaacaacacgttctgccttttgccgatatacttgcctggtgcctgatgcccaaccatttccacttgatggtgcatgtgaacagggtggaattgagtgtttctactcaaggaactactcaaggcttgacttcaagtcaaaccttgagtagtaaaacacgaactttaaaccactccatcggcattatgctccgatcctatacccgcgccattaatattcaggagaaaagctcaggtgcccttttccaacagcaaaccaaggctatttgccttacactcaatcagggaataaccccgggttggtttcatagcccgggtattacacaaataaatattcaacaccccgaaaatcaataccccaatatctgtttcaactatatcaactttaatcccgttaaggatggattggtaacaaaatgcgaggattgggaattctcatcgtatcccgatattatgggctttagagatggtaagctaatcaaccgaaaacgtattgaggcgtttgggttatctctaaaccggtgatgaacaacctgtcaacttcatcaaatagtgctttcctgacttgtcccctttcaaattagtacgatggtaaatgactaataatcaatgtaagcattgaaaaaagggagaaatttaccgcactaagacgttttttcaaccaaaggcaatgagcaatgagcaacgaccaactccgcatcccgcaacccccaaatcctttaagaccaacactagggcctttccgcacagccaaaagtgcgtgggcccggtaaaccggcgggccggcgatggcgtgaatggccaaacccgtaggattctgcccaagaggtttaccagcttgggctagaatccgagaatttgggcagggcggggtgaagcatcggtttaccttgattttttttgtttacttttttgtatcaagacaaaaaagtgaatggggtttggggcaaagccccaatggaaaatgatccacgaagtttcgaaaaacatttaaaggggttaagataagaaccaaaattccctccgaatacttgaaaataattgaaaagatatatctaacgcaacgcactaaagggaacaagtcaggaaccgtaaacgtattgaggcgctttggttatctctaaaccggtgatgaacaaccaatctgcttcatcaaatagtgctttgtgtgagaatgttacgcccacagcaccaaaagggtcattcatcaaagaattaggcaaattgctcataatgtgttggttaaaaacaacattgtgtatgtaaaaaaacgtataatgctataaaccaacacctgagcactatgattaagcgtaccctttactttgggaaccccgcctaccttagcacccgacacgagcagctggtggtgcggcttcccgaagtggaaaagaacgaaaccctccccaagagtttcaggagggattcagagaccaccatacccattgaggatatcggtgtggtgataaccgaccatcagcagattacccttacccacgggctaatggagaagctactggccaacaactgcgccctggtaacctgcaatagtgcccatatgcccgtgggcctgctgctgccactggagggcaatacggtgcaaaccgagcgattcaggcagcagattgatgcatcggtaccgctaaaaaaacagctgtggcagcaaacggtaaaggctaagattaccaatcaggccactctgcttaggatagcccgtggtgccgatgtagagaatatgcagtggtgggccgcaagggttgcctcgggcgataccgagaaccacgaggctagggcggcagcctactactgggcaaacctattccccatagaggactttcgaaggggacgcgatgaaccaccaccaaacaatctgcttaactatggctacgccattctgagggccattgccgcaagggccctggtggcatcggggctgctacccaccctgggcttacaccaccacaatcgctacaacgcctactgcctggccgacgatattatggaaccctaccgtccctttgtggatagggtggtgcttaaaattgtgcaagagggagcggactaccaccagctctcccaagaggtgaagtgccagctgcttagcatccccacgctggacgtgctgatcaacgagcggcgaagccccctgatgctggccctgtcgcaaaccaccgcctcgctcaacagctgcttcgagggcacggcacgaagggtggcatatccccaatttgttgaataatggaacgcctaagcgagtatagggttatgtgggtaatggtgctattcgacttgccaaccgaaaccaagaaggacaggaaaatctatgccgactttagaaagaaaatgctcaaggacggctttgtcatgttccagttctccatatacatacgccactgccccagtcgcgagaatgccgaggtgcacatcaaacgcgtcaagtcacacctgcccccccggggcaatgtgggcatactgcgcataaccgataagcagtttggcgatatggagctgtactacggcaaggaacccaaagagaaggaaacaccccatatccagctacagctattctaatatatgggtggcgtagctatccggtatgcagaaaggttacgatggtagtgcaacaaaaaaagctccccaaagggagctttcttggtattgctaaccatccgatttttaatcctaaatactgaactaacatcctattacccagcgcaaaacatcgtggtctgatgttagcaatctatcaaagatacattttgtaagcaaatcacaaccctttggtaatcgtttttgttgtcatgactgatgttagcaatctatcaaagatacattttgtaagcaaatcacaacggttcccgtaacttaatggtgaatttgcccgatgttagcaatctatcaaagatacattttgtaagcaaatcacaacgggcaagtaacgaatccttcatctctccaggatgttagcaatctatcaaagatacattttgtaagcaaatcacaacgaaccagctagagcgggtgatgaggagtaagatgttagcaatctatcaaagatacattttgtaagcaaatcacaacggctacgcaaggggtgctgacttcgtttgagatgttagcaatctatcaaagatacattttgtaagcaaatcacaactgaaatcaattttttctctgagtgaactacgatgttagcaatctatcaaagatacattttgtaagcaaatcacaaccggggcattccagcagtcgaactaccgagggatgttagcaatctatcaaagatacattttgtaagcaaatcacaactggttgtcggcatacaagcggcgttgtaaggatgttagcaatctatcaaagatacattttgtaagcaaatcacaactctatgttgatggcaaaataaaaactcaaagatgttagcaatctatcaaagatacattttgtaagcaaatcacaaccagaatcggagtggaaatcgtaagcagggtgatgttagcaatctatcaaagatacattttgtaagcaaatcacaacagaagatttctggtcctaaaaaaagatcttgatgttagcaatctatcaaagatacattttgtaagcaaatcacaacatggcgacaaaagtatgaaaaaattgagaagatgttagcaatctatcaaagatacattttgtaagcaaatcacaacatccaaccagtttgaaatgttttttccaagatgttagcaatctatcaaagatacattttgtaagcaaatcacaaccatcacaatttacagcggtaggtgtcaaaagatgttagcaatctatcaaagatacattttgtaagcaaatcacaactatacttgtaatctaccacttgttcggatgatgttagcaatctatcaaagatacattttgtaagcaaatcacaacaaataaaaacttattaataaacaatttaaagatgttagcaatctatcaaagatacattttgtaagcaaatcacaacgcaaaaacagcgaacttattgcgtgttcttgatgttagcaatctatcaaagatacattttgtaagcaaatcacaacgcaaaaacagcgaacttattgcgtgttcttgatgttagcaatctatcaaagatacattttgtaagcaaatcacaactgcttgtgaaataatctttgagaaatctacgatgttagcaatctatcaaagatacattttgtaagcaaatcacaacttggaaatgtaaggataggattatcgtaaggatgttagcaatctatcaaagatacattttgtaagcaaatcacaaccacttcaaccaacaggaatataaggaatatgatgttagcaatctatcaaagatacattttgtaagcaaatcacaacttatgattttgatattcccaccggcaaaatgatgttagcaatctatcaaagatacattttgtaagcaaatcacaacttcggggtattgattccatagtgggggtgagatgttagcaatctatcaaagatacattttgtaagcaaatcacaacacgaaggtcggaataagaaaggtcgcagccgatgttagcaatctatcaaagatacattttgtaagcaaatcacaacaatccaagaggtggctattgaggagtatgagatgttagcaatctatcaaagatacgaaacgcaagcaattcacaacatgtatctatctgtaagaatatggaaatgggatgttagcaatctatcaaagatacgaccccgattcactccatcgggggtaagcaattcacaaccttgtaggccttatcgcgatcttttattaagatgttagcaatctatcaaagatacgaaacgcaagcaattcacaacgccgggccaaattattactaaaccgcatttgatgttagcaatctatcaaagatacgaccccgattcactccatcgggggtaagcaattcacaacacttgaatcaggacggtttgttcaatgaaagaatggctggtaattcatattatttcactaatgaaccataaggaatttaaggattgtaatccacaaatattatgttttttgtggatttgattccttatttatatatatttgcaaaaaaagtatcatgatagacagaataatagaaaagcaaataagagatagtttttttaggggcaaagcaatagttattgtgggccctcgccaatcggggaaaactactctggtaaataaaattttagaagattatggttctgaaagcttgtttttagatgccgatgatcccaatgtagaaaaactgctcactcgcccaaatacaatgcaaattgaaagtattattggaaataaaaccattgtatttattgatgaagcccaacggattagggatattggaataacttcgaaaataattgttgaccaatttaagaacgtgcaattagttttaagcggttcgtcggcgtttgatttggcacaacaaacaaatgagcctttaaccggcagaaaacgaagttttaatctgttccctatttcatgggcagaatggcaaaatcatattggttttgtaaaagctgagcaggatattgaaaatcgcctggtttatggtttttaccccgatattttaaactcaccaaatgaggcaaatatatacttgagagagttggctgaatcctatttatataaggatattctgatgtatggggatgtaaaaaaaccggatattttaaaacgcttgctacaagcgttggcttttcaggttgggaacgaagtctcactgagagaattaggcgaaatagtaggtttagaccccaaaaccgttgacagatatatttctatgttggaaaaagcctatgtggtgtttagattgcctgcgttaagtagaaatctgcggaatgaaataaaaacgaataggaagatttatttctatgataatggtattagaaatgcggctattgcccaattgcaggcattgcccctcaggcaggatattgggcagctgtgggaaaattttatagtaagcgaaaggcttaagcatttgaattacaataatatatttgccaatgcatatttttggcgaacaacccaacagcaagaaattgattatattgaggaaatagatggtgaattttttgcttacgaagtaaaatggaatcccaaacgcaaagtgcattttccgaaaacctttactgactcatacaaagcaaactttactaccattaatcgcgaaaattttcacgattttttaacgtaatagtgaaatttaaagattgtaatccacaaatattatggtttttgtggatttgattccttatttataaaccttcaagggcactcacgatgcatcgggatcgcagagaatttccttagcggttctagccttcggaactttggtactttgcggttctttgcttcccgattcccgatgtttcgggatcgggattgcgtttctttgcgttaattcttttttagtaccgcagagttacgccaagtaccgctaagttgcgcggagtttttttttacttttttgtatcaagacaaaaaagtgaatggggtttggggcaaagccccaatggacaatgagccacgaaacttcgagaaataattaaaagagattaggataagaaccaagattccctccgaatactttgaagtaattgaaaagttatatctaacgcactcaagggaacaagtcaggaaaaaattgggagcaccgggtaacgcctccgggatattacggcattcaacttcatgtttacgttttaaaaaccattaagcacccaaagtcaaaaaaatttggctcgccacggataatttaaccccggtatggtcgttaccatttaggttttctacaaatggcggggtatgaaaaccccacaatccggacatggttaattgccccgcttgtggaaaacccctgaggtgttttttgcagctgatgggttgaaatttcaaaaatatgtttacttttacgtgatttagccaatggctgccctttcgggggcaaggctttttgggttacttattttttgcattgaaaaatactgcacaatgagagggatagcaaaactactattcgtattaggattcattgggatattcgtaaatggtgaggcccaaaccaatcgtttgaagcgcgccaatgcgctgtacgacgccggaggatactttgaggccattgaactctacaggcacgatctggacaaagtggctaaggaggagatggggttatacctcaccaagattggcgattgctaccggttgattgggaatgcacggcaggccgagatctggtattccaaagccatattgcgggatcctcccgatccgcgtgtttactacttctatgccgaaatgctgaagatgaacgagaagtacgacgaggccctggagcagtaccaaaaatataaacagctggtacccaacgatcccctcaccgattttggcattcaatcgtgcgatttggccaagaagtggatggaaagcccttcgggctacgaggtgctgaatatgcgggccataaacagcaagcagagcgacttcagcccggcttacctctccgacgattacagcgttctgctattcaccagctcgcgaaacgaggcaaccggaacgaaaaaccacgccggtaccggtgaaaagttcaccgatatcttcataacccagcgcgataaaaagggaacatggagcactccccgccccctcgatggtaatattaatacccccaatgatgagggaaccccttcggttacagccaatttcaacaagatttacttcacccgctgccgggcaggcaagcgcaacaagctgggctgcgaaatactggtgagcgaaaggcgtgaacagggatggctcacacccgaagtcctgccactggctcccgacagcatggtggtggcccatccggccatatcggccgacgagctgacgctctacttcgttagcaacatccccggaggatacggaggcaaggatatttggaaggttacccgcaactccccgtcggacaactggggagagcccgttaaccttggccccgatatcaataccagggggaatgaaatgttcccctttatccaccccgacggaaccctttacttttcgtccgatggccatcccggaatgggaggtctggatatattccgcgccaaggccaaggagagcggcaacggatgggaggtggagaatatgcgataccccatcaactcacccgccgacgactttgggattatctttgaaaaggacagggaggcaggctacttcacctcgcgaagacacgattcaggaacccggggtggcgacaacattttcgtattctacctacccgagctgatctttaacctgctgggcgatgtgaaggacgaaaaaaccggaatgccccttgccaatgcaacggtacaaatggttggaagcgatggcattattgtggataccaaaaccgatgtacggggaaatttcaaattttcgctaaatcctgccaccgattatgtgcttatcgcttcgcttaagggatatctcaacggcaagggcagggaaacaacccgcggcgtgcagctgagtcaggatttcaaaatgtccattaccctcacctccaccgcacgacccattgagctgcccaatattttctacgattacgaccggtgggagctcaggcccgaatccatggccgccttggacaggctggtggaggtgctcaacgacaaccccaccattatcatcgagctgggggcacacaccgatagccgcggaaccatggagtacaactacgaactgtcgcagaaacgtgcgcaatcggtggttaactatctcattgagaagggaattcccaccgcaaggcttagggcaaaagggtatgcacaatcgcaacctaaggttgtggacgaacagctgattaaccagtacccgttcctcaccatcggggcagtcctcaaccaacagctcatcgatggcctgtccgatgataatcagaaggagatggttcatcagattaacaggaggaccgagtttagggtacttagcaccgactataaaccggaataaaacgaaggcttaaacgggttgtcaatgtccaggtttgtaatcatagtattgctatccctaacggtgacctttggttttggccaaaagatatatcagggcaattcggccaatgaagcccagatcaaggtttttgccgttgacgagcccaacgatgccgatttgtgggtttg

SEQ ID NO: 2105 - DNA, 24338 bp, synthetic construct
  source 1..24338: mol_type = other DNA
  misc_feature 1..24338: note = Synthetic
aagggtatcgaaatctctgcaactgttaagccaatcgtcaagaacgacatgtactgggaaatcagtgctaacatgacatacaacgacaacaagattaccgagctcacaggcgatgcaagtatcgttcaggctaaggacggcggtatcagcgcaggtacaggtaacgtggctcagtatcacaccgttggaaagccagcacgttcatactgggtttatcagcaggtttatgacgagaaccgtatgcctatcgagggcttgtatgttgaccgcaacggcgacggacagattacaaccgaagaccgctacttctacaagagtgcatctgctccgttcacattcggctttgctactcgcttccagtacaagaactgggatttgggctgctcattccgcggtagcatcggcaactacgtgtttaacgaccgcgaggctggctttgtgaatgtagcaaagacttacgacagctcattcaactacacacacaatatcttgaagaagtctgccgagactaactggtgtacttacgacaatgtattgtctgactactttgtgcagaacgcatcgttcctgaagtgcgacaacatcacactcggttacagtttcaacaacctgttcaaggctgccaagtacaagggcgtgagcggacgcatctacgttgctgcatcaaacgtatttacaattaccaagtatgatggcttggacccagaggttgagggcggtatcgacaacaacatctacccacgtccattcaacacaatgcttggcttgtcacttaatttctaatccaaaagatataaagctatgactattagattcaaacatatagttccgggagccgtaatggctttgtcactcggaatggcatcatgcgatgtattggacgtaacacctatcgatccgggcacggtgatgaaggttgatgccaacggacttatgaacaagtgctatgcaaatatggctatcgccggtcagcaaggtccagatgatggcgactgcgatgttgacggactcgacggcggtactacaggtttcgtacgccagttgtggaatgccaacgagcttccaaccgatgaggctatgtgctgctggggcgatgatggtatcagctcgttcaacttcaaccagtacacaagttcgcacccaatgttgcagggcttctactatcgtctttataccggcattgactattgcaaccactatcttgagaagtgtgccgactacgatgccacaatgacagccgaggctcgtttcctccgcgccatgtattactatcatcttatggactgcttcggaaacgttcctttcaccgaggtcatttcttccgactgtcctaagcagataaagagagccgacttgttcaagtatatcgagaaggagcttcttgagattgagccgaaccttcttgaggctgaggcaagaacaagctcagacaagaactacggtcgtgccgacaagagtgccgcttggcttcttcttgcccgtctgtacctcaatgccgaggtctacaccggaacggcccagtgggcaaaggctaaggagtatgctgagaaggttatcaactcaaagcacgttctttggacaaacggcgcaaacggattttcggcatatcagatgctgttcatgggcgacaacggcgagagtggtgcttcttgcgaggcaatcctgccagtgcttcaggatggtgttacaacaacatcatacggtacaacaatgttccttatggcttcatgctggaaggctgatatgaacacatacggtaactacaatacaacagagttctggtcaggtaaccgcgcccgcaagaatctggtagacaagttcttcccaacatcagacgccccaaacgtcgagaccgagattatgactaccgaggcaggcgacgaccgcgctcttttctacggaaaggaccgtacccttagcatcaccgacccagccgagtttacatcgggcttctctgttgccaagtatcgcaacacatacagcacaggcggttcggctcatgcaacaaagtttgtcgataccgattacttcctgatgcgttctgctgaggcttatcttattgctgccgaggctgatgcacgcaccaacggaggcacgacaagcgagactggcgcaaagtacatcaacgcactccgcactcgcgcacatgcttcaacaaaggctgcgtactctttgctggatattctcgacgagcgctctcgcgagctttacttcgaaggcttccgccgtaccgaccttgtccgctatggtcagtttgcaggcatgagcgactacaagtgggagtggaaaggcggcgttcagggcggtgtaaacatcgactcacacctgaacatcttcgctattccttatgccgatatgaacgcaaatcctaatttggttcagaatccgggttactaacaacatctaattaaagatacagatatgaataatatattaaaatcatcaataatgcttggctgtctggctgttttcgcagcatgtaacacagatgtagacagcaatcctgttgttggaagcgagtgttatcctgttccgcagacattcgtgcttaacactccggcttattctacgcaggatatcgatttgcagaagtcaaagaccctgaacctcacttggtctcagccaaattacggattccctacaactccggtttattctgtcgagatgtcgggaacaggcaacttcaccactctttacaccgaggacgaggacggaaacgttatcggcaagcctgattacgttttgctcgacgagacagtgaagggtaaggtaacgggcgagttcacttcttctgagatagacaagacactcgaaaaactcatgggatggaaggagtctaccgatattcctgagaaacagaaactgttcttccgcatcaagtcggctcttgtcggagctgacggcaaagagtacggcgttgttcgttcgaacatcgttgaactgaaggtccttccatactacgaggctctgaaggctgccgccccagacttctggtacatggttggcggatgtatcggcgatggctcatggagcaacaatgccgatggcaagggcgtgagcatcgcaccattgttcgcagtagacggagagaagtatgatgccaagacaggcgacggcttgtttgagtatgtaagctggttcccagccggaggctcattcaagattcttgagtttgttggtaactgggattacggaatctgtgccgacggtgcttatcgtaacggcggcgacgatccgggcgacattaaggttgctgatgctggctactacacaatcactcttaacacagcatctcacgagttcagcatgaaggcatacgagggcactccaaaggtttacgagagcatctgccttgcaggtacattcaacgactggggcgaccagccaatgtcagccttcaacacatacgatggcgcagaaaaccacatctggactgctaacttcacagccggcgacggttgcaagctgaagttcaagatggcaggttcttgggacgacaactggggaagcacatcattcccttacggtacgggcaagaacggcggtgccgacatcgaggttgaaccgggcgactacatcatttacttcaatgatattaccggtcagtataatttcattaaaaagtaattcttaacaagtattcaatatgaaaaagcatatattgttctcaatggtacttgcagcctctatggctgcttgtacctccgactataccgactgggcgaagccgcttcagagcgcagtcgaagaggcaaaatcgggcacttatgtaaccacatcggtcgatgccattaagattgccgatgttacaggcgacagcgttaacatcttcaacagccgccttaacattcctgccggaacagatatcaccgagagcaccgttactttcgacgagactcagactattaacatcagcacaagcggaaaggtttccgttgccgaccttgtttcggcagtcgaggctctgtacggaaaggctccaaacgagcgtactctgtcgggcgtggcaacagtctactattcagacaacggtcaggcaatgcgtgccatggctgacaagaccgaggttaaggtatcgctctctgctccgttcatatcttcaagctactatctcattggcgatatggtttatacgatgaacggcggcaacaagtcaaattggaatgccgagaatcttctcaagttcaaccacagcgacaagaatgtgtacgacgaccctgagttcaccgttgtattcacaaccgatgctgcagaccagtactggaagattatgccgtacgagaatatcaatcttgaaaacatttgggaccccggcgttgttggaactattgttgatggagatacaagtctctctggaaagctcacaaccgataatccaaaggctggtaagattgaagagccgggcatctatcgcatgactcttaacatgatggagtacacttacaagattgagaaactcaacttcaaggagttcttctatgagattggcggtgagagtacctggggggtaactcacgctctgtacggcaagaatttcgacggaaagtatcagggatattactatctcgacagcgagttcaagttcagaccaaatgcagataactgggaaggcgactatgaattcaacggcgagggtaagatttctgacaacggcggttctaactgtcctgctccagaggctgccttctatcagattgatgtagaccttgctgctggaacttatgccctcacggcagtcaagagcattacgatggttggtacacacaatagttggaatgttgctgatgccgcaactcacatgacatacaacaaggaggagaactgctggcagattgaatacacatttgccgagcagacaagccttaagtttgccatgaacgacgactggacagtgagctggggcggtgccaacggagatgcttcgaactatggcaaccttactcagaacaacggaaaggatctttcggttgctgccggaacatatctcatcaagctgttcttgagttatgagggtgcaaacaaggttacgtttactccgaaaaactaataaaggttaattcttggttattattaagtaaatcctgctcggtcgtgttgacagggcaggattttttttgtgtataatcagtaacttacgcgaattcggggtaacgaaacacgttttcgcgttttgttattcgaacaaattacattatgcaaaataatacagattaaaatgaatcatcatacaaaaagataacaaaaagcccctttcttggtaaggggatagtaaggggatagtaagggggtagcaagagggtagcaagggggtagcttcgtcctaggttgatgaaacgtatattaatgcatcgaatcggtataagaaacttcatttttctatatcgtgagatgattatttggaatgacgctggaagcgtcacctctcagtaaccgcagcatccgtaggaactgcggacagttcgaataattttgaccctgaaagcggtcgcccattgcgatagatggggcactccttcagagtgctttttttgattgtgcactatttccgcaggtcgttccgacctacggttactaagcggagacgccttcagcgtctgtaaaaaacacgcaatcttctgataatctataagtaaaaggctcaaaaaaataaagggattctaataattagaaatccctttaagtgcgaacagactaaaaaaagcccactacgtcgctggttggtaatcaaaccgttgcaaatatagtcatcaaatcttttaaagccaaattttttttggctgaaatttgtttttttaacgaaatatgattcatggtactaaaaaaatagaaggcaaacgctcgtttaccgaggcttgccttctgtcgtcaagttagttttaaaagaagagaggtttttctatttcgttatttctgtcttattcgaaaacaagatgcaaaaaggtgttgctataatatcaataccgaaaataacgtatcttgccatagcatcgcttgaagggaaaagcaggcagattgtaattccaatgattgatataagcaagttgattgtctccgattttatgttggcgtcagagaaaatcataattgtttctgatattttctttggatagacaagtaatccgtaagcagaaatcagaatcgtcagaatcacaaagatatatgctgcagtcattacgttatcgcagttgtaccaaagtggtgacaatgcgtaaacgaagaatcctactttaggaaaagttctaatatttctgcaaataaagcttttcattgttcctctgttgatttgaaaatgttaattgtttctttgtgcaaaaatacaataaaaagtaatatattgtataaaaaatgcattgaaaagtttgcttttgttaggaaatatgtttgattttgtgcaaaattcgttatgaacactatagtggtgataggtatatttagcaaaatttcgtaaattctgaatgatttttcacttttcatataaaaaaaacgcctttacctctcttttaaatcacatttatatgatatttttgcagcaaaaaaaaacagaaatatggttaccgcatcaattataatagtcacgtcgataatttcaattgtggcttttccgaaaaacaatccgtttccgcgttgtatggctcgtcccgatttgttggacaaatttatgttcaatccgtattttgtaagccatttcaaggagtactatcgtatgcttgcgtcggggcttgtacacagcggatggtggcatcttctgttcaacatgataaccctttactttgtgggcaatttggttgaggaggcttttgtggggatttatggcagtttgctgggcaggattatctatcttgtcttttatcttcttgccttgattgtctcatcaatttccgacttgattaaatatcgcgataagttgttatatagtttttatggggcatcgggtgcagttacggcggtaatttttgctgctgtagttatttatcctaaaattagtttttatttatttttcattccaattcctattccgggatatgttattgctctgcttattctgctctacagctattatgttatggcaaaacagaaatccagttacttcggacatgctgcccatttctggggtggactgttcggactgtttttcccgatatttgtttatccgccaatacttgtgcatttaataagtctgttcttgaaatagatttaagtcatacttagttttgccgatagcctttatgcggcaaaaatcccagtcgtagtttacgtcctgtttttcagaacgtaaactacgtttgttatatgtcgattctaacattgttcttgtgtaggttattaagtctgatatcagcataccgcgcaagcggaatcgtttgcgctcgtaaaacgtaaattttcagtattttaacgtttttttgtaatccaaagaaacttatatttgcaacgtaatcaaaaagataatatcatgagggtacggaaattcattgacagatgtgccaagaaaacggctgttgccgtggcggcactcaccgtggcagcatcggcttcggctcagggctggccggcagcatacggcggcgtaatgcttcagggattctattgggattcgtatgtagacacgcagtggaactatcttgaaaagcaggcagatgagatttcccagtatttcagtcttgtttgggtgccaaacagcggctattgcggctcgggcaacaacatgggatacatgcctcagtattatttcaaccagaattcatcgttcggaagcgaggctgaactgctttcgatgattaagacatacaaggagaagggcacaggcttcattgccgatgtggttataaaccatcgcaacaaccttggtgttggcggctcgtgggctgattttgctgccgagacatacaacggtgttaagtatcagatgctcccttcggatatctgctctgacgatgacaacggtcagactgcagcatgggcatcaggtaacggcatttcgcttagttccaacaaagatacgggcgagggctggagcggttgccgcgacatcgaccacaagagtgcgaatgtgaataaggtggtaaaggcatatctcggctatcttcagaatacattaggatatgccggtttccgctacgatatggttaagggctacagcgcatcgttcactggcgattacaacagtacggttaatgccacatattcggtgggcgagtactgggacggcaatacagcagttgttaagaactggattgacggcacaaaggtgaacggcactgttcagagtgcggcgttcgattttccgttccgatatacttgtcgcgatgccgtggcatcatcgggctacaactggtcaaaactgacaaacggttcgttgatgagcgatgctaattatcgccgctattcggttacgttcgtagagaatcacgacactcaggtgcgctcggctaacgaccagcaagaccctatccgtcgcgacacacttgcgcttaacgcgtggatgcttgcaatgcccggaacgccttgcgtctttctgaagcattggattgactgcaagcaggagataaaggcgatgattgatgctcgaaaggctgtcggaataaataatcagagcacttatagcgagtatatttcgcaggcggcaaagtgcatcagaacggttactggcgagaacggtcagctacgcgttatcgtgggcgacaagagcaacactaacattcctaacacgatggttcaggttctcgacggataccattatcgctatctgatgagcaagagcaccgagattgcttgggcagataaggcttcgggcgattatgaggaggctttcaaggttaagcttgtggctgtctctgctcacgacgatgcacagctcgtttacaccaccgacggcacagaaccatcggcaactaacggcacaaaggtggcaagcggtacggatattgaaatttcttcgaactgcacgctcaaggttgccctcattgttggcggaacagtaaagaacgtggcaacgcgcaaatataccgtcactccgtttgtggctcacaaggcaacagtctacttcaagaatcctgactggacatctgtttatttctatgcttgggattcgtcaaacactttgcttggctcatggccgggaataaagatgaccgacaaggttgttatcgacggcgtggagtggtattacaaggcattcgacgtaaacaagaagggctataccttcaacatcatattcaacaagggcatgggacagcagcagactgtcgatatcggtcctatcagtcaggatgtttattacgaactatcgggctcaaacggcgataagctaacggttaaggaggttacgccgtctggagcgacatcggttacacagcctgtcgttaatgacggtttcgagattgcatcggcaaacggccgattagtgattaagagtaacatcagcaaggtagttccagtatatacagcgcaaggcgtattggtaaagaaattgaaagttgagagagggttaaatgattttggtgatatgcagcctggtctgtatataatctctaaccagaaagtggtagtaagttattaaaaagggaaaagttttttacaatgtaattttaagtttttcggaaaaagtatttcaatagtttttatttcatattgggtaaaagagagaatggtgtctgcgtgagcaggcaccgttttttgtagtaagtcttggatggtgtttaaatggtattttattatgcttaaaatagatatagttgtgatgatataaagaaagcgactcccgaaagagccgctttagatgttttcacaacggaataatccttattgtgatttgcttcaaaattagtgttgcaaatatacaaggtattttttattatccaataaaattctcagtttttttactatgaatactgaaaatttgatgatgttgcaaaagtctatgcctttttgtttgtcttttctaaatatatttgataatttagcacattattagaatctatattacaataaaaacaaatttatgaagaaaattttaggtcttgaccttggtacaaatagtattggttgggcggtggtgaatgaggcagaaaacgctgatgaacggtcgtctatcgtaaagttgggagtaagggtaaatcctcttactgtcgatgagttgacaaatttcgaaaagggaaaaagtattacaactaatgccgaccgcactctcaaacgtagtatgcgtcgtaatttgcaacgctacaaacttcgtcgcgagcatcttattgatatcttgaaagcaaaggtttttatctccaatgatacaattctgtcggaaaatggcaatcgtacaactttcgagacatatcgtcttcgtgctaaggctgcaacggaagaaatttcgcttactgattttgcacgcgttttgttgatgataaacaaaaaacgcggttacaagagcagtcgtaaggctaagaatacagaagaagggcaactgattgacggcatggagattgcacaacgtctgtatgatgaaaatctcactccggggcagttgtcgttagagttgctgaagaacggaaagaaatatcttcccgatttctatcgttccgatttgcagtcggaatttgacaaggtttggaaggcgcagaaacagttttatcctgatttattgacaaatgacttgaaagaaaatctgcaaggtaaaaacaaaacgcagacgtggtctatttgccaaaagccttttgaaatagtaggtatcaaacgaaaaactaagggcaacgaacagaaagtagagaattacagttggcgtgtgaaggctctttccgaaaagatggatttggaagagctggctattgttttgcaagaaatcaatggtcaaataaacaatgcgagcggttatttaggtaacatcagcgaccgaagcaaggaactctatttcaaccatcagaccgttggccaataccagatggcgcagttggacaagaatccaaactacagcctgaaaaatcaggttttctatcgtcaggactatctgaatgaatttgaaaccatttgggagacgcaagccaaatatcataaggaactcacgtctgaactcaaaaaagagattcgtgatgtggttattttctatcaacgtccgctaaaatcgcaaaaaggattgatttcgttctgcgagtttgaaagcagacagattgaggttgaggtagatggcaagaagaagctgaaaaccatcggctgccgtgtttgcccgaagtcatctcctttgttccaagaattcaagatttggcagaggctcaacgatgtggaagtgtcgggcttgattgtgccaaatatgcagcatgatttattcggatttgccaaagattatacatacgggaaacgtaggctgcaacaagaagagaaagaaatgttgttcgccgagttgaactacaaagagaaactttcgaaaaacgaagttctgaaactgctcttcccgaaacaaaaagaggtcgatatgaacttcaaagagttagatggaaatcgcacgcaagccgaattgttcaaggcatatcagaccattgcggaacaaagtggccacgatgtaggagatttatcgaaaaaaacagctaaagaaatagttggctgcatttctgagatttttgccacaatcggtatcaatcccgaaatattgtcgttcaattccggccttgaaggaaaagagtttgagcagcagccgatgtttcgtttgtggcatctgttgtattcgtttgagggcgataattcagccataggcaacgaaaaattgatagaaaagttgcgcgatacctttggctttgaaaaagaatacgctgctgttcttgccaatgtcgttttcaaggaagctggcgattatagtagcttgagcacaaaggctataagaaaaattctgcctcatttgaaagatggcaatgactatagtgtggcatgtgaatatgctggttatcgtcattccaagcaatcgctcacaacggaggagattcaaaataaagttctgaaagacaagttggaactacttccacgcaacagtttgcgtaatcctgtggttgaaaagattctcaaccagatgatcaatgtggttaattctgttgtcgatacttacggcaaacccgatgaaatccgcatagagttggctcgtgaactaaagaaatcggccaaagagcgcgaagaactttcaaagtcaatcaacgaaacgacacgtctgcatgaaggtttggtccagaaacttcaaaaagagttcgggctttcgcatgtaagtcgcaacgacattattcgttataaattgtataatgaattggaaagcaacggatacaagacgttgtacaccaatacgtatataccacgcgaaaaactcttcagcaaggaatttgacattgagcacatcattccacaagccaagttgttcgacgattcattctcaaacaaaacattggaagcacgtcaagccaatttggacaaatcgaatactacggctttcgactttgttgccactaagtatggcgatgagttcgccaatggcgagtataagacgcgcattgataagttgctggctgacaaggttatcagtaagactaaacacgacaagttgctaatgaaagaggctgacattccaagcggctttatcaatcgtgacttgcgcgactcgcaatacatagccaagaaagctcgcgagattttggaagaattggtacgctttgttgtaccgacaactggttctataaccgaccgtctgcgcgacgattggcaacttgttgatgttatgcaggaactcaattggaataagtacgatcagttgggcatgacagaaataattgaaggccgtgacggacagcgtatccgtcgcataaaggattggacaaagcgcaacgaccatcgccatcatgctatggatgcacttacgattgcattcaccaaacgttcgttcatccaatatctgaacaatttgaacgctcgtgtgcaaaaaggtgttgacgattggattgatctcgacatggttgagtttgccgacttgagcaaagaggataaaaccaaggcagtttatgctattgaaaagaaagaactctatcgcgataatcacggcaagttgcgtttcaatccgccaatgccgctcaatgagttccgcgccgaagccaaacgccaacttgaaaacaccttgatttcaatcaaggcgaagaacaaggtggttacacgtaacataaatgtttcgaaaaagaaatctggggcgaataagaaagtccaacttactccacgtgggcaattgcatttggaaacaatttacggctgcagcaaacaatatgaaacaaaagaggaaaaggtaaacgcatcgtttgatgcggaaaagataaaaacggttgcaagcaaacgctaccgtgaggctttgctgtctcgactgaaccaatttgacggtgatgctaaaaaagcatttactggcaaaaatgcattggacaaaaatccgatatggctcaatgctcagcataccgacaaagtgccagaaaaggtcaaaaccgtatcttttgaaacgatatataccatccgcaaagaggtttcgtctgacttgaagttggacaaagttgtagatgtgcgtatccgtaagatattggaagatagattggctgagtatgggggtgatgcaaagaaagccttctcaaatcttgccgaaaatccaatttggctaaacaaagaaaaaggcatagccatcaagcgagtgacgataactggcatcagcaatggcgaacctttgcacgacaaacgtgataaggatggaaatctgattcttgacgaaaagggcaacaaacaaccagtcgattatgtgaatactggcaataaccaccatgtggccatctaccgcaagccgaaattggacaaaaacggccagcccgtactcgacgagaatggcgacatcgtctatgaactcgacgagaagattgtttcgttctacgaagctacttcgcgcgctatgcagcatctgcctgtcatcgacaagacttataagcagtcagaaggttggcagttcctattcacaatgaagcagaatgaatattttgtatttccacgctacgatgccgatggcaatatgacgttcaacccattggagcacgacgaggcatggtttaagaatcccgaaaactatgcgctgataagtccaaatctgtttagggtgcagaaaatgtcaaaagtggctagtggaaatagctttgttcgcgattatgtttttagacatcatttagaaacaacagtgactgacaataaggtattacgtgatattacatattgtcagtgtaaaagtttagcgttcgcaaataatatcgtcaaagtccgtgtaaatcatatcggacagattgtttcggttggtgaatactaaaaagtaaataggcaatatttcggttgtgcggattatcgtacaaccgaaattaagtctgttaatattttttgctaaaagaactaaaaacttgaaatctgctaataccgtgataaaaagaactttatattttggcaaccctgcatatcttagtctgaaaaacagccaacttgtaatcaagattccgggacttgaaaaaagcaatatgcaccagaatttcaaggacgaatttacgaccaccgttcctattgaggacataggagtcgttgtgctcgacagcatgtatctaacaataacatcgggtgttatttcagccttgctcgataacaattgtgccattgttacttgcgattctaagtgtatgcctgtcggcttgctgctgccgttggctggcaatacaatacagagcgaacgcttcagaaaacaactcgatgcttctctgcctctgaaaaaacagttgtggcagcagaccatcagggctaaaatctataatcaggcaatgattctcggcaagtacacaaaagccgagactggcaacatgatggcatggaccgaaacggtaagaagtggcgactccgacaatctggagggtagggcggcggcttattattggcgcaatgtctttcctgcaattcctaagttcgtaagaggacgcgatgaggctgctccaaataatctgctcaactacggatatgctattctcagggctgtcgtggcaagggctttggtcgagagcggactgcttccgactttcggaatccatcatcacaaccgttacaacgcctattgcctggctgatgatatcatggaaccatatcgcccttatgtcgacgaaatcgtaatcgggataataaacgaaggcattgattattcaactctgacaagagatttgaaggctcgttttcttgttctgccaacaaccgaggtggtgattggtggaaaacgcagtccgctgatggttgccgtgtcgcagacaacatcgtcgctttacaagtgtttcaacggagaaatccgactgatttcttatcccgaaatagttgattgatggatcgtttcagcgaatatcgaattatgtgggtgttggtgtttttcgatttgcctaccgaaacgaagaaagaccgcaaagaggctgctttgttccgtaagaatctgatgcaagatggcttcaccatgtttcagttctcgatatatgtgcgtcattgtgccagcgcagaaaatgcagatgttcatgtaaaacgagtcaaatcttttattccaaaatatggtcaggttgggataatgcgtataacggacaagcagttttctgccatagagatattttatggccgtaagcctcagaaaccgaatagccccggtcagcagttggaactgttttagtgtagaaacacatgttcatacgcgagttcggggtgaaaaatgccattctactatatcataaagtgattattcagaatgacgctgaaagcgtcacctctcagtaaccgcagcatccgtaggatctgcggactgaaatgacacgaatatcatcgaccctgaaagtggtcgcccatagcaacagatggggcactctttcagagtgcttgccacctatgacgtctttttccgcaggttgttccaacctacggttattaagcggagacgcttccagcgtctataatatacagacaatcagcattattttttttaaaataaagtcaataaattacacgttataaaagtaagaaatgtattgaataaaatcccgaactcgcgtagttcatgatatgtggataattcagaacttgcgtatagaaacaagaaatcctgcttttttgagcaggatttcttgttttgaaatacagttttttattttgtaattttgtttgcaaaagtgtgatatacagtgttttactaataataagctgtatttccttttgcaaagatactaatttgaaagcaaatcacaactgaggaagaactttacaataacgttccatagctgtatttccttttgcaaagatactaatttgaaagcaaatcacaacgtttgttgagtcagcagtattcacagaatggctgtatttccttttgcaaagatactaatttgaaagcaaatcacaaccttccttcgctgatacatcagtacagaacagctgtatttccttttgcaaagatactaatttgaaagcaaatcacaacagtcaaaatggaaggaaatatagcagcaaagctgtatttccttttgcaaagatactaatttgaaagcaaatcacaacagacactaaagaaaaaaacaagttcaagcgctgtatttccttttgcaaagatactaatttgaaagcaaatcacaacgtatgaggcgcggtctgaatccgccttctcgctgtatttccttttgcaaagatactaatttgaaagcaaatcacaacacctggttcaatggcttattggaacttttggctgtatttccttttgcaaagatactaatttgaaagcaaatcacaactgtgcggcggcaaaaagcactaaccttttggctgtatttccttttgcaaagatactaatttgaaagcaaatcacaactgtttttggcgattccccaactattgccgagctgtatttccttttgcaaagatactaatttgaaagcaaatcacaacttgataattgcgattgtaaaaaaggttcttgctgtatttccttttgcaaagatactaatttgaaagcaaatcacaaccaaaactgatttggttcaatggctcatagggctgtatttccttttgcaaagatactaatttgaaagcaaatcacaacctgcagctgcagatacttctatcgtaggcgctgtatttccttttgcaaagatactaatttgaaagcaaatcacaacggctaaagccttgatagtattcaatacgagctgtatttccttttgcaaagatactaatttgaaagcaaatcacaacggtgtagctgtcgcggtcgtggccgtttaagctgtatttccttttgcaaagatactaatttgaaagcaaatcacaacgaagcaatgccactttacgatgacttgttgctgtatttccttttgcaaagatactaatttgaaagcaaatcacaacagaacagcgtgatgcaattcttctggcgtgctgtatttccttttgcaaagatactaatttgaaagcaaatcacaacggtaacatttgatgcgtatcatttgttacagctgtatttccttttgcaaagatactaatttgaaagcaaatcacaacttaataattgctattgtaaaaaggttactgctgtatttccttttgcaaagatactaatttgaaagcaaatcacaacaagtaaagcagttgcgcgcgcgcggtcaatgctgtatttccttttgcaaagatactaatttgaaagcaaatcacaacagcttcttaaagctacgcgtgacaagacgagctgtatttccttttgcaaagatactaatttgaaagcaaatcacaacaagaaactcataaaccaaatctgatgttatgctgtatttccttttgcaaagatactaatttgaaagcaaatcacaacctgcacttcctttctattgtgttgctcgtcgctgtatttccttttgcaaagacctttctattgtgttgctcgtcgctgtatttccttttgcaaagatactaatttgaaagcaaatcacaacttgtatgatacatacgattggtatgatgatgctgtatttccttttgcaaagatactaatttgaaagcaaatcacaacacaatcccaagcatcagcaatatttccgatgctgtatttccttttgcaaagatactaatttgaaagcaaatcacaacggtaacaaatgatacgcatctagtgtaacagctgtatttccttttgcaaagatactaatttgaaagcaaatcacaacttggggtgttctgagctgtatttccttttgcaaagatactaatttgaaagcaaatcacaaccgtgttgctcgtaaacgtaacattgaagctgctgtatttccttttgcaaagatactaatttgaaagcaaatcacaacgtcaattctttgacgataacaaaggtactagctgtatttccttttgcaaagatactaatttgaaagcaaatcacaacacgatgctatcagcgatgcaaagaactatggctgtatttccttttgcaaagatactaatttgaaagcaaatcacaacaggatgcaaaagatgatacatcaacttttagctgtatttccttttgcaaagatactaatttgaaagcaaatcacaacttatacaaggtgcgtcttatttatatactgctgtatttccttttgcaaagatactaatttgaaagcaaatcacaacgaacggctttttattcgatagagagtgtgagctgtatttccttttgcaaagatactaatttgaaagcaaatcacaactgacaaggcttccattgtgcatcctaagagctgtatttccttttgcaaagatactaatttgaaagcaaatcacaacaaatggatgcctaccacgtcggcacgccccgctgtatttccttttgcaaagatactaatttgaaagcaaatcacaacataaatgcgcttatcgagaatctatcaagcgctgtatttccttttgcaaagatactaatttgaaagcaaatcacaacaaacggggactgtggtatcaggggcggttcgctgtatttccttttgcaaagatactaatttgaaagcaaatcacaacaaagccgacgaagacaatgacacacgagatgctgtatttccttttgcaaagatactaatttgaaagcaaatcacaactgtttgtaaatggtatgataagattagcgagctgtatttccttttgcaaagatactaatttgaaagcaaatcacaacaagcagattctaaaaaattaattgaagaacgctgtatttccttttgcaaagatactaatttgaaagcaaatcacaacactcgtactgcatattattatttgaagcggctgtatttccttttgcaaagatactaatttgaaagcaaatcacaacccttggttattttgttcggaatgtgtggtcgctgtatttccttttgcaaagatactaatttgaaagcaaatcacaactgtcgcccaactgtattctgataattataagctgtatttccttttgcaaagatactaatttgaaagcaaatcacaacaaatggtgctgcctctggtgctgcttctggctgtatttccttttgcaaagatactaatttgaaagcaaatcacaacaataattttcttcgtaatttcgatataacagctgtatttccttttgcaaagatactaatttgaaagcaaatcacaacgtataaatccagctttcatatatggctcatgctgtatttccttttgcaaagatactaatttgaaagcaaatcacaactggcgatgctcgctatatcggggacgagtcgctgtatttccttttgcaaagatactaatttgaaagcaaatcacaacaattggatgcttacagctatacggataatagctgtatttccttttgcaaagatactaatttgaaagcaaatcacaacgtaattatggagaaccccgaaacaatttcagctgtatttccttttgcaaagatactaatttgaaagcaaatcacaactcgttatatttttctgaatgttttataaagctgtatttccttttgcaaagatactaatttgaaagcaaatcacaacaaagcgcactccaatatgaacgtgacaaggctgtatttccttttgcaaagatactaaattgaaagcaaattaaaatcccttataccggcgcgaaaattgagaatattggagtctaaaatgtgaactatacaatataaaatgcagaaatattcaaattttgtattttataaaagatgaaaacgttatatttgcggcaaatttcatttatagaagatatgaaagcgatagtaagacaaaattatcttgacaagatagcgaagaatcttggtaaggacaccatcattatcatagtcggtcaacggcgtgtgggaaagagttacactctacgtctctttagggataaagtggcagaagatgctcatgcaaacattatcttcattgacaaggagaaacatgagtttgccgacattcggactgaccgagacttgaatgcctatattgatgaacgacgagacaagacaaagaccaactatatcttgatagatgaagttcaggatatagaaggctttgagaatagtattcgcagctattatgaggagccagatattgaaatcattgtaacaggctccaactccaatatgctcagtagtgacttggctaacaaaataggcggtcgctacaaggaaatctttgttcaggcactaagttatgaggaattcatggagtttcacgagttgcccgacggtgatgatacattggcgaagtatattcaatttggtggattgcctggtttgaaaaagataggacttgacgaactggatgcacgtgagtatcaggcggatgtctataacaccgtcttactaaaggatgttatcaagcggaataatatccgcaatgttgcttttctggaaaattttgttcatttccttgctgacaatgcagggaaaatcatttctgccaacagcatagcgaagtatatgcggtcgcaaggggagaatatcacctctactgctattatcaattacgctaaatatttgtgcgagtcatacatgattcataaagtgaaccgatatgacattcacggacgaaagatatttgagagcaacgataaatactattttgaagataacggcattcgcaattcccttgtaggtggttcgcgtgaaagagatattgaaaaggtgatagagaatatcatttacaaccatcttgtccgtataggctatgacgtgatggtcggacaacttcaggctggtgagattgattttgtttgtacaaaaccaaaaggcgaaaggatatatgtgcaggcttcctacataatagcagacaataacacatacgagcgtgagtttggtaacctccgtgccatcaaggacaattatcctaaatatgttatctctatgacaccattggttacaaagtctgatgacaatggtataacccatcttcatctcaggaggtttttaacagaagggttggaaaggtaacagtcttccgagaaggggatatcgcatgagttaatttctccttttgcatttgacactatcacgttgatggcaagccgatcatatctatatagtttcccttgttctggaatcgtaaagaactcctcaatctggttcgctgccttaccgatgcaccagcaaagcgccatattgaacggcatcgaatgacgtttcgcatactttctcaatcgagtcgcatcaagcgtcttgactatagttaccataggcatgggtgatgacatccacagttcaaatgcttgggcgcgtgtggaatcttgcggttttatttctgttttcatatttctgattattgtcgtatctgcgctttaaagggtttgaggacacttatgtttctttcccgttgttctatttgtatttcggtacaaccaacagcaagaggctcaagacaaatatcacccatgcacaaggattgtgtggcataaagcagacggcgaggataccatcaatgcccagcatgctataagtcaagaggagaggcgtgcgcagaaaggggcgttcctttgcttttccacacagcatatgtacgatgcttccacccaatatcagcatggcaccacacattagactgaagtagatacacgcccgttgcatcccttcgctgagaggtgcgagcttatcggctatcatgggtgagaaggtggctgcaatgtggacgaagcccatcacgataactccaatggcaaggagtttgatagttataatcttgttcatgttatctttctttcattgttttttctcttatttatttaacagttgtctggcaatatctgctattacttcctctgatggtgattgcttggtgaaaacggcgatgatggcgtggcttccatcaggcatgagaatgatacctgcatcgttcatgtcttgcaatccttcagtggatgggaagcctgtacctgttttatgtatgatacgggcaccggcgggtatcgcagcagggagtcgtttcagtcctgttgagcagtctgccatcgtcttccagataaatgtcagatattggttgtcgtctttgtggtgataaaaccactcaaacaaacgagcgatttcggctggggtagaactgttttcaatagcctttgaactatgttcgaggctgctcacgctcggcagagttgatgtaagcatcgccctgctctcgcttagtcgcagccttgccagatttttgtgcatctgttcttctgtcatgcggacatagatatcgtagaatccaagttttctcatatatttctctaccgctttgggcttaccacaatgcttgaaaagaagttcacacgcattgttgtcgctctgtgcgagagataattccagcagttccgcatacgaaaagaccttcttcccttcaaatcgttttagcattggcgaccatgtgtcttgcatcaggtctgccttatctacaacgatagtgtcatcaagagccaatcctttccgactcaagtaatcggcgacgtataatgcctgcggaaacttcatcacactatgcatggcaaaacgctcgtccatgttaattccgctaacagagccgtcatgcatgatacacgcaccatagcttgatgtgctggtactgtcgcttattggctcttgcgccctgcacaatgtcgcaaccaatgcaaaaaacaaaagaactgtctttctcattcttattttcaatgtcctttatgtttctctttcttcttggcttgccgcagatcaaactggcgttgcttttcagcttcgcgttctgcttttgaacgctgtttccgttccattttattctgctcctgttgcagtttcagggccagttgcgacttggttccaatgccctgcgactgcatctgtttcttggcttcgcgtagttgtcgcttggggttcttcctgatttcagtggttggagcaacatcaacagcctgactgaactggaggcgatgccagttcttgtcaatgaactccatcacttccttttccgtcggctcggcaccgaaagtcaccttgcagacgtgcagcccctcatgatctgtttgctcaaataaaccaatccagaaaggatcttcaaacaataccgtcagtgtgccagtactcataaactatttcttaattatttagtttttactcccggtcagtagtaccatgcaataatggcgggaacgagatatgagatgatttgccagccatccgtcaactataccgctgatgccgcagaaaacataggttatccaatatgctacaccagtcacatcgcaaaggagcagacctaaagaacctgcaatcctgagcaacgttatggtgttaggcagatgtgtcatctgtactcagcaagtttcttcacctcgcagcccttgctttcgtaataggcgagcatctctggcagcttcttcaggtcgtagctggtgatgcagtcggagaggacatgcaccgtgaagcctgcttttgccatgttgaaacacgtagatttcacgcaggccgtagcgtctgcgccagccacgtagaactcattgatgccattcgccgcaatgaatgcagaaaacgcctcgcttgtaagggcgttgcttttcgtcttcacgaagatattgtctgacacaaccttcaattctggtgccagttcctcgcccttagtgccaggcttgaacgttcgagtagcagcggtgatgttgttgtgtttgatatatactatgtgcatatcctctgccgcagcccattcgatggctgcattgatattgtcgatgatgtcacgataatgcttagttatgtcgttctgtatgtcgataacggcaagtgctttgttactcttcatataactctgttcttatttatttctgttaatatt

SEQ ID NO: 2106 - DNA, 24338 bp, synthetic construct
  misc_feature 1..24338: note = Synthetic
  source 1..24338: mol_type = other DNA
tgcatccggaggtgttaaccctgatttcgaagtaggtgaaatcatgatactgaatgatcatatcaatttatttcccgcacatccgttaattggaaaaaacatagatgaattagggcctcgtttcccggatatgtcagaatcttattgtcctaaaatgattgacacggcactgtcaatcgctaaagaaaatgatatcaaagtttctgtaggaacttatgtcggattaacaggcccgacactggaaacacctgcagaatattattatgttcgtgcgatcggtggcgatgcagtaggcatgtcaactgttccggaaatcattgttgcacgccacatggaaattcctgttttcgctatttccatcattacggatctgggagttaaagggaaaataaagaaagtaagtttacaggatgtaattgacgttgccagcagacaggaaccgaaaatgacactaattatgcgggaactgatcacgagaagctagagaatagacgctgaattctggtatccgggagcgaagcggttctaaatataaaatatatcatagagaatgtctgtaaataacaaatatgaagcagtaatcggtttggaagtgcatgcacaaatgctcaccaaaaccaaagcttattcaaacgatatcaatgaatacggagcgaatccgaacacaaacgtcagtgtaatttcacttggacatcccggcacacttccggtgatgaataaaaaaacaattgaatatgccattcgcctggggctggcatgtgaaagcaatatagctccttatcagtattttgcacgtaaaaattatttctatcccgatcttccgaaaggttaccagataactcaggataaaacaccgatctgtacaggcgggcatattttcatcaaaacagatgacggaaatgaaaaagagatcggtatcacccgtatccacatggaagaagatgccggaaaaagcattcacgatgtggatgtttacgatacgcttgtggatttaaaccgtgctggaacacctcttctggaaatcgtttcagagccggatctcaaaacttctcaggaggcgtacaactacctgacagaagtccgtaaattactccgctatctggacatctgcgacggaaatatggaagaaggttctatgcgatgtgacgcgaacgtttccgtgatgctgaaaggctcaaaagtattcggaacaaaagtagaagtaaaaaatatgaactccatccggaatgttcaacgcgccattgaatttgaaatcagccgccagattgaacagatcgaaaaaggagaagcgattgctcaggaaacaagaggttttgatgccttaaaaggaattacaatttcacagcgtacaaaagaagcggcgaatgattaccgttactttcctgaaccggatttacagccaattactgtttccaaagagcaaattgaaaccgttcgtgaaacaatgcctgcattaccacgggatttgttcttcaaatacatcaatgaattgggcttatcctcgtatgacgctcaagtccttacagacactaaatccatcgctttgtatttcgaagaagtcattcagacgacaaaaaattacaaaggtgctgccaatttcgttatgggtgacgtgaagtcattcctgaacaatcgcagcatcgagatcgaagacttccctattccggcaaaacatattggactgttagtcaatatcatcgatgaaggaaaagtttctacttccgcagcatcacaaaagctgtttccgctgatggtagaaaatcctgctgttgagccgttaacactggcagaacaaaataatttaatccaggaatcggatgaaaacagcctgatcacttacattcagcaggttattaatgaaaacccggtggaaacggagcgttacaaaaacggcgaaaaacaactgttagggcttttcatgggcaagctgatgaaggtttccggaggcaaagccgatccgaagctggcaaatcaacttttaagaacaacattagacaatttataatgaaatacttccttgcattacttttaacgggatttcttttgtcctgctcctctgacaaagaacaggagtcagtggaaacaaacaatgccttaaaagataaaaaagcgaatgtctggatcagcgggacaatcaaaaatgcacattccgtaaatatcaagcttatcgcttccttacagcagggaattgtcactttgggagaaaccactacggacgaaaaaggaaatttcaaactggaaggagctatcaacggtttcggtatctaccagctccagtttgacaactcacagagcaaagtgctcccgcttccgctgaacgtcaacgataagctgaacatctcaggtggatacacaaccattgagcggcttccggagctttccgggacagactgggcagctacagtaacggaattcttcgttcatttcaatgattttgcgaaagtacaggaacctgttgtagcggataacggcctgaccaatgaacagaaaatggaaaaactgttccaactcagaaagccgctggatgaattcgcaagaaaagcgatcaccaaaaatccttccagcgaagcaaacatcctgttttcaacgacattgacacctgctatgggataccagtactgggattcaacgaacctggaaccgcttcgcctgatggcagcagcttaccaggaaacgtatgctgattcgcctttcggagcatctgctgcaagacaatatgcacaaatcgcaaaaggattcgaggagtataaggaatatacaaaaaacggaggtggagctaaaacttcaggagaaaaagcgccggaaattgcattgccgaatccaaatggaaaagttatgagactgtccgagctgagaggaaaatatgtattggttgatttctgggcatcctggtgtggcccgtgccgtaaagaaaatccgaatgttgtgaaaatgtatgacaaataccgcgcaaaagggtttgagattttcagcgtttccctggataaggatttagaatcatggaaaagagccatcgcctcagacaacctgaaatggcaatatcacgtcagtgatttaaaacaatgggattcttccgtgattccgctgtacggaatagaaagcatacctttcacgattttactgaatccgaaaggagaagttcttgccgtaaatctccgcggtgcacaattggaacagaaattgagtgaaatttttaaataattagaaaaatatgagacatttaataatcattggattgtcctttttagctgtttcagcatgggcgcagaataaagtaaaagcgacgatttcgggaaatatttttaatctgagtactgtggattccgttaaattagtgcagcaaaaaaatctgggctttaccactttcggcgctgcaaggcttcagaaaaacggagattttaaaatgcagctggaacttccgaatgaagactattatgtattgctggtaggtgaaaagccgatcagcctggtgatccgtgaaaacagctctatccagatatacggtgacggaaaacagctggatcagcacgtaaacatcgttaattctgacgagagcaatgagctgaaccagtttttaagagaaatgaacatctatcttgcaaaacgtgattccgcaactgcttatttacagcaaaatccacagctggcacaaagtattaatcagtctttcaatcctgtttacaataactttcagggatacaaatccaatttcctgagagagaatgccaacaacgccagtcagattgcagccattcaggtgacggatgtggagcgtgaattcgcccaatatgaaaatattgttctgaacctggagcgtgtgtttcctaaatcaccgaccgttgctgccgtaaaaaaagaatacgagacacagaaaattgccaatcagaaaagagaaatgcttgctccgggaaacatagctcctgattttacgcaacaaaaaccggacggaacgccgatgaagctttccgatttaagaggaaaggttgttctgctggacttctgggcatcctggtgcggaccttgccgtaaagaaaatccgaatgtcgtagcgaactaagacaaaggatttactgtcatgagtgtttcattagaccgtgacaaaagctcatggttggctgcgatcgaaaaagacgggctgatctggccgaatcatgtcagtgatttgaaacaatggtcgaacgaagttgcaaaacaatacaatgtcagcggaattccttttacagttcttcttgatcaggaaggaaaagtcattgctaccaacgttcggggcggcgatctggaaatgtatttacaacggattttcggattctgaaagtgagcagcggacaaaagaaaatatactttctctccgattttcactttggcgcaccgactaaggaaataagccgggaacgggaattgcaggtatgctccttactggatcatataaaagaatcctgccgggaactttatctggttggagatgtttttgatttctggtttgaatacaaaacggctgttccgcgcggttatgtgcgtttcctggcgaaaatcgctgaatttacagacagtggtatttccgtaaaatggtttaacgggaatcacgatatgtggatctttgattatctcccggaagaattaggtgtacagttgtaccggaaaccgatagaagcggaatatttcggacacaccttactgatcggtcatggcgacgggcttggtcccggagatgtcaaatataaattattgaagaaaatattcgcatcgaaaacctgtcagtggctgtttgcccgtttacatcccaattttggcatcgggctggccaactggtcttcttataaaagccgtaaatctaccggaacttcagaccgcattttcctgggaaaagaagacgaatggctgtatcagtactgcctgcggaaagaagatcagaagcaccacgatttctatattttcggacatcgtcatctgccgttaaagttagccatcggcagcacttccacttactttaacctgggagaatggctgcattataatacctttggaattctcgacgaaaacggatttcagctggtacaatggaaggaacagcaaatcattccttttgatcacaaaatcattcagaacgatgaaatataatttatcagaaatcaccgatttaatcaaggacagaagaaccatctatccggaacaatacacgtcacgtcaggtacaaaaagaacaggttgaaaaaatactgaacaatgcaatctgggctcctactcacgggaatacgcaaccgtggaggtttcaggtgttcatgagtgaagaaagccgcgaggagctgagcagactgttaggaacattatatgtggaaaaaatcccgtcggaaaagcagaacagcatgaagctggcaaaaattatcagtcgtccgttaaaatcgtctgtggtagttgcgattataatgaagcgcgatgaaacagaaaaaatcgccgagatcgaagaaattgaagctgttgcctgtgcggtgcagaatatgcatttgacatgtactgcttacggaatcggcgggttctgggcaactccaaagatgattaatttttcagagttcaaagattttttgaaaatcggtgaaaaagataagtgcttagggcttttctacatgggatatccggacatcgaatggccgaaagcccaccgaaaaccattggagtacgtaacggaatggaagtaaaagctgcctgagagaaagatctcttctggtcacataccgttttccttatcccttttccgcttataggaaccttctgtaaaggaagccacaagatagccgaacagcatcgctccgagaattaaaaccgtcagcggaatattaatggtaataaaaatcaggctgaacggtatcgttacccaatttgcaatagcaaaaacaactattaaaaccagcagacagatccccaaaataaatttggttttctgcatcggagatttacgttcccaaaaatctgacatactactaaaattaattaataatcataaatttaatagaaatctgattatccgaaaatgattttacaaatagtttttcaattacagggcgtaattaccttattttaggaaaaaatatgtagttttgctccacttaaaaaatcaaaattaaaagctaaaaaacgatgaaaaaaactgcattattcgacactcacgttgctttgggagcaaaaatagttccttttgcaggttttgagatgccggttcaatatgaaggtgtgaatgctgagcacgaagcggtaagacaaggtgttggtgtttttgatgtttctcacatgggagaatttttcctgagaggagaaaaagcactggacctgatccagaaagtgacgacgaatgatgccagcaaaattgatatcggaaaagcgcaatacacgtgcatgcctaacggtaaaggcggaattgtggatgatctgatcgtttatcgtttagcagagcaggaatattttctggtagtaaacgcttccaatattgaaaaagactggaactggatcaaagaacataatgttttcggagttgaaatgaccaatgcttccgatgaatattctcttttagctgttcagggtccgaaaacaattgaagcaactcaatcattgacaaacgtggatttatcagctatcaaacctttcagctttgttgagggaacatttgcaggttgtgaaaacgttatcatttctgcgacaggctataccggaagcggtggttttgagctttactgcaagaatgaatccgtaaagaaaatctgggatgctctttttgaagcgggaaaagcacagaatattcagcctataggactggcagcacgtgatacattacgcctggaaatgggattctgcctgtacggtaacgacatcgacgatacaacttctccgatcgaagcaggtttgggatgggtaacaaaattcacaaaagattttgttgatgccgacttactgcaaaaacaaaaagaagaaggtgtttccagaaaactagtcgctttcgaactgatcgacagaggtattccgcgccatgattatgaaatagtgaatgagaacggcagcgtgatcggtaaagtaacttccggtacaatgtctccaagcctgaaaaaaggaatcggtttaggatatgtttcttccgataaggcagcattagacagtgaaattttcatttccatccgtgacaaaggtgtaaaagcaaaggtggtaaaattacctttttataaagcataataacattcatcaatatattaaaaaatccactcaaattgagtggattttttaattataaccggctagacactcttacattgaccagctcttaaagagcttctgctgttggtggtttttatcggaaagctctttcacacggtaattcagataaaagaaacgattaacttcaggaagtgtcagctctatcagctcctttctccggatcactgtcaaacgcttgctgtcattatcaaaatactgaagccattcgtccagctgctgctgtgaaaatatgccgttcaccccgataatctcatcttcgggcatcaattgtcctaaatcggccggagatcccggataaatggatttcaccaccattcctgtttgccctgctgtactcttaaatcctaatttcgatgcactgtaatttgctaaaggaacgtgctccagctctaatccgatttcttccagagcatccacaatgatagattcaaaattcttcgtcccgtggtaaaaatcagtataaagaaaatcaagatggtttcctgcaaaattccggatcagcgaccagaaatcttcttcccgaactcctttcccctgtaaataaaaatcgtaatacagccgcttcatcacgtcatcaagacggtgtttaccattcgtatgcttcagcatcagcacatccaccacaaaagccagcaagcagccttccgtataaatagatacttttctgtttggtgctcccggaacataaccatccagccaggtatcaaaagaagcttctgctatagacatcgtaaagcgcgcaaaattatcaaagtgcttttgcagctgattatcaaattctttcagataatctcccaggctaaacactccgcttctgtataacatcagatctcccatatatgtcgtaacgccttcgcacaagtaaccgagctctgaataattttccttcgtgtaatcgtacggaaacatctcaacagggcggatagatttcacattccaggcatggtataattcatgagagcttacccccaacaattctgaatagaaagatcgaaacaagtcatagcctggtccgagtaagatcacagtcgaattcagatgttccacaccgtggtacgctctgaaaggaactatttgaaaaaagaaatggtattcttcaaaggggaattccccgaatttttccagctgtttttgagtgaattttgaaaaatccgatttcagcagctcaaagtccggctggcattcgccctgaaaccacaaattaaatcgcacatcgctcacttcataaaaatcatgcttcagtgctgcagaagcgatccacggggaatctgccagttcctcaaaattcttagcataaagcgtatgtctctccgtttgcttcaggccgctggcaatttggtagttttctggaacatctaattttacactgcaaggcagctctgtcattccctccacataaatacagcaattcaccggattgacgtacagctgatcaatggtaaaataagtagaccccgcattcagatccacagcgtaatactgataattcactacatactcttttcctttttcggtcgtgatctgccagcgatcttttgtgattttagaagttccaaccgttttcccttcggaaaaaactttaaagcagcggacatttttagcaaaatttccaagctcataacgtcccggtcgccacgccggaagttgaatttcatgatgttcagaaaccgccttaaatcgtacttctatatctatatattgctgttggggatttttacaacggaacgtatattgaatcataagctacttcattttaaagcacaaaaaaaccgattttaaaatcggtttccaaatattttgtatctaaagaaatcttaatgttgatgaccacccggaccatgtacatggccatgagcaagctcatcttccgtagcttcgcggatatcttcaatatttcctgaaaaatgaaggtttgttcctgccaatgggtgattaaagtccatacgaacatccgcatcgctgatctccagaatagttcctctcagcatatttccttcattatcagacatcggcaaaactgcacctactttaatctcatttgtatcaataacaccttcttcgtttttaaaaacgtctaaagggatgtttacaatattatcatcagaagctgttccataagcattttcagctgtaatagagaattcaaaaggatctccagctttcaaaccttcaatattctgttcaaattcaggaatcagctggcctgctccgaaaagaaaaaccattggctgttctggtgaagtttcttctattttttctccagttgaatggttagacaatttgtagctcagtgttactactttgtttgtgttaatctgcatattttctattttgctcaaagttacggaaataattttgaaaagaggaaaagtgggtgtcacattaactttggtaaagttaaaaggttaaattatgagaatgttttagtttatgaaaaataaaaatgccccgaagatagtcgaggcgctaaatgttttagctcgtatgtttttatttatttttcaatggaactcgtgaaacatttgggcataaaaaaacctcctgattatggacaagaggtaacccaaatgttttcacaacggaataatccttattgtgatttgcttttcaagtttcacaaatatattattttttcttaatatctgattaggtatttataccctaaatgcaattaatgttaaaaaattatggtttaaatcgttatcttcatcacttgaaattaaactattagtatatagatatatatgaaaaatatattgggattagacttgggaacaacaagcattggctgggctcatgtaatcgaaggagaaatgcctgaattatcagaaataaaacaaatcggagtacgcgttaatcctttaacagttgatgaacaaactaattttgaaaagggaaaacctttaacaactaacgctgacagaacgttaaaaagaagtgcaagaagaaacttagatcgcttcaaaattcgtagaaaaaatttaattgaaattttaatcaattcaaaaattattcattcaacatctactctaaacgaagatggaaaagatactacgtttgaaacctggggtttaagatcaaaagcagctgatgaaaggattgaattaaatgaactcgcacgtgttttattggcgattaataaaaaaagaggttataagagcagtagaaaagcgaaaaatgaagaagacggaaaagcagttgacggaatgggaattgctaaaaaactatatgaagagaatcttacacccggacaatttgtttttgaacgtttaaaaaatggtaaaaaagtaattcctgatttttatcgttctgatttacaaaatgaatttgacagagtttggaaatttcaaaaacagttttatccggaaatattaacggatgaattttacaaagaattacagggaaaaggacaacgcgcaacttctgctatgttctggacgaaatatcaatttaataccgctgatatcaaagacatagatgatgatctgaaaaatgagaaaacaataaaacttcacgtacgggatcaaaagaaactacaagcttataaatggcgaagcagttctgtaagtaagcaattggaaaaggagcaagttgcttatgtcctaactgaaataaataataatctgaataattcaagcggctatcttggagccatctctgataggagcaaagaattatatttcaaaaaacaaactgttgggcagtatttgtatcatcaacttttagaaaacagacatacttctttaaaaaatcaggttttttaccgtcaggattatttggatgagttcgaaaaaatctgggatactcaagctaaatttcattcagaattaactgatacattaaaggcagaagttcgggatgtcgttattttttaccaacggaaactaaagtcacaaaaaggattaatcagcttctgcgaatttgaacaaaaagaaattttagctgatggaaagaaaaaaacggtaggaatgcgtgtggctccgaaatcttcaccgttatttcaagagtttaagatttggcagaacttgaataatgtcctgattaaaaaagcgggaagtaagaaacgtactgtcaaaaaagacaatcaacaaacgttaacagagggtgaacaagaaatctttgatttaagcctgaatgcgaaacaaatcctttttgatgaattaaacatcaaagggaatttaaaatcatctgctattattgagttacttggttataaaccaaaagactgggaagttaattattcaaatcttgaaggcaatcgaaccaatcaagcattgtataatgcctatttaaatatcttagaaatcgaggggtataatcaggaattgttaaaactttccgacaaagatgaaatcaatgttgctgaattaaaaacacctgctcacgaaatcaaagagatggtaaagtctatcttcgctgttttagatattaatacttctattttagagtttaatgcagaacttggcggaaaaggctttgaaaatcaattatcctatcagctatggcatttgctttattcagcagaagatgacactaaaaaatacagtgaagaagataaactgatttatggtaatgagaatataggattaaaaaaacagctatgtcaaaaatttggatttaaaccagaacatgctaagatcttggcggggatttcttttcaagatgactatggtaatctcagtacaaaagcaatgcgaaaaatttatccatacatcaaagaatctaaatacagtaatgcttgtgatctggctggttaccgtcattcaaaacattctttgacaaaggaagagctggaaaaaagagttttaaaaaacaaactggaaccactgcaaaaaaatagtttgagaaatccggtagttgaaaaaattctgaatcaaatggtaaatgtagttaatacattaattgataaagaaaatgacaaactagaagcagaagaaaaggaacgtaatttccgttttgatgaaatacggattgagttagctcgtgagttgaaaaagaatacttcggaaagaaaagaacttaccgaaagaatcaataaagctaaatctgaaaatgataatataaaagcaatcataaaaagagattttccaaatgtgccaaatccaacaaaaaatgacattgttcgctacaaattatatcaggaattagcttttaattgttataaagatttatacactcatcaaaaaattgattattataagctatttggtaaagactatgatattgaccatattattccacaagcaaaactttttgacgacagtttttcaaataaagttttagttccttatcaagcaaacagagataaggggaaaaagaataatgctacagcttatgactatatgtctactaaatctcaagaagaatttgaaaactatttggcaacagttgagagcttatataaagaaggaaaaatttctagcgctaaatatcagaaactattaaaaaaagaatctgaaattggtgatggcttcatcgaaagagatttacgagatagtcaatacattgctaaaaaagcaaaagagatgttgtttgaaattaccaaatcagtagtttctacttccggatctattactgatagactacgtgaagattggggattagtaaatacgatgaaagaaattaatcttcctaaataccgcgcattaggtttgacagaaatggaagagcgtaaacatggacaaaaagttgaggtcataaaagactggacaaaacgaaatgatcatcgacatcatgcgatggatgctttgacggttgcttttacaaaacataatcatattcaatatctaaactttttaaatgcccgtaaaaatgaaaatcataaatttcacacaaacattattggcatagaaaatattgaaacagaactgatagaagataacaaaggaaacaaaaaacgtgtgtttaaagagcctattccaaacttccgccaattagcaaaagaacatttggaaaatgttattatttcacataaggcaaaaaataaagttgttaccaagaataaaaacaaaatttccggtcaatcgaaaacacaggaagtactgacacctcgcggtcaactacataaagaaactgtttacggacaatatcatttttatcaacaaaaagaagaaaaaatcagtgcaaaatttgacagagaaaccatcgaaaaagtatccaacccgttgtataaaaaattgctcttacaacgtttagaagaaaatgacaatgaccctaagaaagcattttcaggaaaaaacgccctttcaaaaactccaatctatttggacgataaaaagggcaaaactgttcctgaaagtgtgaaattaatttggttagaaaaggatttttcaattcgtaaagatattacacctgagaacttcaaagatgagaaatcaatcgataagatcttagatgatggtatcaaacaaatactcaaagaacgcttaaaagaattcggagaccctaaaagagccttttcagacttagaaaaaaatcctatttggttaaacaaagaaaaaggaatttccattaaacgagtaaccattagtggtgttagcaatgcagaagcattgcattacaaaaaagatcactttggcaagccgcttctggataaaaaaggtaataaaattccagttgattttgtgagtacaggaaataatcatcatgtagctgtatatcgtgatgaaaaaggaaatttacaagaaaatgtcgtttctttttacgaagccgttgcacgagtcaatcaaggattaccaattattgacaaattttataatcaacatttaggttggcagtttttatttacgatgaaacaaaatgaactgtttgtatttcccaatgaaaagacaggtttcaatccaaatgaaacagatttattagacccgaaaaacagaaagttgattaatccgaatttatttcgagtgcagaaaattgctacaaaaaattatttttttagacatcatttggaaactactgttgaaacacctaaagaattagctggtgtaacatataaaccacagcttggcttgagtggaatagtaggaattgtcaaagtccgtatcaatcatcttggagatattgtaagtgttggggagtattaaaataacattatgaacgaaatagaaatatacaaatcagttgataacaaagtagaagtgtctgttcaaatagataaggatactatttggttggatgcgcatcaaatagcacaattatttggagtaaatcgtcctgcaatagtaaaacatattggaaacatctataattcaaatgaattagataaaaaaacaacctgttccattttggaacaagttgccgcagacgggagaaaaagaaagatgaatctatacaatttagatgtaattatttctaccggttatagagttaattccacaagagccactcaatttagaatctgggcaacccaacgtctcaaagagcatcttattcaaggttacaccactaaccaaaaacgccttgacgaacttcaacaaaccattcaactcattcaaaaatccatttcagaagataccagtttaacagaaacaaaaggtttattagaaatcataacccaatacacccaaagctttgtgttacttaatcaatttgacagcgactccattcaatctggaaatctgaatgaagaaataacctatgaaattgattattccgaagcaaaaggtgcatttcagaactgaaaaaacaactcattaccaaaaaagaagcaacagaattattcggaaacgaaaaagacaacagctttaagggaacattaaaaagcattgtccaaacatttgatagcagctacctttacccaagcattgaagaacaggccgctcacctgctctactttatcatcaaaaatcactctttttcagatggaaataaacgaataggagcatttttatttatttggttcttagaaaaaaacaagcaccgttttaagctgaacggagaattaaaaattaatgacaatgccttagtagcacttgctttattggttgctcaaagtaatccgtcagacaaagaactgatgattcaattaattattcaactcattaaaaatcaataaagaaacgaaacctttttaagtagtatcagtaaaatagtttactcacgttaaactatttacaatggtaaaacgcactcttcacttcagcaatcctgctcacctgagcgttcaaaaccgccagcttatagttgagcttaaagatgaaaaccgaaccagacattccgtacctataatagatttagggatggtcatactggagcattcgcagattacgttaacttcttccgttatggaagctttaatggatgaaaaagtagcactgatctcctgcaataaaaattacatgcccagcggaatgttccttcctttcgatgccaatacagaacagacaaaccgcatgcgtatacaagtggaagccagcgttcctttaaaaaaacaactctggcagcagactattaaaacaaaaatacaaaaccaggcaaatgtgctggataaattaggattgaaaagcgaacgtcttcaccacctaaaagataatgttttaagcggagacagtacaaattgtgaaggtcaggccgcttcttattactggggacaattatacggaagtgattttatccgatcaagggagaaaagtacaccgaatgcacaattgaattacggctatgccattttacgttccattgtcgcacgtgccttaacggcctccggattacatccgtctataggcatttttcaccgtaacaaatataatgctttctgtctggctgatgacatcatggaaccctaccgtccttttgttgattggatggtaattgaaatgctggaaaatgacgttgacatagatgaattgaccagagaacaaaaaataacattattacaacttcctcagttagatatcactattgggaaaattactcgtccgctgtttcacgcagtaagtactaccaccgcaggacttaacaaatgttttaaaggagaattacgaaaaattccttatcctgaatttgaatgaatcattaaatgattatcgtggcttgtctgatttctgatatctaacaacgtagcgattctaatctttaaacatggaaagttcacgatttaacgcttatagaaatatgtgggtaatggtattatttgatttgccgacggaaacaaaaaaagaacgtcgggatgcttccttgtttcgaaaaaaacttctcgaaaacggatttatgatgttccagttttctatttacatgcgtttttgccaaagtatggaaaatgcggagatgcacaccgtacaggtaaaaagaatgctgccagctaaaggaaaagtgggtattttttcaattactgataaacaattcggaagaatggaaatctttcatggtaaaaaacctcaggaaagtactccaccaccacaacaattaacgcttttttaatttgtaccagaaaagaaaatttgcttttcagattgtattttcggggataataaggtcattttttcaattcagaaaaacatttctgaacaccttgctatttctacgattgagctacatgacgttgtaactcaaccgtaaaaataaagaacttgaaagcaaatcacaacctgcaaatagtcaaaaaaataaattggaaagttgtaactcaaccgtaaaaataaagaacttgaaagcaaatcacaactaaatgatactattgatatacaaaagcgtgttgtaactcaaccgtaaaaataaagaacttgaaagcaaatcacaacgaatctatgaatctattttctttttttacagttgtaactcaaccgtaaaaataaagaacttgaaagcaaatcacaactgatgtccctaatttctttttgttgttttcgttgtaactcaaccgtaaaaataaagaacttgaaagcaaatcacaaccatactgttaaaatcattcctccatttgctgttgtaactcaaccgtaaaaataaagaacttgaaagcaaatcacaacttttgaggcaatgatcccggaatacttactgttgtaactcaaccgtaaaaataaagaacttgaaagcaaatcacaacatccgacatgcttttcattttcctgataacgttgtaactcaaccgtaaaaataaagaacttgaaagcaaatcacaactagttggtaatcttcgatgttcaacttttcgttgtaactcaaccgtaaaaataaagaacttgaaagcaaatcacaactgaagtgatattctttcttctgccgtatttgttgtaactcaaccgtaaaaataaagaacttgaaagcaaatcacaacactaaatcatttatggttgatgtagttacagttgtaactcaaccgtaaaaataaagaacttgaaagcaaatcacaactgattgaatgacatctccccaatcaaacgtgttgtaactcaaccgtaaaaataaagaacttgaaagcaaatcacaaccaagatggtaaaaatgtaggagaagtagaggttgtaactcaaccgtaaaaataaagaacttgaaagcaaatcacaacagcaatacattcaagttagagaatgacgggttgtaactcaaccgtaaaaataaagaacttgaaagcaaatcacaactatagttccggcagatattctttaaagtctgttgtaactcaaccgtaaaaataaagaacttgaaagcaaatcacaaccgcgcttaccttttgaagtgccttttttatgttgtaactcaaccgtaaaaataaagaacttgaaagcaaatcacaacgtcaaccacgctcaacacgtagccgaggaagttgtaactcaaccgtaaaaataaagaacttgaaagcaaatcacaacgacgaggtgcaggctgacttggaagctgaagttgtaactcaaccgtaaaaataaagaacttgaaagcaaatcacaactgtcatccggaggcgtgagaataacaagaagttgtaactcaaccgtaaaaataaagaacttgaaagcaaatcacaacgcctctttagattttagttttgagggattagttgtaactcaaccgtaaaaataaagaacttgaaagcaaatcacaactgcaattctgcttattattgaaaatggcgggttgtaactcaaccgtaaaaataaagaacttgaaagcaaatcacaacaagatgttaggtcataaatcgtataggacagttgtaactcaaccgtaaaaataaagaacttgaaagcaaatcacaacgtatttgtatttttttatatcccttatagggttgtaactcaaccgtaaaaataaagaacttgaaagcaaatcacaacgatgggaaattgatattaaactgattgttgttgtaactcaaccgtaaaaataaagaacttgaaagcaaatcacaacgtcaaccaatggtctgtttttcggctcattgttgtaactcaaccgtaaaaataaagaacttgaaagcaaatcacaacgcgtttcagcatctatataaccgtctcctggttgtaactcaaccgtaaaaataaagaacttgaaagcaaatcacaacgttgacggcaaggcatattctatgggggcagttgtaactcaaccgtaaaaataaagaacttgaaagcaaatcacaacttcaagtactagcgcatggagcgcactcccgttgtaactcaaccgtaaaaataaagaacttgaaagcaaatcacaactaatactttgctatcacgggacgaatatgagttgtaactcaaccgtaaaaataaagaacttgaaagcaaatcacaactagtttcttttgaaaatattatcctgaatagttgtaactcaaccgtaaaaataaagaacttgaaagcaaatcacaacttattagggaaaaaagatcttcatgatgtggttgtaactcaaccgtaaaaataaagaacttgaaagcaaatcacaacactcctgtcacaaaccttttttgtacccaagttgtaactcaaccgtaaaaataaagaacttgaaagcaaatcacaactccttgttgatttagtgctctatccattacgttgtaactcaaccgtaaaaataaagaacttgaaagcaaatcacaacacaagagtgttgtttactctcaataatctagttgtaactcaaccgtaaaaataaagaacttgaaagcaaatcacaacctagccaccttttgcggttgttttgtcgtagttgtaactcaaccgtaaaaataaagaacttgaaagcaaatcacaacttctcgcgagaagacatttgaacgccaactgttgtaactcaaccgtaaaaataaagaacttgaaagcaaatcacaacgacaaacctttttctgccctctcacgctgtgttgtaactcaaccgtaaaaataaagaacttgaaagcaaatcacaacaacagcccaataacacctccagaagtcaagttgtaactcaaccgtaaaaataaagaacttgaaagcaaatcacaacgataatgtttacaacgtttatccaatatacgttgtaactcaaccgtaaaaataaagaacttgaaagcaaatcacaactggagggacttgatgagattgagatttcgtgttgtaactcaaccgtaaaaataaagaacttgaaagcaaatcacaactccgcgcccggatatctcgtgaggcttcaggttgtaactcaaccgtaaaaataaagaacttgaaagcaaatcacaacttttttcttgagatcatcacgtatttttttgttgtaactcaaccgtaaaaataaagaacttgaaagcaaatcacaactgaacattatttgaagttaagaataattcggttgtaactcaaccgtaaaaataaagaacttgaaagcaaatcacaacatagaccggttaaataaatacggatgtcttgttgtaactcaaccgtaaaaataaagaacttgaaagcaaatcacaacttggacagtccgccaattttacgggttaacgttgtaactcaaccgtaaaaataaagaacttgaaagcaaatcacaacctcatggaaaaacaataaaggaagctattggttgtaactcaaccgtaaaaataaatcactaacaattaggttaagattcattctattacaatgtgcaaagaatcaaggttgaaccgcgttgttacaatataaccttccgggtcaatcagaaccacatgcggaaatcctgctacctggaaagtatttttgatttcttccgaggaaagtgcctgatcgaattgcagcttaaagtattccctgagttcggttaactcctggatggtactattgtcaagcactccgaccactttaatgttcgaagtattctttgcggtaaattcattgatgaacgggaatttcctgatacacggagcacaatacctcatccagaagtccaaacacaggtatttgccgccggccagttcgcggatagtaaccaattcattattctcattacggatcagaagatcggaaacatttggtttgatccggatatccggttgtacatcggttttttgaaaaaccagataaccttgcttttcgtttatttcgagaatttcataccgttgctctttaatcccgaaataccgggttttcgatacaaaaccggtgttgatgtagctggtcatgagcgtaaatcccgaaacaccgtaattatcgatcgaaagaaggtcttgcggatctgaataggatccgttaccgtttgcatcaaataaaatcatggaaacagaatctttacccacaacaaaatctccgacccaataattgtaaagtttaactcccaggaaaaaatcccggtttaccggctccagaaatgcgagatcactattggtcgatacctgagaatagagcttgtccataaatatttttgaaagcgtgattttcaggtttttgttcgtttctccggtagttaaactgatcgtaaaaccggcgtttaactgttcgggttcgatcttttttaccttgtggtgaaaggaataatagaaatcccgctgttcacgcttaaaacattggtacaggaaaagagtgtcgtttaaactctccaatccttcaaaagtggcatcaacgatggacgtataacagctgtcatagcttgtgtaatttacctcttgcgggaaacggacgaggaggtctttggcgctgtagaaaggcaggaacaagtctttcccgatcatctggtgaaaggcatttacatcgtacctgttaaatcgaatggtatcgttccggtgattctggcataaggaagtgaaaggtattatgccgacagctaaatagattaaatagtagattatcagtgttttcataatacgatctcaattgtaactcaactgtaaaaacagaacatctttactccctaaaaatcaataatccaaaaattcttttgcccagttttccagctcttcagcagaccatagctgaggaaagaattttctgcgctgaaacgccggatgtaaatattttttccattcggaacctcctgttgcagccttattctctccttttgcatccagatacgttcgggcagtattgatatgtaccaaaggccaatgaatattatacagctgatcgaacagacgaagctctcttttcagttccggagataattcacccattcgggcaatttttaaatccaatgtctgtccctgcatttttttggccaaagtcagtagctcttcagcatacttctcttcaaattgtcgtaatgtaagtgtcttattacccgttttatgatcatagcctgcatctttccagtaaagatttctgaaataatcctctaacaccggattttcgggcagacgggctcttcctctttcattcaccaggttttctatacctgtaatgtaaaactccaggtaacggaaagagactgcttgaaaaccgcttgccggagccagcgtcagacggaatttattgtaatcatcataatccattcctttccccataatatcgaacgaattgaccagcattgcagtataacggttaatacgtttgatttttaccagtaaaaattcttcggtaagcgtttcctgtttgtgaatttgttttacctcattcatgatcagcttcagaatcagctccgtaatctgatggtaaatgataaatatttcctcgtcctcaaaatccgttctcggatgctgcaggttcaggagcgcatctcgctggatataatcccaatagttcagcggctttgcatacagcaaaccgttcagataggtatccggattttctccaaggtccttatacttgtcacggatgtcgttaattaaatctggattttccataagttcggggtatttttaagatatatgatcggatgattttgccagtctggccatttttaattttaactgaaactgctttgccattcgttgtgcatgtaccaaagcgtattccgcattctctccctggaaatattctgtaagtgtttcttcaaacagtgtcagccagcgcagaaaatgcatctcgtaaaccggtaagtctaaatgaggaggaaacggccttccttcatacgtccgctctcccagcagaactgtctgccagaaagtgtacatcgtattcagatgcgtttcccatttatcatgaaggcgctctgtaaagacaggaccgatcagatcatccaaagcgaccttttcataaaaagtatcgactaaaaaaacgacatcctcataagttgaaattgcttttctcatcaaagaagtttactcctcaaaattaaatttattattggaaagaaaagctgacttttgtcaattttcgtgtaaaggcatcttcttttttgtaaataaaaatcccgaaacggcgattactagtaaaattacattgatgatccacaaatgatcgtacgaataatttttaatcagcttggtagccaggtaaggcatgataataaaagccatggaaatgctcagtccgttcacacccatgtatgctccccgtttcttttcagaagaacgctttgccgcgacagttgaaatgaaaggaagcactaaaatttccgacaggctcagaaacatcatagaaatatagcaggacatcatcgaatggtctgctaaaagccaggcatacgcgatcagtaaagacagacaccccagaataatactgatataaatattgaattttgactccgcatattgcaccactatcatttccattatgacgacaaacaatccgttgaagcccaatatgaatccgatctgctgttgtccgaaaccgagatcttctttataatacatcggtaaaatgctcagcagctgaaaaaatgcacaggcatatagaaagcaaaaaaagctgaataccaggaaccacttgtccagataaggagagccttcatgttcttctgtagaaggaacttcctggtcagtttcttccactgcctcatttcgctctttcctacggaagaaataaagaaaaaatactactgaggtcaaaaatgtggtaattgaatttccgtaaaacagccaggaataggaaatcgaagccagaaatccgcctaatgccggtccaaacgaaaatcccaggttgatagacattctgttcagggaaaaagcacgtgtcaggtttccttttttcgcatacgaagtgattgctgctgaattggcaggacgaaaacattcatttataaggcttaatacaaaaatagccacgcaaacttcctggacagtatgcagaaaggaaagtattataaagaccggggcagtaaatagcaatgtaaaaaactgcacatggaatgcaccgatcttatcggtcagccagccgccgatcaccgagccaagcagcgctcctattccgaagcagctcatcaccagcccggcctcgtccgtctcaaatcctaaaacagttgtcagataaacggtcataaacggaataaccataccacctgtcctgtttaacaacatgatcagcgatagcatccaggattctttggacaatccctcaaaggcagaaatataaattctaaaaagtttgttcaaccgggaaaatttgggcgaagatacacagtaaaatattcctgccgttcccgaaaaaagaatttaaacaaagagtaacacttcatcagtagttataaaatcgattcccgcctcaataagtacctttccaagttccttactattcatagtccaggtgtttgacagca

SEQ ID NO: 2107 - DNA, 24338 bp, synthetic construct
  source 1..24338: mol_type = other DNA
  misc_feature 1..24338: note = Synthetic
aaaccggcgaaaatgatatttctatctcgtgtgcatttctgtaatgtcgcatcgtcatacgatgctatcgttttggttatcaagccataataaccttgtccttgttttttaattgcttcatggagactattgtaataggtgagaagcgatgcgaaaaacttcagataattcgattccacgccgctttcaaggttgagattccagtcctcaatctctttcgcgtctttcaaatgagtaaaaagcttttcagcattcacaccgtattggtctatttcatcaaaatctttggccatctgtgctgcataagggaaaaactcttggttcattttgataatttcgaatataacatcaatattatcaataagttgtaatccgctccattcctccattgcttgctggatggaaagaatttgcggcacccagaaattgttctttattgtaaacgccaattcagttctcaactgcaaagcggcgcgtttattagggaaaacaatggtgatattttcctttgttaaatcgtaatgacttgttatataatcacttatcttcttgatgaaagccatagttctgcgtttttcaattgttcttgtgtacccaaatcaaaccaatagtcgggacgaataagttttgatgcgactttttgattttcagctattttttgataaagaccgaaaacatagcaaggtttcacctcgaaatctttgaaatattgtggtctgaatagatgtattccgctgaacgacagtagtttacaatctgttggcaattcgtttgcgccatcaaaaacaagcgtttcggtattataacgtcctaaaaaattatcttgattgtcaaacaccaatttgcgttggctgttacgttcttgtgtcagaagccaagcggcatggtcgcttttccggaaagcatcgtaaaagccttttaaatcaacatttgtaagcacatcgacattatggacgaggacggcttcgctttgcgcgaaatggggcagggcctgcaaaatggcgcctccggtgtccatcagcagagggcgctcgtcggatatttcaatcttgacgctctcgtcatttctgtcacttaaaaattccatgatctgttctccgaaatgatgaatgttgacaacgatatgattgaaatcctgttttatcaaagattctaatattactgtaagtaaaggcttgttatttattgatactaaagcctttggagtattacttgtcaattcctttaaacgtgttccgagacctgccgcgagaataaatgccgtccttctaccttgcttcataaacatgacttatatgttgtgccaaatgatttatttccacgttaatcatcggatagttttcatgaatcagcctgccgacggtctgcgcaaaatataccgagcgatgctgtcctccggtacacccgaaattgatttgcagatttttaaatccgcgttccaaatagttatcaattgattgataaacaatcatttgaacattctgtaagaagcaatgtacatcggcttcattttccaaaaactccttgacatcggcatcttcgccggtgctttttttgaagtcggcataacgtccgggattcggcaacgctctgcaatcaaacacgaacccgccgccattgccgctcttgtcgggaggaatgcccccgtttttaaatgagaagctgtttacggagactgtaagtcgttttggctcagtagtttcatattttaacaacagaatatcgaattgtctgattattgcctgcaattcaggcagttcaaacggcaaatcccatttttcgtttgcctttataagttctcgaatagcgtatggaatgctctgtatgaagtgcaactttttctgtatcaagcctctgaagccgtaagcgccaagtacttgcagcagcctcaaaagcacaaaggccgggaaatatgcatcgaatgattcgacggcgatggctctctctgttccgccgcgcatctgtcgagacgacagactttcaacgtcattgccataggccgaggtgtatatggaaattttatctttataatactcaatcaaatgatgtttaatgtcttctggaatcctcgccttcacttgatagagcagcgaaaccacgtcatattgcagaggccctttcctgccaccttgataatcaatgaaatatggttcgttatcaacaatcatgatgtttctggactgaaaatcacgatacatgaaaaaatcagacggggcttccaaaatgtatttcgcaagtttttgaaaatcaacgtctaaacgtgtctcgttaaacgaaatctcttcttgttctttcaaaaaacaatatttgaaatagtttaaatcatccatgattgacatctcatcgaatgagggagtgggaaatgcttttgaatagtcaagaccttgatgtccaatcatttgaaaatcaacaagtttatcgagtgattttttatataatgctattgtggtgtcatcaaattcgccacttttcagacatttttcaacataactaaaaagagtgtcgtcgcctaaatcggtctggatgtaaatttctttatcagatgatatggctaaaatctcaggaacaggaagtttacattcatgaaaatgctttgaaaaacagaagaaagcgtcgttttcttcaatgttgatattatatacgccaatcaaaaaacgccggtcggtcttcactcgaaaatagcgtcttgatgagccggaactcggcatcgcagccgtttccaatatcttttccccaagagtttcaacgagttccgcaatcgttttgtttatctcttccactgtaagcataactaaaattttagcacacaaacttacaatttttttttaaaaaaaccacaaatgaagataaatttattatctttgcagcctattttaactctaatatcgagttttgtataagcaaaattctgataacgacttaattaaattattgattatcaaatatttatcaaaagatgaacgctaccgaactcaagactattgagaaactcaacaaaccgacaattttgcccggttctgtaaaaatcaatgtgaaaattgacgtggaagaagagattccacaagaaaccgaattggacttgaacgatgagaacgaggaagatgatgaattggaattcgatttttctaatttgaacaagcttcaactcgtggaacttcttgaagaaacggttcaagattcagatattgccaaaatcaaggacaaagttgtcgcaataaaatctaatttcttgaaactcaacaaggaggaccgtgatcgcgaaatggagcagtttatccttgacggtggcgataaagaaagctacgagcacaaagacgacccgcttgaggtgcgctttaaagcggctttcgacatttacaagtcaaacaaggaaaaatataaggaagagctcgagagacagaaggacgagaatcttcagaaaaagctcgcaatcatcgaggaattgaaggctttgatttattcggaggagactttgaaaaagacttacgatgatttccgcgaacttcaggataaatggaaagaaataggtcaggtgcctgccagtgaggtgtcaaacatctggaatacctatcatttcctcatagagaagttctatgacaaggtgaaaatcaaccgtgagctgcgcgacctcgatttgaagaagaatctggaggctaaaattgaaatttgcgaaaaggccgagcttctgcttcttgagaaatcgctgacaaaagcattcaagcttcttcagaaatatcatgatgagtggaaggaaatcggttccgttccacaggacaagaaagatgagatttgggaacgtttcaagaataccactgataaagtcaaccagattcgtcgcgagcattacgccaagctcgaagaagagcaaaaagccaattacgatgccaaggaagccatctgcgtgaagatggaagaaatcgtaaatgaacaggtgaacagcatcaacgcatatcagaagaagtccaacgatgtgaacgatttgttcaagatgtggaagggaatcggccctgttcagaagaaacagagcgaagagatttggaatcgattcaaaagttctatgaacacattcttcgacgccaagaaggatttcttcacaaaactcaaggtgcagcagatggaaaactacaacaagaaagtgcaaatctgcgtggaagttgagaatctcgtcgattcaacagaatggaagaagactacagaccgaatcaagaagctgcaagaagagtggaaaactatcggtccggtgccgaaacgccattccgataagatttggaaacgcttccgcggcgcctgcgacactttcttcggcaataaatcatcgcatttctcgggaaagaaaggcgaagaagacaccaacctcaagtcaaaacaggaacttatcgagcgtgtcaaggcttacgagttgaagaaagaccgcaacgagaatatggaggctatccgcggattccaaagagaatggatggctatcggtcatgtcccaatgaaaatgaaagacgctatccagaatgaatatcgcagccttatcgacggcatgttcgacaagatgcgcgccaacgataacgaaatgactgctatcgaataccgctcgatgatttcaggtcttaaagaagatccggattcacgtgataaattcagaagagaacgcatgaatttccaaggtaagattcagaaactgcgcgacgaaatagttacattggaaaacaatatcggattcttggcaaagagcaaacagtcagaattgctgaaagctgaatatgaaaagagaattgccaggatgaagaacgaggttgcggttcttgaggcaaagattaagattttaaacgagcaataattgaattccaataccattggaacggcgttttgtttgactacatttggtgagtcgcacggggcggtcgtcggcggagtaatcgacggctgtcccgctgggttttcattggataactccttgataaaaaaggagttgtctcgcagaaaaccaggtcaaggagccaatatgtcaacacgcgaagaacccgacgaggtggaatttctctccggattgtatgaaggcacgaccacaggtgctcctatagcgtttatcattcgtaataaagatgcgaaaacctctgattatgagaatattaaagatgttttccgtccgtcgcacgccgatttcacctatcaggggaaatatgaaatccgcaactgtgccggtggtggcagaagctctgcccgcacgctgctgccttgtgtggtcgccggcgctatggcaaaacagattttgtcatatcaaagcgttgatattcaatcagatgtgattcagataggcgaggagagaagcaatggtttttcaagaaacgatattgaacgtgttttgaaccgttacagagaagaaaatgatactgtgggtgcagttgtccaaggaatcgtcaagaacgcaccggtgggtcttggagagcctgcgttcaggaagtttcatgccgtgttggcgcaagcgatgatgacaataaatgccgccaagggttttgaaatcggcgaaggattcaacgccgcccggatgagaggcagcgaatgcaatgatgaattctattttgacggcaaacatgtccgtgctacgaccaatcactcgggcggcgtgcaaggaggaatcactaatggtgaaaacgtggttttcagagtcgcgttcaagccgattccatctgttatgttgcctcaaaaaaccgttgatattcacggtgatacgacggttttggagatttcgggccgccacgatgtgtgcgtggtgccgagagtgctcccgatagtggaggcaatggcagccatggtgactttggactttgttttgttgaaaaaaatgaataaaatatagatgcgtatctaaaaaatgtgtatctttgcagcgtaaacttcagggtaaggcgaaattcctttccggcggttatagtccgcgacttcctacgggaattgattcggtgagattccgaaaccgacggttacagtccggatgagagaagttcttgtttgtggagattttggtaattttaagtgaagaccctgatgttgttgcattagggctttttttatgtcatactgtgaaaaagatatcgagttcatgcggcgcgccatcaagctcgcccgaaaaggcggaggcttcgtccatcccaaccctttagtggggtgcgtggtcgttaaggacggtcggatactgaccgagggttatcatgagaaatacggcgagtttcatgcagaacgtaatgctttaacacgttgtggaacagatgttgaaggtgcttctctttatgtaacacttgaaccttgttgccattatgggaaaacaccgccttgcaccgaaatcatcatcgaaaaaggcattaaaaaagtgtttgtcggcatactcgacccgaacccgttaatggctggtaaaggagtaaaaactttgcaaaatgccggtgtcgaagtggaaacgggactatgtcatgatgagattcgcgagatgaataaaatcttcttgaaatacatcaccacgaagcgtccgtatgtcataatgaagactgcgatgaccctcgatggcaaaatatcttcgtttaccggcgattccaggtggattaccaatgcggagtcgagaaaaatggcccatgcactcagaagtgaactgtcgggcgttgtcgtgggcatcggcaccgtgctcgccgacgaccctatgctgaactgccgcctcgaaggaaagcatcatcaaccgataagaatagttgttgactcaaatttaagaatacctgctgattgtcaactggttaagaccgcaaaagaatacaagacaatcgtcgcttgccgtcatttcgacaaaagtgaattggaggaatcttcttcatgcgtgaatagtaaacaaagatttctcgattccatacagtcgctcgaagcgaaaggaatcgaaataatcgaatgtgcttcaagcgatggtcatgttgacatcagcgaccttatgacgagacttggagcgcaaggtgttgattctcttttgcttgaaggtggaggcgcattgaatgccgcctttctaaacgcaggttgcgtcgatgaggtttgggctttcatcgcaccgaaaatcatcggtggaaaagactctaaaactccagtttccggcaagggaatagagaagatgagcgatgcaataaacttgcaaaatattgatattcattacattaacggagatgttttaataaaaggaaagatatgttcactggaataattgaggaaatcgggaaagtgaagtcgatagcacgccatgccaacagcatcaaactgacgatagcggtgcataagattttggacgacatccatgtcggcgatagcatctgcacaaatggcgtatgtttgacggtaacgacattcgacaacgacacatacaccgcagacgtgatgccggagacaatgaatcgcaccaatctcaaggatttgagaatcaacgatttggtcaatgtcgaaagagcgatgccggcaaacggccgcttcggtggacatatcgtttcgggccatattgacggcaccggtgtcatctctaaaatgacaaaagatgacaaggccgtgagaatcagaatcgagacaaatcccgggattttgcgtttcatagtggaaaaaggctctatcgcgatagacggtatctcgttgacagtcaccgatgtaacgagtttcgacttcggcgtttcgattatccaacacactcaagacgagacgactttgacaaagaagaaaatcggcgaaacaatcaatctcgagaacgacattgttggaaaatacatcgaaaaattcacaggagacaattctgcaaaaaaagataaaaatttacttaacttattgaatgataataatttttaatataaatgaaaaaggattttaacacaattgaggaggcgttggaagaacttcgtaacggaaagatgattatcgttgtggacgaccccgatcgcgagaatgagggtgatttgatttgtgcggctgaatttgcgaccgtcgagaacgtgaatttcatggctacatacggcaagggcttgatttgcatgccgatgagcggcgagattaccaggcgtttgcgactaaatcaaatggttgtggaaaacactgacaatcacagtacagcgttcactgtttccattgattatagagacactacgacaggtatttcggcggtggaacgctccattacggctatgaaagtggtggaagacggcatacgtcccgaggattttcgtcgtccggggcacatgtttccgttggaagctcgtcagggtggagtgctgaagcgtggcggtcacactgaagccaccgtcgatttgatgcgcctcgccggactgaaggagtgcgggctctgctgcgagattatgcgcgaagacggcaccatgatgcgtaccaccgaactgatacagttcgccaaggataataacttgacaatcacatcaatagccgagttgataaaatatcgtagaaagacggaagtgttggtggagcgtgtgacagaagccgagcttccgacgaaatacggaaacttcagagccatcggtttcgttgataaaatcagtggcgagcatcatgtggcattggtgaaaggcgatttgacgagcaatgagcctgttttatgccgtgtgcactccgaatgcctcaccggcgatgccttcggttcgatgcgctgcgattgtggcgaacaactgcaggaagcgatgcgtcgtatcgaggcgaagggcaggggcgtgcttctctatctgcgtcaggaaggtcgcggcatcggcttgataaacaaactcaaagcatatactttgcaggataaaggcatggacaccgtcgacgccaacctcgcgttaggtttcgccgccgacttgcgcgactatggcaccggtgcggaaatattagccgacttaggtgcgagaaaaatcattgtaatgactaacaacccgatgaaaatcagcggtttggaaggctatggtatcgagattgtcggccgcgagcctatagaaatgacatgcaacgaaaaagacgcattttatctttatacgaaatataaaaagatgggacacatgctgcatgtgaaagaagtaaaaggcaagaagcaggaagacagtacagaaacgattaatcgcagctgaaacggtatcgctgtctttcgcaagtaacaatgcatatcaagctgttgcaaaaataaatacaaacacaaaaacatataactatgaacattttagaaggaaaattattggctgaaggtcagaaaatcgctattgtggccggccgtttcaacgaaatcatcaccaacaaactgctgggtggcgccatcgacgctttcaaacgtcacggcggcgatgagaaaaacattgatgtggcttgggtcccaggtgctttcgagattcctctcgtggcaaaaaagatggcggcaagcaaaagatacgacgcagttgtttgcctcggcgcagtgattcgcggagccacgccacatttcgacatggtcgccaacgaaaccaccaaaggcatcgccacagtaggtctgcagaccgaagtgccggttgtttttggcgttcttaccaccgacaacattgaacaagctgttgaaagagccggctcaaaggcgggaaacaaaggcttcgaggctgtgacaaccgccatagaaatggtgaatctgctgaagcagatttaagaccatagactttggactttagaagagatgtcgcgaaatcattgtgatgtctcttttttttgttttttagcgacattactcaaatcaaccgcactttttgacccaaagacagcaagcagttctggacaaaccttttgaacggcctaatggctgttttgggggcgtatgcaaaaaaaaatacccgccgttgaaggacgacgggcaaacctgatgttttcacaacggaataatccttattgtgaattgcttcaaaaactgtgctgcaaagatagtgattttttgaataccgtgtcggttgttcaaaaaaaatgtttaattttgtggaattaaatcgtaaaagcaaatcgcatgaaaaaaatacttggacttgacctgggtaccaacagcatcggctgggcggtggtgaatgaagcggaaaacaaagatgaaaaatcatcaattgtgaaattgggagttagggtaaatccactcactgtggacgaacaacaaaatttcgagaaaggcaaaagcatcacgaccaatgccgaacgcacgttgaaacgctcgatgcggcgcaacctgcaacgttataaattacgtcgtgatgccttggttgatattttgaaacaacatggttttattgatgatgatacaatcttgtcagaaaatggtaataaaaccacttttgaaacatatcgactaagagcaaaagcagccacagaagaggtctcactcgaagaagtagctcgtattctgttgatgattaacaaaaaacgcggttacaagagcagccgtaaggccaaaaacgatgaagacggacaactcatcgacggcatggaagttgcaaaacaattgtacgacaaccaccaaactcccggtcaatttgttttggagcttttacggaaaggcaaaaagcaagcgcccgacttctatcgttcggatttacaagccgaatttgacagaatatggaacttccaaaaacaattttaccccaacatactgaccgacgaactacaggataatcttaaaggcaaaaacgaaaagcagacctgggcgatttgtgagaaaccatttggcatcgagggaatcaagcgcacgacaaaaggcgaagaactaaagcgtgagaattacgaatggcgttccaaaagcctctcggaaaagatggatttggaagagttggccgttgttttgcagaaaatcaattcgcaaatcaacaattcgagcggttatcttggtgaaataagcgaccgtagcaaggagttgtttttcaaacatcaaaccgtgggacaatatcagatggccgagttggataaaaatccaaattatcgcctgaaaaaccaagtcttttatcgtcaggactatttggacgaatttgagactatttggaaaactcaagccaagtttcacaaagaaatgaccctcgaactgaaaaaagagattcgcgacgtcgtgatattttaccagcgtccgttgaaatcacaaaaaggactgatttcaatctgcgaacttgaaaacaaacaaatcgaaatcgaaattgaaggcaagaagaaattaaaaaccatcggaccccgtgtctgcccaaaatcatcgccactatttcaggaattcaagatttggcagacactcaataatatcaaggtgtcaggaaaagtttgctcaaacaagcagacggaatcaatcaacggcagtcgtgaattatatcaagaagagaaagaaaggctttttgcggaactgaacttgaaagagaaactttccaaaaccgaagcactgaaattactgttcgagaattggaaagagcttgacttgaacttcaaagatattgacggcaacaaaacaaatgcagcgttgttcaaggcgtatcaaaagattttggaattgagcgacaacggtgaatacgatttttcaaaaatgaacgctcaagaaattatgcagcatgtcgggaaaatcttcaaagagcatggatacaataccgacattcttcatttcgacgcatcattagagggaaaatcttttgaacagcaacctgcatatcaattatggcatttgctgtattcgtttgaaggagacaaaactaaaaccggcaacgaacatttaatcgacaaattgatgtcgatttacggctttgacagggattccgccaaaatactcgctaacgttacattcattgacgattacggttcgttgtcggcaaaggcaatgcgaaaaatactgccttacatgaaagacggaaacggatatgatgtggcttgtgtttatgccggatacgaaaagcattcaaaatcatcgctgaccaaaaaagagattgacaataaagttctgaaagacaaattggatgttcttccgaaaaattcattgcgcaatcccgtggttgagaagattctgaaccaaatggttcatgtggtaaactctgttacaagcacatacggcaagcccgacgaaatccgcattgaattggcaagagacttgaaaaaaagcgccaaggaacgtaaggaattgacaaatacaataaataaaacaacaagagagcatgaggcttatcgcaacatccttcaaaaagaattcggaataaagaacccgaccagaaacgacattatacgctataaactctatttggaactgaaagacaacggcttcaaaacgctttattcaaacacttatattccgcaagaaaaattgtttagcaaagagtttgatattgagcacattatccctaaagcaaaattgttcgacgattcgttttcaaacaaaaccatcgaggccggcaatgtgaacagaaataaaagcaaccaaactgcgtacgattatgttttaaaggaatatcatgaaaaaggtgccgaagaatacaaggcgaggattgaaaaactgtttggcaatggaaatattagcaaagccaaacgcaacaaactcctgatgcgagaaattgacataccggacggatttattgacagggatttgcgcgattcgcaatacattgctaaaaaagcccgtgaaattttgggaaatgtggtgaaagtcgttattccgacaacaggctctgtcaccgatcgtctgcgcgaagactggcaattggttgatgttatgaaagaacttaaccttccaaaatacaatgaacttggtttggttgaagacgaagaacatatcgattacgcgacaggtgaaattcgctacgtgaagaaaatcaaggattggacaaaacgcaatgaccacaggcatcatgcaatggacgcactcactattgccttcaccaaacactcgttcattcaatacctgaacaacttaaatgctcgtgtagaaaaaggagttgatgattatatcgacctcgactatgttgaaataagcacattgagcagagaaaagagggggaaagccgtcgatagcatcgagaaaaaagaattgcatcgcgacaaaaacggcaaactgcgattcaatccgccaatgccgctcggtgaatttcgtgccgaagcaaaacgccaattggaaaacattttggtttccatcaaagcaaaaaacaaagttgctactcgcaatatgaataaagcgaataacaaagcgactactgaaatcattgacaaaaacggcaataagaagacaatcaagggacaattgacactcacgccacgcgggcgactgcacaatgaaacaatttacggttgcatcaaacaatatgcgacaaaaatcgagaaagtaggaggctcgtttaatgccgacaaaattgcaacagttgcttgcaagcggtatcgcgaggctttattagaacgtctgtcgatgtttaacggcgatgcaacaaaggcatttacaggcaaaaacagtcttgagaaaaccccgattttccttgacgagttgcagactgaacaagtgccggcaaaagtaaaaacggttaatttcgagaatgtttatactattcgaaaagaaatcacaaaggatttgaaggtagaaaaggtgattgactcccgcattcgcaaaatactcgaacaaagattgacagagtttggaggagatgccgtcaaggctttttccaaccttgatgaaaacccaatttggctaaacaaagaaaaaggaattcaaataaagcgtgttgctatttccggcgtcagcaatgccgaagccttgcaccaaaaacgagaccatcacggacaattggtattagatgataatggtcggccgcaaccagtagattttgtaagcacaggcaacaaccatcatgtggctgtttataggaaaccaaagttggacaagaatggacgacaaatcatggatgaagatggcaacttgcaatacgaattagatgagaatattgtttcattttacgaagcaacatctcgggccatgcttggattacccgtaattgacaaagcatacaaacgagaagaaggctggcatttcttattcacaatgaaacaaaatgaatattttgtgtttccacgatatgacgaggatgggaatatgacattcaatcctctggattatgacgagaattggtataagaatccatccaattatgcaataataagtccgaatttgtttagggtacaaaaaatagctacaaagaattatatgtttcgacatcatcttgaaacggttgttggtgaaccaaaagttttaagagatataacatggaaattaattcagacaccttcaaatttaaatggaattgttaaggttagaattaatcacataggtcaaatcgtatcagtgggagagtattaaaatgataaaaaagacgctctttttcggcaaccccgcctatctgtcggttaaaaactcgcagctggttgtaaaacgaaccgattccgacacaaaggaggccgttgtggtgactgccccgattgaggacatcggcgttgtggtgctcgaagaccgtcagattaccgttacaaacgtggccttggacgcattgctgcaaaacaattgcgctgtaataacttgcgatgaaaaacacatgcctgccggaatgttgttgcctcttgaaggaaatacaatccagagtgaaagatttcgcaatcagattgaggcgtcattgcctttgaagaaacagttgtggcagcagacggtgcaggcgaagatacggaatcaggcatctgtgctgaaaaggttgagcggcgttgaagcggggtgtatgttggcatgggcaaacgatgtaaagagcggtgacagcgaaaaccttgagggcagggcggcggcatattattggagaaacattttcccgaatttgccggggttcacgcgcgacagggagggagagacacccaatagcctattgaactatggatatgccattgtcagggctgttatcgcgcgggctttggttgcaagcggacttttgcccactctgggaatccatcatcataacagatacaatgcctattgcctggcagacgacatcatggaaccatatcggccgtatgtagatgaattggtgttaaatattatgcaaagcgaaatggattatggcgaactcacgccagaattgaaacggcaattgttaggacttcctgtgacggaggtggtaattggcgggcaacgcagtccgatgatggtggcagcgtcgcagaccacgtcgtcgttatgcaaatgtttttcaggtgaacttcggaaattggcatatccgacgatggaaatctgatggataggtttagtgaatatagagttatgtgggtcatggtgtttttcgatttgcctactgacacgaaaaaagagcgaaaagctgcggcggagttccgaaagaagttgttgaacgacggcttcacaatgtttcagttttccatatatttaaggcattgtgcgagcatggaaaatgccgatgtgcacattaaaagggtgaaaatgatattgccggagcacggcgaggtcgggataatgtgcgtcacggacaagcaattcggcaacatggagatttttcacaacaaaaaggtgggggcgaagagcactcccggacagcagttggaactgttttgagtttcagaaatcgtgtggaattaaaaaatccgacttgttcaaggtcggattttttaattctgaaacaacttttaacttgttgtgggtcaattatttacagcgattgtgttgtttcagctgcaaatatacacaatttttgaaagcaattcacaacaagtggatggataacgtgtcggaggtcttgttgtttcagctgcaaatatacacaatttttgaaagcaattcacaacccagcgattggcgtgaatttcttcgcaccggttgtttcagctgcaaatatacacaatttttgaaagcaattcacaacgcactgtgaattatcagttattaacttaaaagttgtttcagctgcaaatatacacaatttttgaaagcaattcacaacatttgacgaaccagcagacgagtcagttgtgttgtttcagctgcaaatatacacaatttttgaaagcaattcacaaccggcaacagtcctcgcatgatagttactgtgttgtttcagctgcaaatatacacaatttttgaaagcaattcacaacgagctgtttgttcacgtcgttgtagaggccgttgtttcagctgcaaatatacacaatttttgaaagcaattcacaacacatcagacctgttcccatcgagcctatcggttgtttcagctgcaaatatacacaatttttgaaagcaattcacaactggcgcgaacgtctctttgtcaaatagttgttgtttcagctgcaaatatacacaatttttgaaagcaattcacaacatagtattcacgcgctggcacgaggacgagttgtttcagctgcaaatatacacaatttttgaaagcaattcacaacgaacttgaagacaaaatcaacgagaggaggttgtttcagctgcaaatatacacaatttttgaaagcaattcacaacaaaatacacatgcaagctccttaccgtcgagttgtttcagctgcaaatatacacaatttttgaaagcaattcacaactgcctgcttcttggccgaatactggatatgttgtttcagctgcaaatatacacaatttttgaaagcaattcacaacaattatcggggacatcaccgcacctgccgtgttgtttcagctgcaaatatacacaatttttgaaagcaattcacaacctatcttttaaaattttatttaaataattgttgtttcagctgcaaatatacacaatttttgaaagcaattcacaacatccgagttgatgacattgtaatcaaccgtgttgtttcagctgcaaatatacacaatttttgaaagcaattcacaacggcgacgacttgaattattatttcgggtcgagttgtttcagctgcaaatatacacaatttttgaaagcaattcacaacatttccatcaaggttctcattttttaattggttgtttcagctgcaaatatacacaatttttgaaagcaattcacaacaaataattaacattatgcgccttttggcggttgtttcagctgcaaatatacacaatttttgaaagcaattcacaacttccgacgttcaaaaatttttaaaacgcctgttgtttcagctgcaaatatacacaatttttgaaagcaattcacaaccaatgacgactattcgcaagactacggcagttgtttcagctgcaaatatacacaatttttgaaagcaattcacaacaggttagtcaatcaaaagattttgcggatgtctcttggaaacttgcctgtacaggggtcttctttcccaagaacccatttgacaagggaagatataaagccgacgcataaagccagcagcccgaagccgatgacaacgtataatatgatggccaatatctttatcatttgaatgatttttttgcaaaggttgttccagctgcaaatatacacaatttttgaaagcaattcacaacaaaacaatagtttatttacgacccttcttgccttcgggcgtgaatagctttcgccagtcctgataaggcacttcgaaatagaagctgtctatcagttccacgaatatgccgaaacggaatcgcactacatccttgccgtccgaccccgtgaagcgtctgaccgtgataaacggctctggctgggtcgctccagccgtcggtagaaggtctttgctcaacatcaggaaaaacgggaatgaatagtcgcggttgtcctgacacatggcgttgacgaactgcggagtgacggtgtaggtctcccctgtcgcaaggctgtcgagcctattgtagtcgttcacggacagcagcacctgatacatcattcttttatgtttccattcaagacgcagttctgggtattgccaataatagtcgtggcggtcaacgaacaggaacgttctgccgtcagtcttgcctatgaacatcgtcgagaagttctcacaggcaacaccttcgccctgatatatgagtttgttgcacttgcggctcttccacgagctgccctcctgttcccaatagcgggcgttgtcgaggttcttcgaagcgtaagtcaggaacggcatgggggttgccgtcctgtcctgtgcggcgatcgtcagcgtgctacctattataataatcgccaagaggcacaatttgcgggctgtgttcatctttcctccagtcttgacaatatacgttctattctttcgtcacgtttgttcagagcgtcaagctggctctcaagcacgtcgagctggcggttcataattttctgctgcttgaggatgacatcaaggaatcgctccgtcccgagcgttgctatgtcctgtggagtcagattcacaccttcttcggaaggcgaaacgctttcgtaatcaccgaacatcttctgcaacagcttcaatgcactttctgggattgtttttccgcgttcccaattctgaaccgtgcgcaacgtaactccgcatttatcagcaagttcctgctgtgtcaggttgtactttgttcttattttttttacatctgccataatcgtttgtaaattcaaaggttgttccagctgcaaatatacacaatttttgaaagcaattcacaatacctcgacgcgtcaacgcggattccttatttcggcatgcaacgacatgtgcaaccagccgacgcagaaggcgatgaagatggggctgtttgaaatcaaaaagacttccaataaaaattcagaatatgaaattagttgttttgacggtgcaaagatacggtaaaattcattatctttgcggcgaagctgtcaacagctgataaattaaaaacaagaagttatgttaggcgcaattatcggtgacatagtaggctcaaagtatgagtttaacaacatcaaaacaaaaaattttgagttgttttctgatgggtgttcttacacggacgacacaataatgacagtggcggtggctgaatggctaatgacatcaagccatgcacaatgcctgattagcattatgagggagtatggaaggaattatccgttcccacaaggcggttatggcggctcgtttgcccgctggctgcgtgatgcaaacccattgccgtattacagcttcggaaatggagctgccatgcgtgtgtcacctgtagggatgatttatgatgatgcagagacaacagagtgtatggctggtctgaccgcatcagtcacacacgaccatcctgaaggtttcaagggtgcaaagtcggtcgctcatgccatgtggatggcccggcactcatacagtaaggaagcgatacgtgatgagatagaaagaatatttggttatgatttgcacatgagctgcgatgacatcagaccgacatacatgttcaatgagacgtgccaaggtacagtgccacaagcaatagtggcgtttcttgacagcaccgactttgaagatgccatccgcaatgccgtgtcactgggcggtgacagtgatacgcttgcagccataacaggcagcattgccgaagcatattacggtctccctgatgatttgtgcaaaaaggcaatgtcatatttgccggatgaatttaaagatataattgatagattttacaaaacactgaaaaacaagtagttatgaataatacagaaagaaaaaaacgctttgatagccgaatgtaaatactataaaagagaaggtcagtcgctatttactgatgaccacgataaaaaccttttgtgattttatgagcgttcaagggtaaatgagtttggatgctgtgcataccaatcatatttctcgtaaacggacaaggcaccgctatgcggtgccttgtccgtttcttcagttatcgaaactattaagcttcagtttctgttgtttctgccgcttcctcaactgccggagcctcttctgcgggggcttcctcggcgttttcggttgcttcggctgccgccgcctgtgccgcgagctctgcctgtttcttggcgatagcttcggcgcgcgctgcgttcaccttgctttccacttcgaatcttgctttctggtcggctctgttcttctcgactttagccttgatttcctgagccaacttggcttctttttctttcatccatgtctggaacttgacttcagcctgctccgctgtcatggcgcccttcttgacaccaaccatgaggtgtttcttgagcatgacacccttctttgaaaggattgaacgaactgtgtcggtcggttgagcgcccttgtttaaccaatcaagagctttgtcaaaattcaaattgatttctgccggaactgttataggattgtaagttccgatcttttcaataaatctaccatcacgaggtgcgcgaccgtctgcaattacaatgtgatagaaaggctgaccctttttaccatgtctctgtaatctgatttttgctggcataaaattactttttaaattgatttataattagttgacttaaacctactcgaggtttgcgagtgcaaaagtacaacatttttcaatatcttcagcaaaataaaaaaatatatttttgtttcaaaaaaaatctctatctttggaaattgatatatcggatttttatcctttgataatcaatttaaatgattttaaacttcatacaccaaatttcaaattgtagaaatatgttattgacatctgataccgaaacgacaggcttgccgtttatgaaagacgagcttaagcacgcctttacacacctgcatgtgcactcgcatttttcaatccttgacggaatgtcgaaaattccggagttgattgacaaatgtcagaaaaacggcatgcacgcaatggctcttaccgaccatggcaatatgtttggtatcaaggagttggctgattattccgacaaggtaaacggaaaaatcaaggataaaatcacggttcaggaagcgattttgaaaaaggaagacgctacagaagaggagaaagctgttgccaagcaagagattgaacagcttaacaagcagtttttcaagcctattttcggcatagaagcgtactgcgctcctgtcgaaatagccaagcgcgacgggcgtggcgaccgtggctggcaccttattttgctggcaaagaataaaacaggctataaaaacctttgtaagctggcatccatagcatacactgacggtttctattacaacccgcgcatcgaccactcgcttatcgagcagcatcacgagggcatcatcgcttgttcggcatgtctcggcggcgaggtgccgcagaaaatcatgaacggcgacatcaagggagcggaagaaacaataatgtggttcaaatcgttgtttggcgatgactattatcttgaaattcaacgacataagaccaacaagcctgggggcgaccaagaagtttacgcacgacaggttgaggttaacaaagtgattttggaactcgcagaaaagacaaacaccaaagtaatctgcaccaacgacgtgcattttgtggaagaggagcacggcgaggcgcacgaccgtctgatatgtctaaacacgggaaaagatctcgacgacccgacgcgaatgcgttacaccaagcaggaatggctcaaaacaccggaagagatgttcgatatattctcggatgtgccggaatctctcgcaaacactatggaaatcgccgacaaagtggaaatgtattccatcaactccgacccgataatgccggaatttgacattccgaaggagttcggaacggtggaggagtacaagaggaaattcactgaaaacgacctgttcaacgagttcacgcacaatgagcgcggcgaagtggtgatggatgagaagtctgccaagaagaagatagagaaaatggggggctatgagaagttgtaccgtatcaagcttgaagctgattacttggcaaaacttgcatgggcgggcgcaaaggagcgttacggctacaacctcaccgaagaacagaaagagcgtatcaatttcgagcttcacaccatgaaatccatgggtttcccgggttacttcctgattgttgcggactatatccgcggcgcgcgcgaggaacttggcgtgtctgtcggtcccggccgtggctcggcggcaggctctgtcgtcgcctattgcttgaaaatcacagatgtggacccgctgaaatacgacttgctgttcgagcgattcctcaatcccgaccgtatctcgcttccagatatcgatgtcgatttcgatgatgacggacgcgccaaggttcttgactggattacacagaaatatggcaaggaaaaagtggcacatatcataacttacggcacaatggctgcaaaatccgccattcaggacgtgagccgcgtgcagaaaatcccgctgtcagaagtcgccacgataaagagctatatccctgatcgcggtttcccggataacatcaaggatgagaagggaaaatcgccgaaagtgaacctcaaaaactgctacaaatacattccgggtctgaaagagatgcttaacggcgacgacgagaatgtgtcgtcaatgctaacgtatgcaagtgaactcgaagatactaatcgtcagattggaatacatgcctgcggtgtcatcataggcgccgacgacttgacaaaattcgcccctgtctgcacaatcaaagacaaagacaccggcgaagatgtgctcgttacacaatacgatggacatgtcatcgaaaatgtcggtcttatcaaaatggacttccttggcctcaagacattgacacagattaaggacgcacttgcaaatatcaagaaaacccacggcgtcgacctcgacatcgaccatatcccgattgatgacaaagagactttcgctttgttcagctccggcaacaccatcggaacgttccaatttgaatctccgggtatgcagaaatacctgcgagagctgcaacctactgtgtttgaggaccttatcgccatgaacgccctctatcgtccgggtccgatggattatattccgacgtttattgcacgcaaacagggacgcgagcctatcgagtacgacttcccggaaatggagaaatatcttaaagacacctacggcgtgacggtgtatcaggagcaggtgatgcttctgtcgcgacagctggccaatttcactcgcggagagtcggacaccttgcgtaaagcaatgggtaagaaacagattgccaaaatgatggagctcaaagacaagttcatgaaacaaggtcaagaactcggtcacgatgcaaagacactcgaaaaaatctggaacgactgggagaaattcgcttcttacgctttcaacaaatcgcatgcgacatgttattcgtggattgcttaccagactgcttatctgaaagctcattatcctgcggaatttatggctgcggtgttgaactcaagcattcgtgacgccaatgaggtcatctttatgcttgacgagtgcaagcggatgaaaatcaatgtgtttcctccgaatgtcaataagtcggaatataaattcacagtggacgaaaacggcaatatctactatggattcggtggtattaaaggcataggcgaggtggctgatgccataaaggaagaacgcgaggcgaacggcagatttaacagctttgccgattttatggcaagagtgggagcagggcatcttaatagaaaagtactggaacagcttgcgagagcaggcgccttcagcgactttaacgagttgcatcgcgctgcgtatttttatatcgccccgggagagaaactgaattttatcgagaagtcgataaaacaggtcaacgcaagcaacgagcgcaaaaacaacgcccaaatcgacctttttggagagcttgaagcagcaggcggcgacgatctgttcaaacttgatataccagattgcgaacattggtcgaacatcaagatgctggaggaggaaaaggaagccatcggatttttcctgagctcgcatccgcttgacgcttacgaatatacgattaaatattttgtggatacaaaacttgaaaacataaaagacgtcgtggaacacaaagaaggcacaacgattcatgtcgctggaattgtgtcgtcggcgaatgttatgacgacaaaaacaggtaaacagtttggcaaatatgtccttgaagaccagaccggcagctatgacttcgcattgtttggagaggcgtttatgaagtttcgtcatttgtttgtcatcggaacctccctgtttattacaggaagcgttaaagaaccttattataacagggatttgcctgatgacaagaaacgtccgaatgaacttaaagtaatggaagtcaaattgcttgacgaggtttttgagaaatcaaagcgcgaagcgaagtttgtgttgaa

SEQ ID NO: 2108 - DNA, 24335 bp, synthetic construct
  misc_feature 1..24335: note = Synthetic
  source 1..24335: mol_type = other DNA
gtttccggtggcggtgtattcgtagagtcccgaggagcgggtggacgtggcgccctctccggcggcgatggtgacgtgcagttggtcggcggtgcggaagccttgccagtcggtggcatcgggaactgcggcatcggcgcgggtggcgggggtagtggcaggtcgggtagtcagtgtgcccagtgccagcgtttcgccggttccccggttctcggtgatggcagtcaggtcgttggtgcatcctgccgccaatatcaggcataccagtgtcagggcggtgatgcagatggcggtaacggttcgtaccagtgcccatctttcttcctttagtactctcatgatgtttacttgtttatagtttcgcattccatataggttttttgtttgcctttatcgttttcagcctgtcccgtgggataccgggtatcaccggatgctgaattggcagcgaatgtataaacaaactataagaccgccattttttgtagtcttctccttgtcctgatttgtcgctttgatgtcctgaaatgtctcacccccgctcagaagggtatctggcgggggtgagggatggaaagggaagaggatgtgacccggaaactcccttaaagactatcccgatattgtgccggcgacagatggaaaaccttattgaaggctgtgtagtaggcgctacggctgttgaagcccgacagggtggctatggcgtctatcgtgaatttgtctttctccttcagcaatgctacggagtactccacacggagacggttgaggtagccgctgaggttatcgttggcttgctcctgcaagagagcgctgaggcggttcttgctgagaccggctattttcatcaggtcttcacgggtcatattggggttcaggaaaagcttgccggatatcagcgaggcttccatttgcatgaaacggagccggttctcttcgtcttttacctcctggacggctgcctgcttttcttcggcctcttccttttctatttccgcgtatgccttgcgcagttcctccttctgtgccagcaactcgtctatctggcagacggcgatgcggttgcgctcgcgggtgcggcgcaggttgaggtgcttttcccacagcaagattaccagcagcaaggctacgaggctggcggcggcgaaaaggatgtattggcgtttgagctcagcctgagtctcacgtatctgcatgtctttctcctgcgtttggtacaagatggcgaattcgtgtgcctggcttgccttttcacgctgatagatatggtcgtttacatggatgatacgttgcaggtagctgtttgccggttgctgattgcccagtccgcgataggcttgggcataataactcaataacgtggtatagttatagctgatggtatcggctccctggaaaatggcggcgtaattgtccaggcgctgcaatgcttcatggtactggtggttgtgcagcaggtaaggaacgatttcaacttgtcccacttgggaggaagagaaggcggtggcaaggtagttgcggcacgcctcggcggctttccgggtttctccctcttgctgataataccaggcgagcttggaatacaggtatccatattgctggtcgatatagccgggaggcgggccggacatgccactcatgcgatggatgacgtcgaggcgctgccggcatatcttgattgcctcaccgttgcggtggctgtcgttgaggtaggaggacaggtcgccgtagtatgtggacaggtatgccagttcgcgtacgttgtcgctgcctttcagcaggtcgatggaacggtacatgtattgcagggcttcgtccctgcgctgcatgccgccgtatatccgtccgatggtgaatagcagttcgctttccatcgctttctgctcctgtgcctgcgccaagccgatagcttcggaacagatgcgtatgccttcctcgtacttgttctgacgctcaagaacagcggcaagctgtgtcagcattttcagcttgcgggcaggaaccgtttgtacggagtcggtagtgaggacacgccggaggtagcgctctttcagggcatacatgcccaggctttcgtagaccatgcaacgcagaatgtcgatgcggaaaggttgcatccggtgggatgcttcggcttcattgagcaggtgcagggcactgtcgggcattgacaaatagatgctgcggatgtgcttttcggtgagtaggctgtcggtagtttgggcggacttcggagtgtttgcggcaagaatagtaccggatatcggcaggaatgtcaggcagatgacgcaccagatgcaaaagtttctcattgtttatttcctgtatttatgtggcaaagatagggattatttttatctttgcccttgttttgaaatgacttattagaatgaaaatatctatcaaacctatcttatattctttcttgctattgacaacaacaggggcgcaagcgcaagaagcaacttttactcctccttttgattttcccattactttctccggcaacttcggcgagatacgcgccaaccactttcacggcggactggatttcaagaccggcggaactatcggaaaacaggtacatgctttggcagacggacatatctcgcgcatacgggtgacgcatggttcgggctatgtgctcgatgtggcatacgataatggctattccaccatcaaccgccacctcagcgcttttgtgtcgccgatagccgagagggtggaagcgttgcaatacgaaaaggagagttgggaggtagagattactcccgaaccggatgaatatcctgtaaaggcagggcaggtgattgccttgagcgggaacaccgggtattcgttcggtccgcatctgcatctggatatgattgaggcagagacgggagactatgtagacccgctccctttcttcaaggcgaaagtgaaggataagactgcgccacgagccgagggacttatgttctttccgcaaccgggcaagggtgttgtggaggggaagcaagatcgccgggtatttcctgcacatcctgtgaaacctataacagcttggggggtaataggagtgggtattcgtgcttacgaccgtatggatggagtaggtaaccgttatggagtgcacaccgtcatccttgaagtggatggaaaagaagtgttccgaagtgtagtagaccgtttttcgtacaatgaaaaccgttatatcaattcgtggactcaaggtgagtttatgaagtcgttcattgaaccgggaaaccgcctgcgtatgcttcgggcatccaatggaaatcgcgggctggtagatatcaatgaggaacgcccttatcagtttgtctatacattgaaggacgcgcttggaaatacctcgaaggtacgtttcacagtgcagggcaagaagacggatattcgtccggtggaacatcgggagaagtatgcctttaaatggaaccggacaaattatctacaggaaccgggtatggaactggttattccgcgtggcatgctctatgatgatgcctggctgaactatgaggtacgtgccgatagcggagacatcgcatttacttatcaattgaatgatacccgtatccccctgcatgattattgcgagatgcgtatcgggctccgccgcctgtttctggaggatgtatcaaaatattatgtagcttctgttactccccgtggaggaaaatatagtgtaggcggtaaatatgaagacggttttatgaaagcccgtattcgcgaactgggaacttataccgtagccatcgataccattcctcctgaaataattccggtaaatcctcaacagtgggggcgcacgggacgtatcgttttgagagcgaaagataaagaaacaggcgtcaacaagtaccgtggtacgattgacggggaatatgccttgttcggcaaacccaattctataagtggcaatctggtgtgtgaactcgacccgaagcatgtcaggaaaggcggtaagcatattgtggaaatgactgtgacggatggctgcggaaatgagactacgaaacagtttcattttacgtggtaagatgcaaatatctgcctaatctgtggtaaactgaattaataacattataaatagctaaagtatgaaaaccaaaagactgactctttccgtcttgtttgtggctgtggcagtggtgaacgcacttgcctgtaccaacctgattgttggtaaaaatgcctcgacggacggttctaccatcgtttcttattctgccgactcttacgggttgttcggcgagttatatcattatcccgcaggtatgcacaagaaaggtacgctgattgatgtacacgagtgggataccggcaagtatctcggtcaaatagaacaggcgcgccagacttataatgtcatcggtaacatgaacgaatttcaggttactatcggtgaaactacttttggagggcgtccggaattagtcgatacaacaggtatcattgattacggcagtttgatttacttggggctgcaacgttcgcgcacagcccgtgaggccatcaagataatgaccggattggtacaggaatatggctattacagtagcggtgagtcgtttaccattgccgaccctaacgaaatctggattatggaaatgattggcaaaggtcccggtgtgcgtggtgctgtgtgggtagctgttcgtgtacccgatgattgcatctctgcacatgccaaccaaagccgtatccatcagttcgatatgaacgacaagaacaactgcatgtattcttcggatgttatttcctttgcccgtgagaaaggttattttgagggtgtaaacaaggatttcagctttgccaacgcttatgcgccgctcgattttggtgcccttcgttattgcgaagcacgtgtatggagctacttcaatatgtttaccgaccgtggcaacgagtttcttccctatatcgaaggtaagacccaaactcctatgccgttgtttgtacgccctaaccgcaaaatctcggtacaagacgtaaaaaacgccatgcgcgatcactacgaagggactcctcttgatatcagcaaagatttcggtgcaggtccttatcacactccctaccgtctttctccgctttcattcaaggtaggcgacaaggagtatttcaatgaacgtcccatctctacccagcagagcggttttgtctttgttgcacagatgcgctccaatttgcccgatgccatcggtggagtactttggttcggcacggacgacgctaatatgacggtgtttactcccgtatattgctgcacggataaagttcccgtttgctactcccgcgtggatggcgccgattatatcactttctcctggaactcatccttctggattttcaactgggttgccaacatggtttatccccgttacgacttgatgattggtgacatccgtgctactcagacagagcttgaaaacactttcaatgaggctcaggaaggcattgaagctgccgcagccaaacttctggagaaagacccggctcaggcaaggtcgttccttaccaattataccaatatgactgcccaaagcactttcgatacttggaaacgtcttggtgagtttatcatcgtgaagtacaacgatggtgtagtgcgccgtatgaaagacggtaagtttgagcgtaattctatcggtcagcctgccggggtggttcgtccgggttatcccaaggaatttctggaagaatatgtgaaacagaccggagatagatataaaataccagaatgatggtctgggttggtttacagcttgttcatgttctttgtaaatactgtacaaatctgtgaatctgtagtaaaaaaaattaggataattgaacttaatcttctacatttgtgtcttaacaaataattggagtattaacctttaatattaaaaatattcttatggaaaatcaagaactgatcaagcaggtgactgagaaagcggaaaaatggcttaccccggcatacgatgccgaaactcaggctgaagtaaaacgtatgttagaaaatccagataaaaccgaactgattgagtgtttttataaagacctggaatttggcacaggtggtttgcgcggcatcatgggagtgggtaccaaccgtatgaatatctatacggtaggtgcagctacccagggcttgtccaactatctgaacaagaatttcaaggatatgaagcagatttctgtcgtggtgggtcatgactgccgtaacaacagccgcctttttgctgagatctctgctgatatcttctctgccaacggtatcaaggtatatctttttgaagatttacgccctactccggaagtttcgtttgcgatccgtcacttcggttgccaaagtggcatcaatatcactgcaagtcacaatccgagagagtataacggttataaagcttattgggatgatggtgcacaagtactggctccacatgatacaggtatcattgatgaggtaaataaggtgactgttgccgatattaagttcaaaggcaacaaagatttaattcaggtaatcggtgaggatgtcgataaagtgtatttggataaagtacattccatttccatcgatcctgaagtcatcaagcgtcagaaggatctcagtattgtttatactccgcttcatggtgcaggtagagtgcttatccctgcttctctgaaagaatggggatttgagaatgtaaattgcgtatccgagcagatggtgaaagatggtaacttcccgactgttgtatctccgaacccggaaaatgccgaagcactttccatggcgatagcattggctaagaagattgatgctgacatcgtaatggcaagtgaccctgatgccgaccgtgtaggtatggcttgcaaggatgataaaggcgaatgggtattgattaacggtaatcagacttgtttgatcttcttgtattatatcatcaagaaccgcatagctatgggtaagatgaaaccgaatgatttcattgtaaagaccattgtgactactgaactcatcaaagctgtggccgataagaataagattgagatgcgcgactgctataccggtttcaagtggattgctcgtgaaatacgtttgagtgaaggcaagcaacaatatatcggtggcggtgaagaaagttatggattcttggcagaagattttgtacgcgacaaagatgccgtttcagcttgttcactgttggctgagatctgcgcttgggcgaaagatcagggtaagacgctgtatgatgtactgatggatatctacgtagaatatggtttctccaaggaaactaccgtaaacgtagttaaaccgggtaagagtggcgccgatgagattaaggctatgatggataatttccgtgccaatcctccgaaagaaatcggtggttctgccgttaaactgattaaggactacaagactttgaaagttaccgatgttcagggcgatgtaaacgaactggatatgcctgaaacatccaatgtactgcaatatttcacggaagacggtacgaagatttctgttcgtccttcaggtaccgaaccgaagattaagttctatatcgaagtgaagggtgaaatgggttgtccgaaatgctataagagtgctgatgctgaagctgaaaagaaagttgaagctgtacgcaagtcattgggaatttaaaaggtaatcagacctaaaacaggaagggtgtaaacagttttgatgtttgcacccttttcttttctatcgtgatcattccgattgtattaagcttctttcattttctttaagccagtcttcgtaatcattctgcgttaaatgctgtttttatatgcgacagaggtcaacagttaacagatagtactacagattgcggttgcacgccgattggttgatgtgaatgagagtcgtttcattcgtagttgttcgtttgtgagagcgtgttttccgcaatctgtttttattgtaatgtcacctcgtcatcctgttactttaccattttatcacctctcccatcatctccattttccagccaccagtcaatcagttttctcgcaatactgagtttgcgaggtatctccggcagattatcttttgaatagaaacctgcggcactcagttcttcatcttgcagtttgatttctccactttcataatcagcgacaaatcctaccatcaatccactggggtagggccagggctgattaccgaaatattggatgttctttacttttaatccggtttcctccagcacctccctgtgcacacattcttccaaagtttctccggcttccaaaaatccggctactaatccgtagaatgtgccacggaagttacgggcatgtaccaacagaatttctttacctttccttatcagtacaatgatagcagtggaaacaggaggatacatttcatttccgcaattggggcattttttcatgataggagtttgctgttccatagccgtaccacatacagggcagaagcggctatgctcatcccaatagagtatctggaatgcttttcctgcagaacgatattcgtctgttgtgatgtattcatatgaagcccgcaatccgatcatcacccattcgtctgtttcggttatcggttgttctatggcaaatgctcgcacctgtttaccgttgggtggaaatacattgtgaatatgtgcttcctgtgccggtttcacaggcggttcggtgctgacaggtatgctatatcttatttcccctttctcggtatatccttttctcagcagcagttggtctttgaaaaagacgaaccattgggtgtcaggtttggtttctgttgcttccatgtcgttttgttttataagatttccgttattcgattttttcagattacttttcgggtacagaatgaaaaataatcgacctataaataattatccattcgcttcctcctgctgcctgatataaaccgttgacctgcccaatccgcggcggcgcagaaatccttgcagaatgaatttgttcaattcgtcaatggcggcatgcctcgtcagtcccgtgagcctgatgtattcgcttttggtgatgcaaacattcttttggaggaacgctttcagcttttctttccttgattcttcggtagatattatctgtttcgatttcttggttttcgagtgaattcgttccagtctcatggcgtgtctgattttccggcggaatgtgctgctgatacgtaagtgtacgttttggaactgcaccgattctgccctgatttttgtcttgtcatcatccgtcggacgcaggcatttcagtgaagtgctgaaaaatcccagttcgcccagttccacgatgttcccgtcagccagcagttcgcaaagttcctcaatgcaagcatccagtgccgcacctataaggtttttgggcagatgctgatacatggccacatgctccacaaactctttctgcgtgtaggtcttttgcggacagatacgtgcgtgtagggatttcttgtcttccttccccttgggcgaaggtgtttcgtaaaggtcataatatgcactcatagactatatctttctgtttctaaatgaataaatgcggtttcttcgataaataattcctgtctcttcaataaactatttgttgcttattaaatactaatcgttcgacaactgtttctatttcgtccgacattttttgaaatatcgtccgacatatatcggacgaaatagaaacgtctatcggacgaaaacgtattggcatacaaagatatagtttttagtgatacgaagatagtttagggggatgaaacttatagtttataggaaaggttcttcatccaggcagacaggcagaaatatataattattcgggataacatataaaaaatcccccgttaaggacgagggaacctaatgttttcacaacggaataatccttattgtgatttgcttcattttagttttgcaaatatatgaaataaattccttatgaacaaaggattttagaaataaaataattacatttgaaaatatttttttaataatatactatgaagaaagttttaggtttagatttaggttccagtagcataggatgggcattagtatatgaagctgaaagcgataatgaaacatcatccattattagattgggtgtgcgagttatacaatatgataattttgttagtacagaaactgcgacagaattaaaaggagatgctgccgaatattttaaaagagggaaaggaatatcacccaatgctggtcggactaaagcacatgctatgcgtattaatttgcaacgatataagttgagacgcaaagctctgatagataaattaaaggaatgtggttttattaatgatgaaactttactctcggaacaaggaaacagaactactttcgaaacatatcgcttaagagcaaaagcggtggaggaagagatatctttggaagaattggtgcgcgtgttattaatgattaataaaaaacgcggatataaaagtaaccggaaaattaaagggagtgaggatggtgcgctgatagacggaagggaagtagcgaaaaaattgtatgtagagaacctaactccgggagaattgtgtttgcaattgcttgaagctggaaagaagaatttacctgaattttaccgctcggacttacaaaatgaatttgataagatatggaactttcaaaaacaatttagtccggaagctttctgtgacgcagcgaaggaggaagtaaagggaaagaataaaaatcagacgtgggctatattagcgaagtatttcgtctggacaagaaatgattctttttggaatgaagaggaggcgagaacagaggtaagaatgaaagaatataaacttgtcggtctcaaacggactaccaagggacatgaacagaagttggaaaattatcgctggcgtgtgcaggctctttccgaaccgatgaatcttgaaatgatggccattgtactgcaagaaattaacggacagattactgcatccagtgggcatttgggcgctatcagtgaccgtagtaaagaactctatttcaataagcagacggtgggccagtatctgatggccgagctggataaaaatcctcactatagtttgcgtaataaagtcttctaccggcaagattatatggacgagtttgatgcgatatgggagagacagcgtttatatcacacggaactgactcctgaactgaagaaagaaattcgtgatatcatcatcttctaccagcgccgattgaaaagccaaaaaggactcatcagtctatgtgagttcgagagacgggacattgtagtggagaaagatggtgtgaagaaaaccaaaactatcggttgcaaggtaatacctcgttcgcatccattgtttcaggagttcaagatatggcagacattgaatgacataaaggtgttcgtaacaggaaataagggtaaaggcaagaaggcaaatcaatcatccacgttgtttagcgagacagaagatgctttattggcagaagggaaacgatatttgtaccaggaagaaaaggaactgctggctaaagaactctttgtcagagaaagtatgagtaaagcggaagttctgaagttgctgtttgaaaatccgaaagagttggatatgaattttaagcagattgatggcaaccatacggggtttgcacttttctcggtatatagcaagatgattgaaagatatggctatgaaccggtgagttttaaagcttctgcagatgatataatcgaaaggcttgaaatcatatttgctgatttaggatggaataccggattgctctctattgatttgagtaaagatgataaagaactggaaaagcagccttatttcagactttggcatttactgtattcttttgaaggggataatacggagacgggaaacggtaagttgattgaaaaattgatgcaactttgcggtgtgcagaaagaatatgccaaaatcctggcaaacgtatcctttcaagatgactatggaagcttgagcgcaaaagcgataaagaaaattttgcctaatctgaaagagggaaatcaatatgatgttgcttgtgggtatgcaggataccgacattcgcaatcttcattgactaaagaagaaataaagaataaggtattgaaagataaattggaactgcttcccaagaatagtttgcgcagtccggtcgttgagaaaatcttgaatcagatggtcaatgttatcaatacgataattgatacatacggcaaacccgatgaaattcgggtagaattggctcgagaattgaaaaagagtcgtaaagagagagaagaattgtcaaaatccattgctcaaaatactcgggagcatgaggcaattcgcaagttgctacaaacagaatttggtatgatgaacgttactcgtaatgacattatccgttataaactttatgaggaattgaaagataatggatatcatacgctctattcaaatcaatacattcccaaagaaatgattttcagtaaagagattgatatagaacatattattccgcaagctcgtctttttgatgattctttgtccaataagacattggagtataaggcaatcaacatagaaaaaggtaataaaacggcttatgactttgtaaaagaaaaatatggtgatgagggtttgcagcagtatctcaatcgttgcgaagcgctattcaaggataagaaaacgaagttgaaaaaacttaaaatggagagtcgggatattcctgaaggcttcattgaacgtgatttgcgggaaacccaatatattgctaagaaagcgttgtcgatgttgagtgaaatatctcgtcgtgttgttgctacaaccggttctattaccgacaggctgcgcgaggattggcaattggtggatataatgaaagaactgaatctgccaaaatatgaaaaactgggtttggtagagatgtttgaagataaagatggcagacaaattaaaaaaatcaaagattggagtaaaagaaatgaccatcggcatcatgccatggatgcgttgactgttgcttttactaaagatgtgtttatccagtactttaataataaaaatgctttttggatgtctggctctaaagagcatgcaaatataacggcaataaggaataaatatttcgggaatgggaaagctgttgcacctataccattaaggacatttcgtatggaggtaaagtaccatttggaaaatattctggtttctatcaaagtcaagaataaaatagtgactaataatattaatcgtacgaagaaaaaagatggagaaaatagaaaactgcaacaaactccccgtggacagttgcatttggatactatctatggaagtcatcgacgatatgttgtaaaagaagaaaaagtgaacgcttcttttactgccgataaaattagtcgtgtaagcaaaccggcttatcggattgctttattaaaacgtttggaggcttttggcaatgacccgaagaaagcattcacgcttaaaaactccttggataagaatcctgtctatcttgatgaaaaacagatagaaaaagtaccggaaaaagtggctattgtagagtttgaaactgtttatactatacgtaaaccgattgatcctcaattgagtatagataaagttgtagatgctaagatacgtacacttctgaaaaaacgccttgaagaatatggaggagatgctcaaaaagccttttctaatatagaagagaatccgatatggctgaataaagaaaaaggaatatcgataaagcgcgttaccattagaggtatcaacaaggctcaggctttacatgagaaacgagacaaggatggtaatctgatctttgatgaaggaggtagaaaaattcctgtcgatttcgtaaacacgggtaacaatcatcatgtggctatttatagaaaacctgttgtggataaaatcggacagattatgttggatgagcaaggcaacccgaaatatgaacttgaggaaaaggtggtgtccttctttgaagcggtggcgcgtataaaatgtgaccagcctgttattgataaggaatataagcacagtgaagggtggaagttcctgttcagtatgaagcaaaatgagtattttgtatttcccaatgagaaaacaggatttaatcctgaagagattgatttattagatcctgagaattatgcactaataagtcctaatttgtttagggtacaaaagattggtgcaaatgattataccttcagacatcatctggagacaagcatacaaaatagttcaaatgatttaaaattcattacttggataagatgtggaaaaaatggggttaatggtgtagttaaagtccgggtaaatcatatcggacaaatagtatcaataggggagtattaatatgaaagtataagaaaatggtgaataaataatctataaatcggagtgctatgattaagaaaacactttattttggtaatcccgtttatttgtctttgaagaatgctcaattggtaattaaacttcctgaggtagtcaagagtgatgttttgcccgaaggatttaaacagtgggctgaagtgactaagccaatagaggacattgggattgtggtattggataataaacagataaccgttacttcgggagtgctggaagctttgcttgaaaataattgtgcagtcatcacttgtgatacaaaaagtatgccggttgggttgatgcttccattgtatggaaatactacgcagaacgagagatttagacagcaaattgatgcttctctgccgttgatgaaacaactttggcagcagacgattaaggcaaagatagaaaatcaggcagtggtattgaaggagtgtgctggggaagaaataaggtgtatgaaagtttgggctgctgatgtgaaaagtggggattcggataatttagaggctcgtgcggcagcatattattggaagaatctgtttaggatagagggatttaccagagacagggacggggttccgcctaataatctgttgaattatggatatgctattttacgagcagtggttgctcgtgggctggttgcaagtggactcttgccaacgttggggatacaccatcataatcgttacaatgcttattgtctggcagatgatataatggaaccttatcgtccgtatgtggatagattggtgtacggcataggcaagaataatgatacttatactgagctgactaaagaattgaaagcgcagttgctggctattcctacattagaaactaatatttcgggaaagcgtagtccgttaatggtggctgttgggcagacaacggcttcactctataaatgttttagtggtgaactgcgtaagatatcttatccggagatgtaatggacagatttagtgaatatcgtattatgtgggtacttgtattgtttgatttgcctaccgagacgaagatagataaaaaggcgtatgtggattttaaaaaaaaactgcaaaaagatggattcacgatgtttcagttttctatatatgttcgtcattgtgcgagtagtgagaatgcggaggtacatataaaaagagttaaatctttcttgcctgaacatggaaacgtaggaattatgtgtattacggataaacaattcggaagtattgaacttttttatggaaagaagactatggaagtaaatactccgggacagcaactggagctgttctaaaaagaaaatcccgctattaggcgggattttttctgggaaacatacttctttttttaattctaaatggtgtagtaactagttgaatattataatgtaatgaatattcagttgtttccaatggttcaaagatactaaaatgaaagcaaatcacaactccagttcggccactaaaatatactggagcgttgtttccaatggttcaaagatactaaaatgaaagcaaatcacaacaaatcacaattgtcctgtatttccattgtgttgtttccaatggttcaaagatactaaaatgaaagcaaatcacaacctgaatagttgccttcatgaaggattttttgttgtttccaatggttcaaagatactaaaatgaaagcaaatcacaactggtaacttgtttttcaaaatagaatgaaggttgtttccaatggttcaaagatactaaaatgaaagcaaatcacaaccatcgctacaatattagcccatgtcatttcgttgtttccaatggttcaaagatactaaaatgaaagcaaatcacaacattccatggagtattaccacgtcaacaatagttgtttccaatggttcaaagatactaaaatgaaagcaaatcacaacatatactctttcgcaggccttgaaagcttgttgtttccaatggttcaaagatactaaaatgaaagcaaatcacaactaatggtggttggctttgtgctaatgagatgttgtttccaatggttcaaagatactaaaatgaaagcaaatcacaacaagtgccgaagccttatccggtggaaagaagttgtttccaatggttcaaagatactaaaatgaaagcaaatcacaacgtttgaccgtttggccacaaacaatatggtgttgtttccaatggttcaaagatactaaaatgaaagcaaatcacaactctttccaagcttgataattatttttatgagttgtttccaatggttcaaagatactaaaactcgcaaaaaaacggcaaaatttggataaataaagtaagtgtttggtattgaggagagttaagccaaattcttatatacctttccaaatcgttaaaatgtaggataatgaagggctaagagaaagatttgctacttatccgttgccctttttagccccggataatccggcaaaataacgcttgaccacctacggttttaccgctcaccatgcaaagaaccctatattttgcccgtagagataaccgtttttttctgtttttcatggaaatacaggttgtgttaccggtatccggagttttagacagggatgggtggcctacagtatgcccgaacgtacccggctcagtgtttcgggcgtcatcagcagataggatgcgatatgggataaaggcgctcgtttgatgacttccggctggtgctgcatcagttgggtgtagcgttcgcgtgccgtttcgaaccgccaggagtcagcctttatttgtgagacaatgagtgaatattcgagtattttgcgatagaacatgttgatttcccaggaaacttcggtgaggagcatcagcttgtcgtaaggcaacagatagactacactgtcttcaagggcttcgatcatgaggtgggttggctctttcttcagcgtgctttcaatacagatgatgatacaaccttcgtaagagaagtgttcggtaacgtcttttccatttttgtaatagaactgtcgcaacatacctttaccgacgagaaccatattgtggctgacttgcccttctttcagcaggatctcgcctttttgtacctctttacggataagaatttcttctatctgttttctaccttcgggagccatcccaggataacgggaattaacggcagcatctacagtttcctttaatagtgtatccatacagccaaatcggttaaagttcgttttacctgcaaagatagaggttttgtttaattactgattactaattgtgaattaaagcttgccatattgaagtatattgcgtatgatgacgcaagtatactattttttagtttccggtgcaaaaaaagatgttttttgtattagtaattaatgaagcctttatgtacccacttcatactgtaccatcgatgtacaaagatgatcccccggatattttcgtccagtaagaaagccacccacatgccacagataccccatccgaaaggaataccgaaaagataaccgaggccgaccgctatactccacatcacaaccaacccgacatagaacggatagttgacgtcgcctgccgcacgcagggcgttggtggcgaaaatattgatagggcggcctatttcaagaactatatcgatgaatagaatagtgacgcccatgtgtatgatttcgggattggaagtgagccaactaaagatgatatgaccgaaaaatgcgaggatgcatgagagtataacggttatcatcacagattttttcatgacgtatttacccatcagaaaggctgcatgcggtttcttttcgcctatcagatgtccgatgcagatggcaccgccctgtgccatcgagatgctgaacaggtaggcaaacataatgatattgacgcaataggtacgggtggcgagtgcttctactcccagcatattgataaagaaggtgatgacaacctgagatgaactgtacgataattgttctccggcggaaggtaatccgactttcatcaagtttttcaattccatccatggaaacgggcgaaagtaggcaagcggaaaacggtgaatatgtttgcggaacaggatgataaataggagcaacatcgatacaccacgactgaaagctgtggaaatggcagcaccttccacacccatttcaggaaaaccgaatcgcccgaaaataagtgaatagttacctattatattaaggatattgataacaacagttactaacatgggatatacagctttgttggcgctacgtaaagaggcggagagagtgagtgaaagtgcctggaaaaaagcaaaggcacctacaatacgcatatagtcaagaccgtcttgcatcagttcgggagtgagccccatcagacggagaatgggattggcacaggaaaacaggagcagactgacaatgattccgaccaccagattgacgatgatagagacacctacaacttgtactaccttcttttgtagtttagcacccaagtattgggaacaaagtacggaagtgccgaggtttatgacttcgaatactaggaatgtaagcatgataatctggttgacgacacctacggcggcaacactgttgtctgagtgtcggttcagcatgatggtatcgactgcaccgagcatcatgatgagaagtgtttctataaagatgggggctgccagtttagcaagccgtttctttaaactttcctgttgtatcatttggaacgtgctgtgatgaaaaatcgcgcaaaggtacagaaagaggaaagaagaaggattgatacaaatcaagaaataggaatttgtagatttatgatttgtaaattctcattttttttcttcctattagaatttgactgttaatgtgttacctctttttatcggaaaatgcttaaaaaaatatgtgagaaagatttgcaaagtccaaaagtttgccatacatttgcaccgcatttgagaagaatgttggttaataaaaaggaagtttgggtgagtggctgaaaccaccagtttgctaaactgacgtacgggtaaccgtaccgggggttcgaatcccccagcttccgctctttgcactcttagctcagttggtagagcaactgactcttaatcagtgggtccagggttcgaatccctgagggtgtactaaaccggaaagccggtggattcgtctaacggttaggacacatgcctctcacgcatgcaatacgagttcgattctcgtatccactacaaacgatattaatgcggttacctaatggggtgaccgctttttttatgcttttattttcaacctacaaggatacttcctatctttgtaggcataaacggtaaaactgtaaaacattggattggctatatagtttgtttgtcgaacattccgctttacaggcggtggtggtactctcattaatttccgctatcggattgggactgggtaaagtgcatatctgtggtatatctctcggtgtgacgtttgttttttttgcaggtatccttgccgggcattttgggttgtccattaatccacagatgttgaactatgcggaaagtttcggattggtaatatttgtatatgcgttgggactgcaagttggtccgggctttttcagttctttccgtcaaggaggagtacaactgaatatgttggcgttgggcgtggtgctgataggtacattgctcacagtactgggtagttacggatttggcatttctttgcccaatatggttggtatactttgtggagctacgactaatacgccggcgttaggtgcggctcagcaaacgttgaagcaaatggggttggaagccagtactccggcattgggatgtgcagtggcttatccgttgggtgtggtaggggttattcttgctgtgttggctatccgtaaggctttggcacgtaaggaagatttggaactcaaagagaaagatgacgagaataaaacctatattgctgcctttcaggtgcacaatccggctatttttgataaaagtgtcaaagagatagcaagtttaagttatcagaaatttgtgatttcccgcttgtggagggatggtaatgtaagtatcccgacttccgaaaaagtgataaaggagggtgatcgtttgctggttatcacttccgaaaaatatgcgcctgcgctgactgtactttttggtgaacaggaacatacagattggaataaggaggatatcgactggaatgctattgacagccaattgatttcgcagcgtattgttgtgacgcgtcctgagttaaatggtaagaagttgggctcattgcatttacgtaatcattatggcattaatatcagtcgtgtataccgtagtggtgtacaattgctggctacggcagaattaactttgcaattgggtgaccgcttgactgtggtgggtgaggctgctgccattcaaaatgtggagaaagtattaggaaatgccatcaagagcttgaaagaaccgaatttggtagcagtgtttgtgggtatcatattggggttggctttgggggctattccattttctattccgggcatcagtgctccggtgaaactcggtctggcaggtggtcctatcattgtaggcattcttatcggtacgtttggtccgcgaatgcatatggtaacttatactacacggagcgccaatttgatgttacgtgcactggggttatctctttatctggcttgtttgggacttgatgcaggtgctcatttcttcgatacggtattccgtccggaaggtttgctgtggattgccataggtttcggactgacggtaattccggtgttgattatgggtgtcatcgcatttaagataatgaaaattgatttcggttcgatggcggggatgttgtgtggaagtatggcaaacccgatggcattgaactatgccaatgatacgatacccggtgataatccgtctgtggcatatgccacggtttatccattgtgtatgtttttgcgtgtgattattgcgcaagtgttgttgatgttcttgcttggttgataattgatagtaagagattgataattggaagttgagaattaaagtttcagagtgattttaaataaagtaactttcatcgtaatttgtaaatcgttaaatcgtaaataatatcatgggaaccattactcctgaaagtattgtcagtgacctgcgctatttgcaactgttgtcacgtagttttcctactatcgctgatgccagtacggaaatcataaatttggaagctattctgaatttgccgaaaggtacagaacattttctcactgatattcatggtgaatatgaggctttccagcatgtattgaagaatgcttcgggagctgtgaaacggaaagtgaatgagatttttggtcataccttgcgtgaaagcgagaagaaagagctgtgtactttgatttattatccggaggagaagttacaattgataaaagagcatgaaacagatttggatgattggtatctgattactttgaaccaattagtgaaagtctgccagaatgtttcttctaaatatacacgttctaaagtacgtaaggcacttccggcagaattttcgtatattattcaggagttgttgcacgaatcgagtatagaaccgaacaaacacgcttacatcaatgtaattatcagtaccattattactacaaaacgttccgatgattttatcattgccatgtgtaatttgatacaacgtctgacgattgattctttgcacattgttggtgacatttatgaccgtggaccgggcgctcatatcattatggatacgctttgcgattatcataacttcgatattcagtggggaaatcatgatattttgtggatgggagctgcatcgggtaataatgcctgcattgccaatgttatccgcatgtccatgcgttatgccaatctggcaacgttagaagatggctatggtatcaatctgttaccccttgctacgtttgctatggatacatacggtgatgatccttgtacaatctttgctccgaagatgaattttgccgactcggaatacaatgaaaagacgttgcgtctgattactcagatgcataaggcaattacggttattcaactgaaactggaggcggatatcatcagccgtcgttctgagttcaatatggaaagccggaagttattgcataggattgattttgagcgtggagtatttatgtacgaaggtaaggaatatgagttgcgtgataccaacttcccgacggttgatcctgcggatccttaccgcttgtcggatgaggaaaaggaattggtagataagatccatgcctcgttcatgaatagtgagaagttgaaaaaacatatgcggtgcctgtttacatacggtggtatgtatctggtttgtaacagtaacctgctatatcatgcttccgtacctctgaatgaggatggtagttttaagcatgtacgtatcggaaagaaggaatattgggggtataaattgttgcaaaaaactgatcaattgatacgtacagcctatttcgatgaggatggttctaaagaaaaactgtttgccttggactatgtctggtatatgtggtgtggccctaatgcaccatcattcgacaaggataagatggctacctttgaacgttactttgttgccgataaggagctgcataaagagactaaagggtattattatactttgcgtaatcgtgcggatatctgcgataatatattgactgagtttggtgtagaaccaggaccccattcacatatcattaacggtcatgtgcctgtaaaaaccattaagggtgagaaacctatcaaagccgatggtaagttgctggtgattgatggcggtttctctaaagcttatcagcctgaaaccggtattgcgggttatacattggtgtatcattcccatggtttgcagctggtacagcacgaacctttccaaagtcgccagaaggcaatagaggaagggcaggatattaagtctaccacatttgttatcgagttcaattcacagcgtatgatggtgaaagatacggataaaggcaaagtacttgtgacacaaatccaggacttgaaaaaattactagtagcgtatagaacgggatttataaaagagaaacaatgagataaatggctatttagtatttaaacaatatcactccaccttctacaatcactcctttgtcatagttggaacttctgttgtaatacctgtcccatccataaccgccggtaacgaatatacccaaataatccgtcaatcggtactcaagattaatgcgtgattgcaatgagtagagacgggcgggataaccgtggttcttattcttgaaggtttcgatgtgttggtagcctaaatctccgctgatgtgcaatctttcataaagaggtaattctaatccggcacgatagaataaagcggcagagaacttatcactgaaatccagatagggagaaccggcacctagaatggtgtaaaatagtttgttcttgaagcgggcggccgcattcagtttagtggtattaccgccgaataccataagttgcactttagtttgtgggttggcattgactaaacctaattggaaaccattcaaactctctttatagtaattcagaagtccgatttgcagaccttttgcatggagggcaacgttgagtggagcaagttgtattccggtagctgtaccgcctactacattgcctatacctgctatttgaagccctttcatatcatcacccactacgctcaacaatccggaaatattgatccctttgaaactacctcccgaaatattggcaagtcctgagagttggacccctgcagattcttctcctgtgatattcagtaagccaccgataatgacaccacggctgttatctcccgtgatgttagctaatccggacaatacgactccccgtgcataatttcctgtaatacctaccagaccggatatggatacaccgctcaaactgttaccgttgacattggtaataccggcaatctgaactcctcgcatactaccgc

SEQ ID NO: 2109 - DNA, 24335 bp, synthetic construct
  source 1..24335: mol_type = other DNA
  misc_feature 1..24335: note = Synthetic
tgatgaaagttagtaaagttacaattattaatattttatttgcgggagttgttctttttcttacacgacaatttccgctaaatgcttattctaccataggaaatgtattcttaataggtttgcttttagtttcttttataggaaaaaataggctcatagatacatttgcaaaaaagacaataaaagtaatattcttttggtctatttttttgttagtttatgctcttttaataagggataactctataagttgggtgtttaggttctatattattgtaatatgtttgttactttcccattggatttgtctacctttttttagcactaagaaaattttctttttttttattgtattacaatgtattgttttaatagtatttgaattaatattgaacataggttttgatatgaaaagttatctacctatacggtttctttttcaagaacgaggctggggtgatgtatatacctatgatggatttttttataggatacaaataaaaggaaatgcattaattccttttgctttctttcttacctttctaaaagattatacattcaaatataggaaaatattgcaatctgtattatttatcagcagtattatagccggtaattttgctttcttaataggcatctttgttttttttatcttttggtacttatttaacaatctaaataaaagaaaaataataaataaaatcatcattttatccttcatttctctatttagtattggccctattctaaaatatactcaagaaactttagagcgaaaaagtggctattctttaggaacaagagatgaccaaaagaatgtacttttgacagatatgcaggagaatatttctacttttttattaggaaaaggattaggtaataatgtaaaaataaagactttttttcgtgattatacagataatacttattttgaattgcaagttatatatttctttaatcaattaggcttagtaaattctttaatttttttctgttttttattgtacctgagtataaataaaattttttataaggatctgctttttatatatttttgttatatcatatatgctgtaacaaatccttatattttagatactacacagatcgttgttatattaattttaatcagtattagtaatgagagaaggcaaaaaaataggttgtataatagtattataccagcctaattgggaattgacaaagaaaacattggaaagtatatgtcctcaagtagatgaagtttttatttcagataattcaacgaatatacaaaatatagacttatcatactataaaaatattacttatcattttataggagaaaataaaggaattgcagctgcccaaaatgttggtataaactattttaagcaaaacaaatatgattttattattttctttgatcaagacagtattcctcctatagatttggtagaacttctttataataaatatctgtttcttcataaagaaggaataaaagtaggaggaattgctcctcgtccatataatagaaatgaaaataaaacatataaaggaactatcaaaaaaggtaaagaaatatatcccaatatcactgaagttacagaaatcattagttctgcttcttttattcctatacaaaattttgagatagttggaaatatggaagaagatttatttattgatgctgttgattttgaatggtgctggagagccacatatagagcaaattttcgtttttttatttgtgaaaagatcctcctaagtcatcaattaggggaaaaagatctttctattggagtaaagaaaatagctatccattctccttttcgtcaatattatagatatagaaattttttcaaactcttaaaaaggaattatgtaccattgtattggaaaatatcgaatcttatcaaatatacttttaagtatttttatttacctttgtgtgtctctccaagaaaagaatatttctataaaataaacaaaggtatttatgacggactatttaaatagaagatatgaaaattaatataattgatgtttgctggacactatataagtcaaatactacttttgactttatctcctttgtgatggagaaaaaacaaagaaaaagttatagaatactaaatatatatattataaaggcgtttttagtactaataggaaagttgttgaaatatgatatttatagatatctatatatttatctattaaaaggtttttctaaaactcaattagaacaattggctaatgatttttacaatcaagttttaactaagataaagatcgatttttctttcagtttagtctctacattaccaaaagatgaagaaaaaatattatgttcagcaagtttagatattatcataaaagaagttgctatccaattaggcatcaatcaatatgattcttccattttagaatttgataaaaataacatctgtacaggaaaacttagcaaagatattttgtataaaaaacatactctctttgagaataaagaaattaattatgtaattacagataacaaatctgattatgatttactaaagaaagcagaaaaaccgattatattatctaccaaaaataatatagcttactggaagaaaaaaaatatgaaagttacctatatatactaatatgaaaatatttttacctttttattatttgttctattcacgactaagaagtaatatctctaaagttgcttggatttttacttatattattcctatcttcattgtttcttatttattaaatattgactttatattcacatcccttcttatattttctatctattttacttatgaaataggatatatctataatgattgtgaggtgattaaaaaagagataaatccgacattacgattaaaaaaagaagatcttcaatactatgaaaaacataaattaattatttatagtattagaacactatttttaagtatcattatgggtattatttatatatcatatccctattatgttaaacccattttttatacccttggaggaatttctttactttatattatacataataatatacgaaatcattggaatatattatcctattctcttttaatattttttagatattttgcttttttttcttttatagaagaaaatatcttattttgtttcttattatggattgtatatcctttatgtgttactattgaattctcctcaaaaagtagattctatacaagtaactacataaaaatcactaactttgacagattcagagtcttttattacatattattagtttctataagtattcctttatatataacaatatttaataaatacaccataatatttctaatattatctctttattttgctctttatcgcctgttatcttttttcctaatagctaaaaaatatagaaatacgtgattttatgaatttctcagtcctactatcattataccataaagaaaaacctgagttcctcaaagagtgtttagaaagtttgaaaatacagactttgcaagccactgagattataatggtttttgatggagttgttactactgaattggaaaaagtggtaatgcaatatacctctattttacctattaagatcattcgcttaccccagaatgttggtttaggcaaagctcttaatgaaggcttaaaacattgtatttacaattgggtatttcgtatggatacagatgatatttgcttacctgatcgttttaaaaaacaagtagagttcataaaacaacatcctaatgtagtactatttagcggacatattgccgaattttcagacgataaaacaaaaattataggttataggaaagttcctatcggagataaaaatattaagaaatatgccctctcaaggagtccttttaatcatatgactgttgcttttcgtaaagatattattgaagctgtaggaggataccaacatcatcttttcttagaagattataatctatggctacgtgtcatcgcccaaggatatgaggtaggtaacatagatgaagtactacttttagcccgtgcaggaagtaatatggttgctcgtagaagaggaaaagactatatcaaaggagaatggaagttatttaacttaaaaagaaaactaaaccttcagaatattttttcaggttttttcatttttattctacgtgttgttcctagaatactacctactaaaatattaaaaggaatatataaatttcttaggagactaaaataaaattcgtacctttgcctcaaaatctatacttatgcaactcacacaaaagctcaaacaaatctttataagtgatttagaaaaatactccccttttatggagcgagatctgaagaaattgcttatgaatgtctctatcccttatctcaatggtaaggaggtagcgcatgtgatggccttttgttttgagtatgactatgaggatcttaccatttccttctgggcattgggagaaaataatgaaattgtctctgaaatactcgaacttcctaccgaaagggacgaaaaacacttcccatcagataagtttgttgtagaagaagaggacttggaggacttattatatgaaacagagctagaggagaacgaaattgaggatttgcttattgaataccgacaggaaaaactagctatcttcaccaactggtttatagcccgttggaaaaatgttaccgaacagcttaatgttaccattgatgcctatttttctaaactcaatgctttctataagacagatctgaacaccttagagcctatcagttcagaggaaattcaggagaaatatacaaatccagaaaatgaaatataacactttattacacatgagaacatttgcccaggtcttttgtttaagttggctctttttttgcggtagcttagctacaaatgcacagacaaaaggacatttttccgataaaagattacaaacagacacttcaacagcaggttatgatgggccttatatcttttataataaagaaaaagccatcataaagcagattattgagaagaaagggcaacctacaagtgtaagtgaagaactggcatatcccattgctggtaagaagcttaaatgttatgtgaatgacaaagagcttttctctttcaaggtacaggaattactacaaaaccagccttctgtatatgccatgcctgaaaagctcattgctatttctgatatagaggggcgttttgaggagttcaaggactttctcattgccaataaggtgatggataagcactacaaatggatttttggtaaaggacatttggttactgtaggtgatttctttgatcgaggtttgttagtcacccaaacactttggcttatttattccttggaagaacaagctgaaaaggcaggaggcaaggtgcactttatccttggcaaccatgatcttatgaatatgaacaatgattttcgctatgttcgtaagaaataccttgagaatgccaaactcatgggacaagaatattatgatttctacaaacctaatacagaattggggcgttggttagctactaaaaatattctagagaagataggagactatatctttgttcatgcaggcatttccaaagaggtaagtgatctgaatatgggggttgaggggatcaataagtatgcacgaggctactatttccataatagagaagcaacattaggaactgatcctataggaaaaaccatctatatgtttggtaaaagtcccatgtggtatcgtggttacggaaaagaaaccactgataaagcagaatttacagccattgcccaaaatatgaaggctaagaaatttgttattggacatactgttcatgaatccgtcacttatcttatggataagcaagttattgaccttgatgtactccatgccaaaggaattacccagggactgcttatagaaaatggacaggaatatatgatagatattcatggacagaagtcagctatcaaggatcaagccaaagaagttgatgattaattattatatttaaattgtttttatttactcatgaacatgaaaaatcaatttggaatactctttgtttattctgagttgatttttcccctttatgaacattacctcaaatgaaattccaattagtatccgatttcaagcctatgggcgaccagcctgctgctattgcctctttggttaatggcatcaatgaccaagagaaataccaaacgctcttgggtgttacaggctctggaaagacctttactatagccaatgtagtggaacaggtacaggtgcctactctggtcttagcgcataataagacccttgccgctcagctctatagtgagttcaaggctttctttcccaacaatgcagtggagtactttgtatcttattatgactactaccagcctgaggcttatatccctacaactggggtgtatatagagaaggatttgtctatcaatgaggatattgagcgaatgcgccttagtactacctcttctctactctctggccgccgtgatgtgctagtagtggcgtctgtctcatgcctatatggtatcggaaaccccttggagttccagaagaacgtcatttctatagaggaaggacaaacactcacgcgtaccaagtttatgcaccaacttgtacagagcctttatgcacgcaccacagctgacttcctacatgggaatttcagggtaaagggcgatgtcattgatgtctttcctggctatagcgaaacgcctattcgagtacatttcttcggcaatgaaatcgaactgatagaaacctttgaccgcgagacgaataagaccatagaacgcttggaaaagctcaatatctatcccgccaatatgtttgttacctctcctgaaatactacaagcagctatcagggagattcaggacgacttggtcaagcaaatagcgttctttcaatcggtagggaaaaacctggaagcaaaacgcttggaggagcgtaccaattttgacctagagatgatacgtgagttgggctattgctctggaatagagaactattcccgctacttggacaggcgccctccagggagtcgccccttctgcctgatagactatttccctaaggacttccttatggtgatagacgagagccatgctactgttccccaagttcgcgctatgtatgggggcgacaggagcaggaaagagaacttagtagaatacggattccgccttccggcagcgatggacaaccgtccacttaagtttgaagagttcgaagcactacaaaatcaggtgatctatgtcagtgctacccctgcggactacgaattgcagaagtgtggaggcgtatatgtagaacaggtcattcgccctactggtttgctcgaccctaagatagaagtacgccctagcaaaaatcagatagatgatctcttggaggagatacaaaagtgtgtagaggaagaccagcgcgtactggtaaccactcttaccaagcgtatggcggaggagctaaccaagtatttgaccaagatggaggtacgttgccgctatgtacatagtgatgtggatacgctggagcgtatcgagattatgcaagaccttagaaaaggactttttgatgtacttataggggtcaatctgctcagagagggattggacttgcctgaagtatccttggttgctatcttggacgctgataaagaaggctttttacgttctgcacgttccatgacccaaacagtaggacgcgctgcccgtaatatagatggccgtgctattatgtatgctgacaaaatgactgatagtatgcgtgtaaccattgaggaaaccgcctaccgaagggagaaacagatgaactacaacctcacccacggcattaccccacagccattacataagaaaatagagaatcctctcagcaaaagccctattacggaatttcattacgaaaatactccgaaaaagaaagaacactcccctaccaagcctatgagcagaggagaacttgagaaagaaatacaacaaactcgcaagctgatggaagcagcttccaaagaattggacttcattcaggcggcacactaccgcgacctgctcaaggaacttcaggaaaagcttcaagcaagctccttataggcattgtgtatcaaaagataatcagcaagcaccaaggcagacatcgcctctacgatggataccgcacgaggaactacacaggggtcatgtctgccttttccttggaactgcaccacctcccctgctttattgatagtttcttgttcttgcataagcgttgctactggcttgaaggctactcggaaatagatatccattccattggaaatgcccccttgtatgccccctgagtagttggtacgagtcgtgccatcaggcaagaatatatcgttgttctggcttcctctttttctagtagaagcgaatcctcctccgtagtcaaaaccttttactgcattgatagaaagcatggccttacctagttcagcatgtaagcggtcaaaaacgggttcgcctaatcccacaggcacgccttgtattacacaagaaacaatacctccaactgtatctccgtccttacgtacctccctgatataggcttccatttgttctgccagtacgggatctggacagcgtacgggatttttttctatttgggaaaaatcaagcaattggtaatccttttcaggtaatgccaactcccctacggctgatacataggctgtaatttttatcccttttaggaactgcttggcaatagctcccgccactacacgaacagctgtttctcgagcagaactacgtccgcccccacgatggtcacgtaagccatatttctgctcatagacatagtctgcatgagaggggcgatataagtccttcaaatggtcatagtcctgagaatgttgttgggtattggctatgataaagccaataggtacccctgtggtttttccctcaaaaatacccgaaagaaactgcactttatcagcttccttacgttgggttacgatagccgactgcccaggccgacgtctatcaagctctctctgtatttgctcaaagtccaatgcgattcccgcagggcaaccatcaattacgcctcctatagcctctccgtgtgattcgccaaaggtagtgagtctaaacaaatgtccaaatgtatttcctgccatagtcctaatcttctaatttttcaatagtaacctcataaagttgctcaaaaagctgctccatatagcttgcttctgctttgcgtacctctacaaggagcgtacagttcatctccatagtctgcgaaacaatggtgaggttcctgtccttaataattttcatcaccttattcatatccttgtagtcaaagacaattttgtaggtaaggtcaatggtgcgttcctctatttcagcctcttgtagggtaagctgagcggtagttttataggcagtaataaggccacttactcccagcttgataccaccaaagtagcgcactacaatcagcaggacattggtcagctcaaaggactgtatctgtctgtagataggtagtcccgccgtaccgctaggctctccatcgtcattcgctctataagtagagtgctctttgcccaactgataggcataacaccagtgccgtgctgaaaagtgttctttcttaaccgcctccaagtgctttttcacctcctcctccgtagtaataggatacaaataacctataaacttactgctcttatccttatagataatgtcagtaacaggctggctgatagtcttataggtatctgtcataggagtgaagagtgaagaatgaatagtgaaaggtgaaaaagcgcaatttgaaataaagtgtaaagatacgaaaaaagccccgaagatagtcgaggcgctaaatgttttcacaacggaataatccttattgtgagttgctttcaaatatgggacaaaagtacaacattttttttaaataacaaacttaaatgtaaatttttttcattaaatttgtagcgaattaaaaacccaaaaaatataaaaatatgagacacattttaggtttagatttaggaattacctcaacaggtttttgccatattatagaagatgagaatatgaaaaattcaacaattgaggaaattggtgtcaggataatccagttagacaattttgttagtactaaaacaggagaagattctaaagatccttcaaaagatttttctgctgggaaaggtatatcttcaaatgcaggacgaactcaaaaaagaagagcaagaataaaccttgatcgctatcaattaagaagaaaacaacttatcgaattatcacttcaagcaggtcttattacttcttctacaatcttagctgaagatgggaaaaacacgacccactctacttggcaattgagagctaaagctgctgttgaacgcatcgaaaaagatgaattagtaagagttttccttgctattaataaaaaacgaggttataaaagtagtagaaaagttaaaaataaagacgatggacagataatagatggaatggatattgccaaacgtctatatgatgagaatttaactcctggtcaattagtattgctactactaaaagaaaagaaaaagcaacttcctgatttttatcattcagacttacaaagggaatttgaccttatttggaattttcaaaaggaattctatcctgatatcttaacaaatgacctttacaaggctttgcaaggaaaaaacaaaactgattcctcaagtattttctataattattatcattttaatactgctgaaaacagaggtactaaagaacaaatgcgattgcaagcatatcgttggagagtagatgctctttccaaaaaactctcaaaagaagaagttgcttatgttttggtcgaaataaatagtaatctaaacaatagtagtaactatctaggaaatatttcagatagaagtaaggaactctatttcaataagcaaacgataggacaatttttatatacaaaactgaaagaggatagacactatagtcttaaaaataaagtattttaccgacaagattatttagacgaatttgagcgtatttgggagacacaagctattttttacaaagaacttacaggagatttaaaaaaacagatccgagataccataattttctatcaacgcagacttaaatcacaaaagggattaatctctctttgtgaatttgaaaataaagagattactattgaaaaagaaggaaaaactgtcactaagcagattggagttcgtgtcattcccaaatcatctcccctatttcaagaattcaaaatttggcaaatcctcaataatgttgtttgtaaaaagaaaggaactcgaaaaaagaaagctgttacacctgctcctttgctttttgaattattcggcacaccctctgaaacattctttagcttagatatggagtgtaagcaacttctttttgaggaacttaacctaaaaggcaacctaaaagcagataaagtaatccgtttattaggttatattcctcaagaatgggaaatcaattacaatcagttagaaggaaatagaactcaaaaatcactttatgaggcttatttgaagattattgagatagaggggtatgatataaagacctttttgagaataaaatcagataaagaggattgggatttagaagaatctcctctttctgcaaaggaaataagagaaaatatacaacatatttttgaaacattaggtatcagtacagcaatactatattttgatgctactctacctattaaagactttgaaaaacaggcttcttatcaactttggcatttactctattcttatgaaagtgataattctccctctggtaatgaaacactttacaaattattacaagataaattcggtttcaaaagagaacatgctgtgtttctttcaaacatatcatttcaagatgattatggtagtctctcggcgaaagccattcgtaaaatatatccttatataaaggagaaccaatatagtactgcttgtgaattagcaggatataggcactccaaactttctttaacaaaagaagaactaaataataggccactaaaagacctaatttctccactaaagaagaatagtttaagaaatcctattgtagaaaaaggtctcaaccaaatgattaatgtcgtaaatgcattaatagaaaaaaatagtgagaaggatgctgaaggaaacatcattaagtacttccattttaatgaaattcgtatagaattagcccgtgaactaaagaaaaatgcacaagaacgagctgaaatgaccctaaatataaagaatgctaccatagaacaagaaaagattaagagaatacttatctcagattttggcatcaaaaatcctactaaaaatgatatcactcgttatcgattatatcaagagttagctcataatggctataaggatctatataccaatacctatattcctaaagaactattatttagtaagaatattgatattgaacatatcattcctaaagcaagagtgtttgatgatagtttctcaaataagacattagcctacagagatttcaatctcaaaaaaggagagaatacagcttttgattttatagattcttctttaggtgaagaagaacttaaccaatatattgcaagagtagaaaatgcctataaaactaaaaacatttcagctaccaagtataaaaatttactaaaaaaagcaaccgaaattaacgacagctttatcaacagggacttgagagaaactcaatatatagccaaaaaggcgaaggagctacttttccaaataactagaagtgttgttagcacatcaggaagtattaccgatagattacgtgaagattgggggctaatagatatcatgaaagaactaaacatgcctaaatacagggatttaggacttactgaaataatggaccgtagagatggtagaaaagtagaagtgataaaagactggacaaagcgtaatgaccatcgtcatcatgctatggatgcgcttactgttgcctttaccaaaccctcttatatacaatatctcaatcatctgaatgcccgaaaagatgaaaacaataaactatatgctgatattttaggtatagaaagaaaagaaactactaaaatacacgatgaaaatggtaatgaaaaaagagttttcatagaaccaatgccagattttagacaaatagctaaaaaatatttagaagaaatactcatttctcataaaacaaagaataaagtagttaccaaaagtataaataagatagctggtacaaataaaaaacaagaaacacttacaccacgagggcaactacataaaaaaactatatatggcaaatatcattattatagtaataaagaagaaaagataggtacaaaatttgataaagaaactatttcaaaagtatctaatcctatttatcgatatgcgttacaaaaaagattagaagcaaatgaaaataatcccaaaaaagcatttacaggaaagaatgccctttctaagaatcctatctatttggatgatgctaaaactaaaattttaccagagaaagtaaatcttatttatttagaggaagatttttctataagaaaaaaaatagtctctgaaaatcctacctccaaagaatttgttcctaactcaatatctattgaaaaaatagtagatgaaggtataaagcgtatccttaaagaaagacttgaaacttataacaatgaccctaaaaaagcctttgctgatttagataagaatcctatttggctcaacaaagagaaaggaatttcaatcaagcgagttactatcagtggtgtaaagaatactcaagccttacatagtaagaaagatcacctaggaaaatctatcttagacaaagaagggcaagagatccctgtagattttgtaagtacaggtaataaccaccatgttgccatttatcgtgatcaaaaaggaaatttgcaagaacaaattgtctccttctttgaagctgttgtgcgtgctcagcaagggcttcctatcatagataaaacttacaaacaagaagaaggttggcaattcttattcaccatgaaacagaatgagatgtttgtattccctaacgaaataactggatttaacccttctgaaatagacctattagatccaaaaaataagaaattaataagtccaaacttgtttagagtacaaaaaatatctattaaggattatttcttcagacatcatttggaaacaaatgtggagactaataatattttgaaagatatcacttggaagcgaggaggattatctcttttaaaaggtattataaaagttcgtattaatcatttaggaaatatagtaagtattggagaatactaaatattgaacattaagcaaaaacaattgaatcatataagctatgttataccgttctatttatataggtaacccagcttatttgaagctgaaagacaaacaattaaaggttactgacccagaaaccaaagaagaaaaaggcagtgtccctatagaagatatagggctactgatgcttgaccattaccaaatcaccctctctcaccagctgatacaggaactgatgaaaaacaatgtgatccttatcagctgtgatgagcggcacttacccttggcaaggagaatgccgaggtacatatcaaccgtgtcaagcaatggctccttgagtttggaaaagtggccatattgactatcactgacaaacaatttgaaggaatagagatcttctattgtcaatcaaagaaagatcctcctaaagattgtatccagttcactcttttttaaattttagaaagcgaaaaaccttcctttttattcctaagatagaatagaaaagaaggtttttcctttttgaacttttgtaacaacctacaggcaatcaatccttttcaaagattgaggttgtttgaggtcacaaagttacgaatttgaaagcaactcacaactaactgttggcttggcgcgactattacctcgttgtttgaggtcacaaagttacgaatttgaaagcaactcacaaccgcagggtcgcgttcatctgtgaggctcttgttgtttgaggtcacgaagttacgaatttgaaagcaactcacaacaccttattctctcaggagagaagaaggagggttgtttgaggtcacaaagttacgaatttgaaagcaactcacaacggaacaagcgtttgagtggtttagagataagttgtttgaggtcacaaagttacgaatttgaaagcaactcacaacggcttgatgtcagtggtgccaagggtgtagttgtttgaggtcacaaagttacgaatttgaaagcaactcacaacctaaaatgagaatagcaaggtgtgtttttgttgtttgagatcataaagttacgaatttgaaagcaactcacaacctactctctctttaatagcttctttgtatggttgtttgagatcacgaagttacgaatttgaaagcaactcacaacaaaaatcatgacaaatttgtatccgatcttgttgtttgagatcacaaagttacgaatttgaaagcaactcacaaccgaacgccttgactaatgcctttgctaaggttgtttgaggtcacaaaattacgaatttgaaagcaactcacaactgtgaagtggccaacaagattgccgaatcgttgtttgaggtcacaaaattacgaatttgaaagcaactcacaactctttttaggtgtagtgtattactccttcggttgtttgaggtcacaaaattacgaatttgaaagcaactcacaaccgttgatgaaaaactgctttatatctgtctgttgtttgaggtcacaaagttacgaatttgaaagcaactcacaactaggtcactgttttgtcttgctctttcaagttgtttaaggtcacaaagttacgaatttgaaagcaactcacaacagaacaaaatcaagatagcccctaagcaaggttgtttgaggtcacaaagttacgaatttgaaagcaactcacaaccttgcatggcaattcttcaagcaaacagggttgtttgaggtcacaaagttacgaatttgaaagcaactcacaacaatttctaatagttctctttgttcttcaaggttgtttgaggtcacaaagttacgaatttgaaagcaactcacaactgccttctcttacagaaatcacaaaattgagttgtttgaggtcacaaagttacgaatttgaaagcaactcacaacgtcgcttaaaggctgattgtttttttcctgttgtttgaggtcacaaagttacgaatttgaaagcaactcacaacaatacttatactaattcatgttttacaagttgattttaatatacaattaacatatttaaatataacagcataacgaataaaaggttagtcactataggctgaccactaaccactaacttctgttaagtacttaacatatttttttattgtataaattcttacttctcataagcctttcccttgactttgccctttgtgatatcgtaactttgccccagttaagtgaagagtgaataatgaatagagttacttagccattcgtttttcacttttaatttttcactattcactattcagatgtctgtggtcagctataggggcaattagtccatagtcatttgtcgttagttgcaatagactgaccactaaccactaaccacttataattatggaagaggctttagatatactttggacatatgctcgtcgtgagccgatagagagcaatgggaagaccatagtggctaccattagccaaagcatcgcggctattcgccttattatgcgtttagaaggggggctgcaaagaggtgaaaaacgaaaagttaatagtgaaaaacaagcagtgcctgcttatgcagcgccaacgctcacaatatgtggtttgccagcggctcaatgtctaacgtctgatttgccaatgcctgcctgtaagggagaaccccatgacaatgaagcaggtgagcaattcacccaatccaatatagacactcctaccagtacctgcttagcagcctcctctccttgggaaagaaagttaaggacttctcagcaagagcctaaccatcctactgccaaagtctcctatcatacgagcaaaccccgtaaggtttgtcgccagcgcccctgtgtcaaggacgataaaagtcctaactatacgagcaaaccccgtaaggtttgccgccagcgctcagctgctaaggaagacttgtacaagggaatcaccttgattgagtcgcctataaggagcgcttctctaaattgcatctctagcctaacactagctaaggcgctccccccttaaaattagttcactaagctttttagtaaggttttttctatgataagcctcaagggaggttgggtgcgtatgaagctgctgagtcttatagagcgcatagtaatgagtgagggcttgcttaataccttgtgtgtcggttagggaaagggtgatgcctgtttgggtttgtgcaataatatccttgacatcccattgcttataccccaaagcgagtataggtctctgtgaagccatatattcaaagagtttccctgggataataccctctgtcttggagtggttaatctccaaaagaagcaaaagttgtgaatgacgttgtagagctatggcctcggcatgagagatatagccttttaagtctaaatagtcggtaagctgccacttctgaagactggcgagtacctcatcacttacttttcctgccaagcatatacgtaggtcttgcctgaagtcggcttgttcccttatcatctcgctcaagacctgccaaagaggttcgggattgcgctcggagagtagggagcctatatgagagagcagaaaaagaggggaaaccgaaggggtctctatagggaggtcatcgtcatagccgttggtaatcacctctattgggcgagaggtcttggcttgaaactctctttgggtactgggactggttacaatcagggtatcggcagtttgcaaaacagcttgctccatggccaagtgtttctgtgcggagtgcttcgtgagtcttagctgcgaatggtaacctatggttgtccatgggtctctgaaatcggctatccagcgcaaggcggggaactgctccttgagctgtaatcctataaggtgtaggctatgaggaggagctgtagtaataatggtatctatatgattctcagataggtattttgacaaatattttacagaagggcgtacccatagcacccttgcatcgggaataaagaggttgccccgtatccagagcaggagtttgtcaagcggggagggctttttagtagggataatacctgcacttattttttgggtcttctccttagagaagagggaggccaaagcatagggctcaaaaatcttagtttttaggacggttaggtcttctggaagatcatctgccatatgggggtcaagtatagggtaagtaggattctggggggtatagatcacaggttctatcccaaaatcgcgtaggtacttgacaaatttgacccagcgttgtacccctggcccccctgctggcggccaatagtaggtgatgataagtactttcttcattccctgatgctgattagtactaacgcttttcggcaaagattcttacagaagccaattccttgtatttcttacgggcttcctcggctggagaaccaaaataggtttgccctccttcgagtgatttggtaacgccgctttgagcgagaattactgctttttcacctatagtaaccccactggtgatgccgacctgtccccatagggtaaccctatcttctattaccacacaacctgcaatacccacttgggaggcgattaggcactcctgccccactactgtatcgtggcctatatgtacatggttatctatcttagtacctcgcttgatagtcgtatcgcctgtcacacctcggtctatggtacagagcgcccctaagtccacatgatcctctatcaccacgcgccccccggagaggagtttgtcaaaaccttcaggccgtttcttataatagaacgcatcggcaccgaggatagtacctgcatgtatagttacatggtctcctatcttacaaccatcatatatggttacattggcatgaatcaggcaatgatcacctatctccacatgattgcctacaaaagcccctggctgtataatcgtatgctgacctatcttagccgtaggagcaaccagtgtatcggccttttcaaaaggtttgaaaaactgggtgagcttattgaaatccctaaaaggatcatcggaaataagcagcgctttgccctctggacaaggtacttccttgttaatcaatactatagttgccttagactgcaacgctttgtcgtagtacttggggtgatccacaaagacaatatcgccctgctctaccacatgtatctcattcatacccagtacaggaaaggctttatctccgacaaagggacaattgataatagtggctatttgttctaatgtataaggttgtggaaacttcatagggtcataaaataattatggttgcaaagataaaaaaaatatgaataccctaatagtgaattttttctaaaaaaaatccgccccctatttgttaataaaaaatcccttttcccatgactatttgcgtgcatttattagtatctttgccctatagattatatgttatttcattgatgaataataaaaaaacgcaattatttattatcctcaaaatcagctgtattgttctcttaccaatactattccaatcttttgctaaccaccgaaataatattcgcaaagtacagaaaataatcatcaaccgtgaggcaccacttgacaaagtacaatatattactaacgatgcgattgagagcctattgttttctactaagaatgctgaagaatactcccttaaggagctgaaaataaatttgttagaaaaaaaactggatgctgatcctatggtagaaagtgcagatatttatctcactattgacgggatactcaaagtggatgtcaagcagcgtgaaccgatagcgaggattatctccaataatcagttctattatatggatatgcagggcaagcagatgcccctttccaaagccacctccgctcgtgtgcctattgtacgtggggtaggtgaaaaacagtgggaggacgcacatctgattctaaaacacatctatacagatcatttcctaaaagaaaacattatagaactgactgccaacaagggtgctttctatgcaagactccgaggagctgatttctctgtttgcttgggaaaggctgataatatacctttgaaattcaataacttaaaagccttttataaaaaagctgctaaggataatttcttagataaatacacaagaatagatctgcaatataacaatcaagtggtctgccacagagctcagacagctatagaacaagcaaatgagtaaggaattaaaaatattcataaaagaattaaaaaacgcacaaaataacagattagatattattagaaatgaaaacagaaaataaaatgaatcagagaaaatactttgcggggattgacataggaactactaagattgtggcaatcattggttgcgagaaccaatatggtaagttggagatcttaggttatggaaaagctaagagccaaggtattttccgtggaatggtaggaaatataggaaaaacaattgattctatagaacaggcggtagcacaggcacaagccaaagctggagtgatcatctcggaggcttatgtgggtattgcagggcaacatatcaagagcaatgaggcctctgactatatcacacgcgagaatgctgaggagattatcaccgttaaggacttggaagcgctttgccaatgtgtgatgagcagcaagaaccgataccctggtgaagaagtgattcatatacttccacaagaatacaaggttgataatcaggaagatatacacgaccctattggaatggtaggatcgcgtttggagggtactttccatattgtaacaggacaagtagcccctatcaagaacatacaacgctgtgtaaccaaggcgggaattgccctaaaaggacttaccttggaacctattgcctcttcagcttctgtactaagtgaggaagagaaggaagcaggggtagctttggtggatataggggggggtactactgacttggctatcttcaaggaaggttatatccgttatacagcagtggtgccttttggtggcaatattatagataaggacatcagggaaggttgtaatgtttttgacaaacaagccgagcagctcaagatccgttttggctctgcatggcctgaatataccaaagaaaatgaggtaatcaatatccaaatgttcaaaggacgtgagcctcaagagattcaagttactaacttggcacgcatcattcgctgccgtatggaagagatcattgaagctatcttcaatgaaatcaaaaactatggctatgaccaaccgcgcaaaaagctcatcgcagggattgtactcactggaggaggtagcgaactgaaagacctccctcaactggtggaatacctcacaggcctacctacccgtattggtcaccccaatgagcacttagctagcaatacccctaccgagctttcctctcctatctatgccactgccatcgggctattattggacggcatagagcgtgaacatagcgagggacagcgcatcgacttctcccaactaagtgagacccctacacaggaacctacagctactatagaaccagaggaggaagcgcccgcagttgccgaacctgtagtacttcctgtagcggaacaagaacctgaaaaggaaaaagaaaaagaggaagaacacaagcctgaaaagaagaatatcataagaaccctctcggataagtttactgactttttcaaaactatggaatagccatacttgatttttatactacattaacgtaaaaaacaaggattatatttgttagatacaattataatccttatttttgtctcttaattcattacttttcactatggaacaaaaagatgtatatctaaatgattttcagtccttttttgggaaattcatggacaaaattattggtttcttacctagcctaataggagctatcattgtcctatttgtaggggtatggatatgccgcctgatacgaaagttcgtaagacgtctgatggtggcacgttcggtggatattaccatacagaacttcgtgaatgaactactgcgctgggtgctctatatcattctttttctaaccgttatccaaaaggtaggagtacctgtttcctctttcttaggagctttggccgcagcgggcgttgctataggcttggccttacaggggtctctgtccaattttgctggaggcatcatgctcctaatactcaagcctttccgtataggtgattctatcgaggcaaagggacatataggcacagtagagcgtataggtatgttctatactactattatcaagtttggcaacgaacgagtgattatccccaatggtccactattctcggataatatcatcaattattctcagaatccaacccgccgagacaatattattgtaggcattggctatggctcagacctcaagaaagcaaaggaaattctctattctcttacccaaagttgtcctactgcccttcaggatcctgctcctgcggtttatgtgaacgaattggcggataactcggtaaacttcaccctacgtgtatggtcaaaaaccgaacactattgggatactcacttttatctaatagagcaaataaaattaacctttgataaggaaggtattgaaattcctttccctcaaagagatgtacatatcatttcaaaataaagtaactaactaaattaagaatatggcaaccattttagtaacaggtggtttgggctttattggctctcatactgtggtggctctgcaacaagctggtcatgaagtgattatcatagacaatttgtccaatgcttctattgaagttaaggatagaattgccaaaatcactggaaaaacacctatttttgagcaaatagaccttagagaaaaggacaaagtacaggatttcttccgtcgttatcccaagattgatggcgttatccactttgcagcttccaaggcggtaggggaaagtgtagaaaaaccccttttgtactatgaaaataacatagcatctcttatctatatcctcgaggagcttcagaaaagggaaaacacggcctttatcttcagttcctcatgtaccgtgtatggacaggccgacaagctccccgtaacagaggacgctcctttcaagcaggccgaatgcccttatggcaataccaagcagatcaacgaagagattatccgtgatacctgtgccgtagtacctgctatcaaagccatttccctacgctatttcaaccctattggagcccatgagtctgcccttattggggagttgcccaatggtgtgcctcaaaacctaattccttatattacccaaacggctattggcttaagagaatccctctctgtatatggggacgactaccctacccccgatggtacttgtatccgcgactatatccatgtggtagatttagctgaagcacacctggctgcccttgagtatattcttcaggggaagatacaaggcaactatgaggtgttcaatgtaggtactggtaagggaagttccgtgctagaggttatcaaggcctttgaaaaagtaagcggacaatccctcccttacaagattgtaggtcgccgcgcaggagatgttattgctgcctatgccgatacccataaggtcaatgaagtattgggctggaaggctaaacagaccctcgaagatgccctgctctcggcttggaattgggagcagaaactaagagcaaaataatctttaatttttttatcctatgaaaataaataaactcctctcgctagtggcgctctccttatcaggattcgccttagcgcaagagaaatccttggctacccttgtcaatgagaaggatgctttcttggtcgatgtgcgttctgaaaaagagtttgaggcaggaagtgccgcacatgcagtaaatattcctttggaaaatatagggaaggaactctctcaattccaaggaaaaaacaatatcattgtcttctgtcgaagtggcaagcgctctgaagcggctaaaaagctcctagctaagcacaacattcaggcagtaaatggaaaaggagttgcttttctcaagtcgctacagaaagagaatcttatggatatgctcacctatcgtaccgataagcatactgccttggtaatcaaa

SEQ ID NO: 2110 - DNA, 24332 bp, synthetic construct
  misc_feature 1..24332: note = Synthetic
  source 1..24332: mol_type = other DNA
ccatcgggatatgtttggtcagcggacctaaaaaaagcaaaatcagcaacaatacgattgcatggatgatgccggcaaccggagtacgtccgccattgttgatattcgtcatggtacgggcaatcgcaccggtaacgggaataccgccgaagataggcacaatgatattggcagccccttgtgcaatcagttcggtattggagttatgcttgtctcctgtcacaccgtcggccaccgtagcggacaacaacgattcgatcgctcctaacatcgcgatggtaaatgcggaaggaagcaaaaggttgatcgtttccatattgaagttgatcgtttccgggccgggcagggaagcattgattgtaaaacggtctccgatcgtttcgatccccgtgattcctaaatgatagcgcatgacatagacaacaaccgtcatcagaataatggcaatcagcgaacccggaatctttttagaaaatttcggtgtgacggcgataatcacgatactggcaagcccgatcagcaacgaccagagatttatcgtgtcgaaatgttcgaaataggcgatccatttagaaatgaaatccgcagggaccttatccattgtcagcccgaaaaggtctttcatttgcgtggtaaaaatagtgagagcgataccactggtaaaaccgacgacgatcgggtaagggatgaacttgataaccgtccctaacttcaacgcacccatgatcaccaggataataccagcgactactgtggcgatagccagtccttcgatcccgaaattctggataatgccgtatacgattacgataaacgcacctgttggcccgccgatctgcacattgcatcctcctaacaacgatacgaaaaatccgccgagaatagcggtgatcaaccctttttccgggcttactcccgaagcgataccgaaagcgatagcgagtggcaatgccacgatcccgacaataataccggccatcaggtcggtcataaatttctccttagagtagtttttcagcgtcgatactaacttgggctgaaaatcaaacttgttcttcatctttctgcctgattgattaaaagtgctgcaaagttacaaaaaaaagtgaatatgtttttagcttttttataggtttatatgaatctgttgttgcggtggaactttctgcctcttgccaagcaatctgcgattagatgcttaagtaatttattttcgacgttgtcaataatgttttcgacgttgtcgtatatatactcgacaatgtcgtgtatatatacgacaacgtcgaaaacagattagacttgcatgaaattaaaaagtatatactgcatcttcgtgtttccgtacgactgcaccagatatcaaagtcctgcgtacatcaactccgtcgtgcattttttttcgttttttacgaacgctaaaataggaataattttggtgcggttgctctataaatttatttgttttatatatgtttcctatgggaaaatcaataaagtttttacctttgcatattatcaacttatagttgataataggagtaaaataaagattatcagttataaagaatgatgataactttgttgatagactgtaaatagcggtttatgctcattagcgattattgaatattacaatcatttaatacaggtaactatgttgacaaaccaatcgatcggatatatgaacgcacccattccaaaggggttggacttgaaggaagaaataaataggatgcgtaaagagaaaaacgccgttatccttgctcattattatcagacgggtgatatccaagatatagcagattttgtaggagacagtttggctttggcgcagcaggcagccaagacaacggccgatatcattgttttctgtggtgttcattttatgggggaaacggcgaaggtgttgtgcccggacaagaaggtgttggtcccggacctgaatgccggttgctcattggcagatagctgtccggctaccgattttgcagaatttgtcaaacagtatcccgatcatgtggttatttcgtatgtaaatacaactgctgctgtaaaggccgtgacggatgttgtggtgacgtctaccaatgcacgccagatcgttgaaagttttccggaagatacgaagattatctttggtccggaccggaacttaggtaattacataaacggtattaccggacgtaggatgctactttgggatggtgcctgccatgtgcatgaacagttttcactggaaaagatattggaattaaaaaaacaatatcctgatgcggaagtcattactcatccggagtgcaagcagcccgttgtacaagtctcggacttcgtaggatcgactgcggctcttttgaagcatactgtcaagtcggataaaaaacaattcattgtagcgacggaaagcggcgttattcacgaaatgcgcaaacaaagtcccggtaaagagtttatcccggctcctcctgccgatagtacatgtgcctgcaacgaatgtaattttatgcgtctgaacacgatggagaaactttacaactgtttaaaatacgaacttcctgaaatctttgtcgacgaacaagtacaggagaaagccatccgtccgatcaagaaaatgttggagatatcggagaggttggggttgtaagattgtttggtaaacaaaactcaataaaatgggagaggggataaaattgtcttgttcctgcgtttggcacgggaacaaggcaatttaacatactaccctcttttatttaataactgcaattttagtaactacgctttcttttgaatcttcggtagcagaaagtactaaatatatacctgaagcaacacggacacctttggtattctggcagttccaaataacttgtccacctaaagatttagtctgatagactaggttaccattcagatcggtgatttttacgatcgagttatccatcaatcccgtgatggttactttgtccctgtattcaggtcgtacgggattcggatatgcatacacatctgaatagtcatctttaccttttgtcgcttctcctttgtaggaaaccaagcctttgtcggaaccgatgaacacttcgccagtgttttcattaatttctatggaatatattttgtcagatagtagcggactgttggatgtattgaactgatggacaatttcctgattgtcttcgctcaatacataaacaccgttgccatccgttccgatccattttcgatttccgttgtctactttaatggtcgttattatcgtattatcgagaaaataataaggagttccttcttcattgattagttttatacgtgtgcaacgtatagattggttgttttctgtcgttgccaacttaggatttgttaagtatatagctcctttattggttcctatccatatatatccgtttttgtcctctgccatacaagtataattattgggagaaaagtcattaccatctgtatcaatgaagtttttaaattcatatgacgttgcttcatctaaagagctactgttggttacgactgttagacaggcttggttggcaggacgggaaatattaatccatttatcgttattcgaggtgacgagtatgtcatttattgtgtatttcccgtttaacgattcgacagacaggctgtgccattttccttctttatccaatatcttgatagctttgctgacttctgaattagtcatccataggttttcttccttatcaaaagcaagtccgtctacacgacaataaaagccttcattaccatgtgcattttcaagcgggctgtttgttttgttgtaaacgatagaaggctctctgtcaatgaattgaaaaacgccataaccaaaagaagatacgtaaataatctctttttcagcatcatttgtgacgacaatgctggtatagtctttaggccatgtattgagtttattctgaacgtcggaaggttctaatacactccatttttcatagtcgtatatcatgattgagccggctttgttaaaggaattatccccagtcagattttttccaccaggtataatatatattttatcgttttttgatacgatatcataagaactgttggagtacgggccatccaaagttatggcttcatttacagcttcgaactggttggctccttttcttttgatagaacgtagacctttgcttccttcggctatccaatatttatcagtctgataagtgctgatatctttgatggataggttgttgatttggtcaaaagtgtttgtatctgtgaaaatataaacttgggatgtagctatgcaagccagtttttctcctataattttcatattgtttatttgtgcattgctgaccaaaggaactgtagttccatttgattcatagtagatacctttatttttagacaggtagaatagcttattcttaaataaggatattttgtctatggagttttcagatgggaatcccggaatcgaatatgttttccagtttgatccgtctaacagattatcattcaaagatgcatatatgactgtagacttttgatcttcttttgtagaagcatatatattattgtcggaaatagcacaggatgttatattcttagataagttataggtatcggttatttccttcttatccatgttgacaactactatgccagactgtatggataaataggcatattcgttataaatcataacggaattaagtgatttatctcttaaagaagttgtcgtgtacagataaggtatgttttttactgaaccttcttccagaatgtctatattgcagtttttataaacaatcaacagtgattttgtttgtttgttgtaggaaatagactggatatctgtgtcactcagtccatttcctttgtaatattgtttgatgctgttatcttccttcccatatatgtataaagcaccttctgctatgacaaatacttggtcagcggattcttccacacaattggtattattgtaggaaaggtatgttttccatccaagcatgttgtcattatcattaactgataaagcagagaatgataataagaaaagtaagatgacagttaatatatttctcatattaattgcaatattaaaatgtgtaatctgataaaaaagcagtcaattttttgacagcctcggcacgatggctgatctggttttttatatcattgcccatttcagcaaatgtttcagaataggtatcaggaacaaatatgggatcatatccaaaaccacttccacctcttttttcatttatgatcgtaccgttgacaacaccttcaaacaaatattcttttccattcaaaataagggcgattaccgtacggaaacgggctttccggttttctttgttttccatttcatggagaagtttgttcatattggcttccgaatcatgtccagggccggcgtaacgtgccgaatatactccgggagcgttgtctagagcttctacttcaagtccggtgtcgtcagcaaaacagtcatatccgaaatgttcttttatgtaacgggctttttgcaaggcattgccttctaatgtgtctgctgtttcgggtatatcctcatggcagtcaatatctgagaggctaattatttcggtatatccagatataattttccggacttcatccagcttatgccggttgtttgttgcaaatacaagtttcatgtttgttgagtatgaataaaaaagcacttctatacgatattatatataacgtatggaagtgctttaaattgtttggatgattgttttatgtttttatctggtcaaacccttccccgtatactcctctgacgatgctttgggagatgaaggcctggtggtcgatttgttttaccaggcggaagatggagacggattctgattttttggccagcaatacaacaaccttgaccggtttgcgggaatatcctcctacgccgtcgaggatggtgcaaccacggcctaaatcattgatgatgtgttcggctatttcgtcatatttttgggaaaaaatcaggaattggacggattggcggtttccgttcaggacgacgtcgattatataattgcttacaaacatttcaacgaaaccgaagacgattttttctacatcgtggaacaggaaaaatgaagaaccgatgatgataaaatcgcagaacagcaaggctcgcccgatcgatatattcttgtatttgtttacaatagctccaacaatatccgttcctcccgtactaccgtttgccgagaagacaagtccgagaccggatccgcaaaggaatgcgccgatgatgatggacataaacggttgatcatgtaagagtggctctcctttcagaagccattcgaaaaatgataaagaagccgacaaggagaacactccgaaaatcgtttttatcaggaatttgaatcctaaaattttcagtgccgctaacagcaatacgatgtttatgacaaagtaagaaactgaaacagggattaattcattgctggcaaaaaagatcaaggcacaaataccactgactccaccggtgataatttcattcgacagaatgaaagcgttgaagccgaagccgtacaagagagtacctaacaggatcatcaggtaatcttgtacagcaaaatagactttgttgtttataagcttcatataaataaatttagattacgatgtttacaatctttccgggaacaacgataatctttttcggagtcttgccttccatccacttagcagaattttcatgggcaagagcggctttttctatctcttcgcggggcatatcggccggaagttccatactgaaacgggctttgccgttgaaggagatagcataagtgagcgagttttctttcaaatattcttcgttgtagacaggccattcggcatcgcatacggtggtatcgtgaccgcaggtatgccataattcttcagcagtatgaggagcgaatggagcgagcagaacgattaactgttccaggattgtccgtttgttgcatttcaggctgctgagttcgtttacacagatcataaaggcactgatggaagtgttgtacgagaaatgttcaatatcgtatgtcactttcttgatcagtttatgtaatgatttcaattcatcggctgtcggttctgcatccgtgatctgcaaggtgtccgtattgccgaagaacagtccccagagttttttcaagaagcggtgtacgccgtcgataccattcgtatcccacggtttggactgttccaacggacctaagaacatttcatacaggcgaagcgtgtcggcgccatatttctcgacaatcatatctgggttgaccacgttgaacatggatttcgacatcttttcaacagcccatccgcagatgtatttgccatcttccaatacgaattctgcatcgttatattccggacgccagtttttgaaggcttcgatatccaatatatcgtttgatacgatgtttacgtctacatggataggagtgacctcatactggtctttcaggttcagggatacgaatttgttggtgccgttgatacggtatacgaaattggaacgcccttggatcataccctgattgatcagtttcttgaacggttcctcttcacaaacgacacctaagtcaaacagaaatttattccaaaaacggctgtagatcaggtgtccggtagcatgttcggtaccaccgatatacaggtctacgttgcgccagtattcgtctacgtctttagcaactaaagcctggtcgttgcgcgggtccatgtagcgcaggtaataggcggatgaaccggcgaatcccggcatcgtacaaagttccaatgggaagatagtttcgttgtctattttggaaacttccgtaacttcctgttttacggtgtcccatgcccattttacggcatgtcctaaaggaggttcgcctgtttcggtcggcaaaaatttgtctacttcaggcaattccagcggcaacttgtctaccggcaacatctgaggcataccatctgcatcatagtagacagggaacggttcaccccaataacgctggcggctgaaaatagcgtcgcgtaaacgatagttcacttttacgcgtcctaatttatgttctgccacatatttcttagtggcggcaattgcttcttttacggtcaggccgttcaatgacaggtcgcaataaggcgctacatccggtcttggtgagttgcagacgattccttcttttgcatcgaaactttcctcgcttacgtcacagccttcgatcaatgggacaaccggcagattgaaatgtttggcaaacgcatagtcacggctgtcgtgtgcgggaacggccatgatagcgccggttccgtagccagccaatacatagtcgctgatccagacgggcacagcgtcaccggtgaacgggttgattgcatatgaaccgctgaatacaccggtgacagaacggtcggcaatacgttcgcgttccgtacgtttttttgtacggtccagataagcatcgacttcttgcttttgttgggaagtcgtcaattgtgcgaccagttcgctttcgggagccagaaccataaaagtaacaccgaacatggtatcagcgcgggttgtaaagatggtaaactcaaggtcgctgtcttttactttgaactggatctcggcaccttcgctacgaccgatccagttgcgctgtgtttcttttaacgaatctgtccagtcaattgtgtccagtccgtccagaagccgttgtgcataagcggatacgcgtagacaccactgacgcatgatcttttgttccaccggatagccaccacgttcggaaacaccgttcactacttcgtcgttggccaatacggtgcccagtgcagcgcaccagtttaccattgtttctccccggtaagcaatccggtagttaagcaggatttcctgtttttctttttcgcttttggctttccattcattggcggtgaaatgcaattcttcgctgcaagcgacattcaggtcttccgttccggactgttcgaaagctgcaaccaattcactgataggacgtgcctgttttttgttgttgcagtaataactgttgaacatctggataaatgcccattgcgtccatttataatattcgggatcacaagtacggatttcgcggctccagtcatagctgaaacctattttgtccatctgttcccgataacgggcaatgtttttcttagtcgttacttctggatgctgtccggtctggatggcatattgttctgctggcagtccgtaggcatcgtagcccatcggatgtaaaacattgaaaccctgcaagcgtttgtaacgggaataaatatcagaagcgatgtaaccgagtgggtggcctacgtgcagtcctgctcctgacggataagggaacatgtccaaaacgtaatactttggtttgtcggtatttttttcgactttataaaccttattggcaatccagtattcgtgccactttttctcaatttctctgaaattgtactccatgatcgtttatcgtttattttatcgttttctatttaaagccacaaagttagtgaattttgtaatacatagaggtttgaagcagcaaattgcaagaatggacagagtgaaatttcactccgggaattgtagatacccatctagaaattacaatatctccctttagatctaaaagatacaataaattgttggtttatagcaaaatgataaaaatgtctgtttcttaaaaaatattaccctataaggaaatttgaattagatggggtagaaaatcgaattagatgaggtagtagtttcgatttggacgaatggctttttacggaataatacaataagggggaaggaggatgaaaaatttgttggatagaatagacctgaaagtgtagagtgacttacaaaaaaatcccccgcagaagggcgagggaacctaatgttttcacaacggaataatccttattgtgatttgcttcattttagtgtcacaaatatatgaaatgaaaggtttgtgtgcaatgttttttgatgataaagttattatatttggaaaaattaaaacagtataccatgaaaaagattttagggctggatttaggtacgagtagtatagggtgggcattagtaaacgaagccgaaaatagtgatgaagtatcgtctattattaaattaggagtaagggtaaatcctttgacagtggatgaaatgcaaaactttgaaaaagggaaaagtatcactacgaatgctgatagaactttaaaaagaagtatgcgccgtaatctgcaacggtataaattacgtcgggatgcgttgattgaacttctgaaaaaagtaggttttattacagataaaacgatactttcggaacaaggaaacagaactacgtttgaaacctatcgtttacgagctaaagcagctgaagaggagatatctttgaaagaattggcacgtgtattgttgatgattaataagaagcgtggttataaaagtagccggaaagcaaagggagaagaagagggggctttgattgacggaatggagattgctaagaaattgtatgatgaagatctgactccagggcagctttgtttacaattacttgaatcaggaaaaaagtttttccctgatttttatcgttcagatctgcaagaagaatttaacaagatatgggatttccaaaagcaattcaatcccttttctttttgtgatgttgccaaagaagaagtcaaagggaagaataaaagtcagacgtgggctatcttggcaaaatattttgtagaaacgaaaaaggtaaacgtttggaatgaacatgaggctcaaacagagaatagagaagaagtgtataaacttgttggccttaagcggacggtaaaaggggaggaactgaaaaaggaaaattatcgttggcgtgtgcaagcccttactgagcaattggacttagaaaaaatagccgtagtattgcaagaaatcaatggccagataagtgcgtcaagcggttatttgggagctatcagtgaccgtagtaaagtgctttatttcaatcgtcagacggtaggacagtatcagatggcagaactcaataagaatcccaatatgagtttacgaaatatggtattttatcggcaagattatttggatgagttcaatgttatttgggagaagcaagccgaatttcataaagaactgacacctgaattgaagaaggagatacgtgacatcattattttctatcaaaggcggttgaaaagccagaagggattgattagtttttgtgagtttgaaaatcgggaagtcgttgttgaaaaagagggtaagaagcagacaaagattattggttgcaaggttatcccccgttcgcatccgttgtttcaggagtttaagatttggcagacattaaataatatagaggtgtttgttggtgaaaaaaaagggaagcggaagaaatcgaatgtttcgtctgatttgtttggtgatacggaggatgccttgataacagaaggtagacggtttctgtatcaagaagaaaaaaagatattagctaaagaactctctataaaaaagggtttgacaaaagcggaaatattaagactcttatttgaaaatccacaagaactggatataaatttcaaacagatagatggcaatcaaacgggatttgcccttttctctgcctatagtaacatgatcgagaagtatggctatgaaccattggattttaagaaaccggcagaagatctgataagtcaactgaaaactgtttttaccgatttgggatggaatacggatttgctttttatagacttggataaggaaaataaagaatgggaaaaacaaccttatttcaggctttggcatttattgtattcatttgaaggagataatacaccgacggggaatggcaagttgatagaaaaaatcatgcaactttgtgggatagagaaagagtatgccatagaacttgcgaatgtctcgttacaagatgattatggtagtttgagtgccaaggccataaaaaagattttgctttacttgaaggaggggaaccaatatgatatggcttgtgaatatgccggttatcgtcattccaaatcgtctctgactaaggaagaaattgaaaataaggttttaaaggataagttggaaattcttcctaagaacagtttacgcaatcctgtagtggaaaagattctgaatcaaatggtaaatgtgatcaataccgtcatggaggtttatggaagaccggatgagattcgggtggaactggcgcgggaattgaaaaagagtgccaaggagcgagaggagctgacaaaggctgtcgcaaagaatacccgtgaacatgaagagatacgcaaggtgttacaatcggaattcggtatgataaatgtgagccgtaatgatattatccggtataaactttatgaagaattgaaagataatggatataagacgttgtattccaatcaatatatcccgagagaaaaacttttcagcaaagaaatagacatcgaacatatcattccccaatcccggctttttgatgactcgttgtccaataagacattggaatataagtcaatcaatatagagaaagggaataaaactgcctacgactttgtaaaagaaaaatatggagaggaaggtttgcaacaatatctcaatcgttgtgagaatctatgtaaggataagaaagccaaactccggaagttgaagatggagctgaatgaaattccggatggatttatagatagagatttgaggaatacgcaatatatagccaaaaaggctctgtccatgttgacggaaatttgtcgtagggtggttgctacaaccggatctattacggataagttgcgtgaagattggcaactggtagatgtgatgaaagagttgaacttacctaaatatgaagccttaggattggtggaagtttatgaagacaaagatggaagaaagattaagcgaataaaagattggacaaaaaggaatgaccatcgacatcatgcgatggatgcattgacggtagcttttactaaagatgtgtttatccagtatttcaataacaaaaatgctgcatgggaatccgacagcaaagaacatactaatatagtaggtataaagacgcgctattttgagtcaggaaaggcagtgccacctataccgctgggacagttccgggtagaggcaaaatgccatttggagaatctgttagtttctatcaaggccaagaataaagtcgttactaccaatgtgaattgtataaaaaagaaaggtggtacatataaaaatacacaacaaacaccacgtggacagttgcatttggaaacaatttatgggagtcataatcagtatgttacgaagatagaaaaagtaaatgcgtcatttgatgccgtaaagattgcaaccgtaagtaaacaggattatcggaatgcgttactcaaacgtttggaggtttttggtaatgatcccaagaaagcatttacaggtaagaactcgttggaaaagaatccgatttatcttgatagagcacaaaccatacaagttccggataaagtacaaacagttgaactggaaacggcttatacgatacgcaaaccggttgatcctaccttgaatgtggataaagttgtagataaaaagatacgtctcattttggaacaacgcctgaaagaatatggaggagatgctaagaaggcgtttgtcaatctggatgagaatccaatatggttaaatgaagagaaagggattagtatcaaacgagttactatccgtggaatcagcaaagcccaagctttgcatgataaaaaagataaagatggcaatttcattttagatgaaacaggaaagaggataccggttgattttgtgaatacaggtaacaatcatcacgttgcgatttatcgtaaacctgttttagacaaaaaaggccaagtgatatttgatgatgaaggcaatccaatgtatgaactagatgaagatgttgttcctttctttgaagctgtaacacgggcaaatttaggaatacctattattgataaggactataaaaagagtgaaggttggcaatttttgtttagcatgaaacaaaatgaatatttcgtgttccctaatgagaagacgggttttaatcctaaagaggtggatttgttggatccagacaactatgcgatgattagtccgaatttgtttagggtacagaagataggtttaaatgactatacttttagacaccacttagagacaacgatacaaaatgatttaaaattcataacttggattagatgtggaaaaagtggtattaaggatattgtgaaagttcgaatcaatcacattggacaaatcgtttcagtaggagaatattgaaaaaatttatattatgagcaacatcaaacttttccaaaataaaaagattcgttctgtatgggatgaagaagaacagcaatggtacttttcagtagtggatgttgttggagcacttacagatagtgtgaatccaactgacaacctgaaaaagatgcgtaaacgagatgaagcactggctacctacctggggacaaattgtccccaggtagaaatgatgacggaaacaggtaaaaaaagaaggacattggctgctaatgtgcaagctttgtttcgtatcatccaatctattccttcccctaaagcagaaccattcaagttgtggttagcacaagtcggttatgaacgtgtgcaggaaattgaaaatccggaactggctcaagaacgtatgaaagaactttacgaacagaaaggttatcctaaggattggatagacaaacgtttgaggggaatcgctatccggcaaaacttgacggatgaatggaaagagagagggattacggagcagagtgattatgcaatcttgacagctgaaatttccaaagcaacgtttggtatggctcctttcgattataaaatgtataatggattgacaaaaaagaatcagaacttacgcgaccatatgactgatttggaactaatcttcaccatgcttggcgaacgagtcattacagaaatatctcaaaaagaaaaaactgatacatttcagaaaaataagcaggtcgcgaagcggggaggaaatgtagctggtgtggcgcgtgaacaagccgaaaaagaattaggaaggagtattcttactccggaaaactttttacctaaattaggcgaaaaaggcaatgatcttcaataattcccttttgaagaaaatgatgagtaattaattaaaatcaaatggcttatgatcaagaaaacgctctatttcggaaatccggtttatctgtctttaaaaaatgcccagttggtgataaagctaccggaagtggttaaaaatgatacgttgcccgaaagctttaaacgtacgtcggaagtgacaaaacctattgaggatattggagtagtcgtgttggaccataagcaaattaccattacgtcaggtgtgttggaggctttgcttgaaaataattgtgccatcataacctgtgatagtaaaagtatgccgataggcttgatgcttcctctatatggaaacacgacacaaaatgaaagattccgtcaacagttggatgcttctttgccgttgatgaaacaactttggcagcagacaataaaagcaaagattgaaaaccaagcagtggtattgaaagaatactccgatgttgaaacaaaatgtatgaacgtgtgggcagctgatgtgaaaagtggagattcgaacaacttggaggcccgtgctgctgcctattattggaaaaatctgtttcaaatagaaggtttcacaagagatcgggatggtattccacctaacaatctgttgaattatgggtatgccattttacgagcagttgtggctcgcgggttggtggtgagcggacttttgcctacgttggggattcatcatcataatcgttataatgcttattgtttggctgatgacgtgatggagccttatcgtccgtatgtggatcgattggtttgtggcatgatcaaacaaggtgtagattatacggaattgactaaagagttgaaaggacagttactaacaattcctgtattagaaactcatattgccggaaagcgtagtccgttgatggtggctgtggggcaaacgacagcttccttgtataagtgcttcagtggagagttgcgcaaaatttcttatccggaaatgtagttatgaaccgatttagcgaatatcgtgttatgtgggtacttgtattatttgatttgcctactgaaacgaagaaggagaaaaaggcatatgctgatttcagaaagaatctgcaaagggatggatttacaatgtttcagttttctatctatgtccgtcattgtgccagtagcgagaatgcaactgtgcatataaaaaaggttaaatcgtttattccagagtatggaagtgtcggaattatgtgtattacggataagcagtttggaaatatcgaactgttttatggtaaaaagacaatggaggtgagtactccagggcagcaattagaactgttttaaaaagaaaaatcccgcttaatagtgggattttatctttgaaacaacatccatttttttattctaatttgctgtgtaatttgttgattaacaattgataatgataaatcagttgtttctaatggttcaaagatactaaaatgaaagcaaatcacaaccgctatccctatctgaaagatgttctccagttgtttctaatggttcaaagatactaaaatgaaagcaaatcacaactgttgcacactttcaggccctgcgtttgaagttgtttctaatggttcaaagatactaaaatgaaagcaaatcacaactacccgttacctcttctcatgctaaattcgttgtttctaatggttcaaagatactaaaatgaaagcaaatcacaacgataaacttttaatataaacatttatttccgttgtttctaatggttcaaagatactaaaatgaaagcaaatcacaactatcttcgtcgggatctttaatgtagatatgttgtttctaatggttcaaagatactaaaatgaaagcaaatcacaacatcaggaacgcttcttcccggccggtaattgttgtttctaatggttcaaagatactaaaatgaaagcaaatcacaaccgtagtgtattacatcatctatgcacttgtgttgtttctaatggttcaaagatactaaaatgaaagcaaatcacaacataaaggttcttcctgctaattctggtgcagttgtttctaatggttcaaagatactaaaatgaaagcaaatcacaacaaatagagctacctgtatctgtagaaactagttgtttctaatggttcaaagatactaaaatgaaagcaaatcacaacttcgttattagtggtgatctatatgtttaggttgtttctaatggttcaaagatactaaaatgaaagcaaatcacaacattcttagaaaagatgttgatccttttgttgttgtttccaatggttcaaagatactaaaatgaaaacaaattacaactttggagatgtagatgcaaagtatataatactctacaaatatgaatatgtttataattagccatattatgaaattttttctataccaacatatacttaaggactatgattcctaagatcccaaccattaattctaatatcagatactttaagatttttttactatatactaagatctgatatgttgtctcttacctacttatcgagtaaatagtaatctactcgttaagcaggaagaggtcatttttgttattggaaacaaactttttggaaggttatttttcactcggtaatagcggccagtttgggtccgatctgtgttcacgaaccatgatatttttcagttccgctactttttcaggatactgatccagtatattatgccgttccgatggatcggaagctaagttatacaattcataatagggcttgtcaccacggatattcatgtggaccaatttccacggtcctttgcgtacagcttggcgaccgttcagttcctggaattcaaaatacaggaattcatgttctttctgtcccttccggttttccaggaggggaagcatgctgacaccatccatctccttctgtttggctttcggatggatgatttcttcgaaggtcggtaatacatcccagaaagaacacataaagtcggtttccgtattcggttggacatgtcccggccaggaaatgatcattggaacgcgaatgccaccttcgtacaaatcccgtttatatccacggtaaatgccgttgctgttgaagaagtcgggatcggcacccccttccatatgcggtccgttgtcgctcgcaaagataatgattgtattatcatataagcctttatcttttaacttttggatgatctgcccgacatagaggtccagacggtaaaccatagcggcaaaagtggcatggggatggaactgcgaacagtaacctcctttgcggaaggcgggactgcccggttcggcccctttgtaaggtttttccggatacataccgcgaaatttctgtatgatactgtcttccggcacgatcaattccgcatgcggaatgatggtcggataccacatgaagaacggttcgtccggattcatattgtccagatattccagagcctttccatgaataaggtcttgcgagtaagtaccttttccgtactgtatattcagattgttgtcttcgagttccacccgtttgtcgttatcccaaagatggtcgggataataactgtgtgccagcaactggcaattatatccgtagaaagtgtcgcaaccctgatttttaggatcgccggtcgaaccgatataacccagtccccatttgccgaaagcggatgtcttatatcctgcatctttcataacctcgaagatggtacgggcatctgcgggaagtggaaactgtccttccggatcgagttcgaggttaccgcggacaggtgtatgcccgctgtgcgtgcctgtcaacaggcaggagcgggaaggggcgctgacggttgtccctgaataacattgcgtaaaacgcattccactttgtgccagcttatcaatgttgggtgtttcgaacttttcctgtccgtaacaacttagatctccataacccaaatcgtctgcaaggataaaaacgacattcggttttttatccttattcttctctgcatggatggaaggagcagctagcaaaaggccggtcgaaattagaattgcttgtttcatatttttcgatgatatatatatgttttactatttacaaatgtatggctttttagaaattaatgtttggcaaatagaaaataaatagaaaataaatagataattttgcaaagcacacatatacaaaagaggtataaacggacatttatgttatgataaattttaaaattattgtcgcaattgttttattgttttttttgcaagtcgaaaaaacgattgctcaacaagagatagatcttgcgggtagttggggctttgagacagatgttatggattttcgccgttccggtgtggagatacgtggcgatggggagttgcatgatacaattattttgcccggtattacagatcaatatcatatagggaaccgtacgacttacaaatattatgaccgtttgacgcgcaagtatgaatatatggcaccggcttggtatcgtaagcagatacaaatccccgaatcatggagtggtaaacgtatacatctctatttggaacgcgctcattggctgactgccatttatagtggaaggacggaggtgaacaggaatgactatatcagtgtacctcatatacatgatcttaccggctatctgaagcctggacaggaaaatattattgatttaatgatcgacaatcgttatcagtataatatgcataaatgggatcatgcccataccgaatttacacagattaattggaatggtgtgattggggatatgaaacttgttgctttggatccggtttatatggatgatctacagctctatcctgatgtgcagcgacagcaggtcacggtttgtctcagtcttgtgaatacaaccggaaagccttttacgggtaaagccttgctggaagtgactggacatgggctggaggtgaagaaagaggtggaagttgcttcggccgattctatcattagtttggaaacaacattggtattgggcaaaaaggtgaaattgtgggatgaattttcgcctgacctgtatcaattgcagtgttctttgctctcttctggaagtgaagaagtgaaacaacagaagcagctctctttcggtatgagagaggtaaaagctgtaggagatgatattttgcttaatgggcatcgtttgcatttgcgtggtacggtaaacaatgctgagttcccgcttacaggtcatgttcctatggatgatgcttcatgggaacacatttttgacatactcaaatcgtatggaatgaaccacatgcgtttccattcatggtgtccgcctgccgcttgtttccgtatggccgacaagatgggggtctatttggaagtggagatgccaatgtggggagctgatgccaagcccggagatgaggcacgtaatgatttcttccgccgtgaactcaaagctatacttaaagaatatgggaatcatccttctttcttgttgtattgtaacggaaatgagctggagggtgactttgattttttgaacgaactgaccgaatacggacgtagtcatgataaccgccgtctatttagtggatctactgctcgcaagcatgttaaggcagaacagttttatgtgtcccatcgttccgataaaggaagtgtgactatttacgaaggtcgtccgatgactgactgggatattaatgccggacatggtaccggacagcctattatcagtcatgaaacggggcagcgttgtgtatatcctgattttagtgagatttcggcttatacaggccctgtggaagcacgtaacctggaacgttatcgtgattcactggctgctcatggaatggagaatcttgccgcagactttttccgagtgtcgggacaacagacccggattgaatataaagatgtgatcgaggggcagctgcgcagttcgctttcatcgggatttcagttgttgagcttgattgactttcctggacaaggttatgctccggtaggaattctcaatgccttttggaagagtaagggaatcattacaccagaaaaatttcgggaattttgtgctcccagcgtagctttactacgttttcagaagcgtgcttttttcaatgatgaaatctttagtggcaaagccgagttgtacaattattctccttcccgtttccgtcgtcctgatgtccgctggcatgtgacggacagtcgtggaactacgctttatagtggccggatcagttgtaaggagatttccaattatggcgtttatcctctcggtgagtttgagtttccgttgaaccggattacaagtaacgaaaagttgactgtacatctttgtgtggacaagaagattaccaacagttgggatatatgggtttatcctcggaagcaagtcaaagaaattctgaagtctgacaatcaggtgctttttacgacctcctatacggcagaagcccgacgttatctgcaagctggcaaaagtgtggttctgttgcctcgtccggaggctgtgaaagggcggaagtcaaatttccataatcatttttggaatccgatcatgtttaagtggcaacctcttacgttggggtgtctgattcataaagaacagccaatgtttgccgatttcgtaacagatgagtttgtggactggcaatggtgggatattttgtgccatgcgaaagtgattgaaatgaatgcagctcccaatgccttgcttccttttatccaaaacattgacacttatcagcacaaccataaactcggaatcggattcgaggccaagttgcatggaggcaagttgcttgtactggtaatagatacggaaaataagatcgatcaacgtcctgcttctcttcaattgttgcaaagcatcagtaactatgtccggagtgaggcgttccggccggtggtggatattgatgaagcgtttgtcgcttctttccttactccacaacttgacaatgaaataaaagaggctgtgcaggatgaatttcttaattctttccagaacaagtgataatctgtttgctctctacctgcctgtttttgtcagtgatggttagggtctggaattttaagttgttttcgatattgggaatgtggggtcgagggataatccttgcggggtatttgtaaatgaaaaagcaatccgtgaattttttgaaagatgaaaaatcgtacctttgtacggttaacagataaaaagaaaagaacagtggcaaagatagtggaaacacccttgatgaagcagtatttcgatataaaggcgaaacatcctgatgcaatcctgctattccgtgtcggcgacttttacgaaatgtatggtgaagacgctgtgaccggagctgaaatactgggtatcgtacagacgaaaaaagcgaacggaccggggcaaacgatcgagatggccggtttccctcaccatgcactggacagttatctgcctaaactggtgcgtgccggcaagcgcgtagccatctgcgaccagctggaagatccgaagcttacgaaaaaactggtgaaacgcggcatcactgaattggtgactccgggtgtctctatcaatgacaatatcctcaaccataaagaaaacaacttccttgccgccatccattttggaaaggatgtttgtggaatcgcgtttctcgatatctctaccggcgagttcttgacggccgagggatctatcgattatgtggataaactgctgaacaacttttctccgaaagaagtcttggtcgaacgaggcagccgtaaacgttttgaagaggctttcggtccccggttctttattttcgaactggatgattgggtgtttacttcggaagctgctaatgaccgcctgttgaaacatttcgaaacgaagaatttgaaaggtttcggtgtccaacacttgaaattaggaatcgtagcctcgggtgccatcctgtattatttggatcagacgcaacacacccatatttctcatatcacttccctttcccgtattgaagaagaccgttatgtgcgcctcgataagtttacggtacgcagcctggagttggtcagtacgatgaacgaggaggggacgagtttgctggatgtgttggacaagaccgtttctccgatgggatcacgtatgttacgccgttggatcttgttccccttgaaggatgtgaaaccgattcatgagcgtcaggacgtagtggaatatttttttcggcatcctgaagtgaaagaactgttggaagaaaaactcgaacagatcggcgatttggaacgtattatttctaaagtagcggtcggtcgcgtctctccccgcgaagtggtgcagttgaaagttgcccttcgtgccatcgagccgatcaaggaggcttgtatggcaagcgatgagccgagtctttgccgtatcggcgaacagttgaatgcctgtgccctgatccgtgaccggatagaaaaggagatcaataacgatccgccttctttgttgaaccggggcggtgtgattgcgacaggcgtgaacgctgagctcgacgaattgcgtgcaatcgcttattcgggaaaagattatctcttgaaggtacaagcacgggaaatagagcagacaggcatatcgagccttaaaatcggtttcaataacgtcttcgggtattatatcgaggtgcgtaatgcctataaggacaaagttcctgccgaatggatacgcaaacagaccttggtgaatgccgagcgttatattaccgaagaattgaaagaatacgaagaaaagatattaggggcggaagagaagatactttcgctggaagcccgtctctttaacgaactggtactttgtctttccgaatatattccgcctatccagatgaatgcaaatctgatcggtcgtctggattgcctgctctcgtttgccaaagtggcggaaatcaactgctatatccgtccggatgtgaatgattcgcaggtgatagatattaaggcaggccgccatccggtgattgaaaaacagttgcctataggagaaccttatattgccaatgatgtctatctagacgatgaaaaacagcagattatcattatcaccggaccgaacatggccggtaagtccgctttgcttcgccagacagctttgatcacgttgatgtcccagatcggttgttttgttcctgctgaatgcgctcatattgggattgtggacaagatatttacgcgtgtgggagcttcg

SEQ ID NO: 2111 - DNA, 24323 bp, synthetic construct
  source 1..24323: mol_type = other DNA
  misc_feature 1..24323: note = Synthetic
taatttcacactttcaagaggtaaaaaatgttttataaaataatctttccctctatttttatttaactttgccgacaattttatctcataacgttcattaattccaatcaaacctttgtcaaatgccttgtcatataaagctgagagacaaattccattttcagggtttagtctttcttgttcgtttttcgaccaaggtataatgtgacttgcaaaaagcaagtctggaatatcaataccggtaattgcacattttttattgtaattggctaatacaatttgacgaaaaacatcttgatttacgcgtgtttttacttcacggattttggtttctccttttaaatcagaaatgtctgaaagtatgtctttgtattttatctctaacgaaccagtttccttttccgcaaggattcgctcactttcgaacaataatgaatctctattttgagcaaattcatcccaaatcggttgacattgtcttattccacccaccattcctttaacacctctattttggtgatatgggtcacatgacgcaaaattggtcaagcgaatagcaatagaattaaccgaccgtcctaacattattgcaagttcttgaacttcaggtgttcttgtatgcaacttgccaaatggaagctttaaatacaaattaaatgcaagaattaattcttcacgggaccagagatttgctttcatttattttgcttttttcatattaacatagatattcaataaccaatcaggacaatacctttcaatggaagttgcaatctgccactgatatataatgtttccagaaattgaaagattgatttgaagtcgtccgaatcgtgatagtgatttcttactgcgattaccagatattcaacattgggcatcatgcaagcctgaaaaatgtccttgagaaattgattgtttctgtaaccacgcccagcctctacttcaattacaatctttccatcttcacttacggcgtcagcatcaaagaatttatcaattctattgttgatactaaacaagacaggaactttgattttatcaacacttgtcttgcttctttctactttgaaattcaaggcttccaaatcggcagaaagaactttcaacactccgtcacttggcaaattattgtctggagacttgatttgttcataatttctttcaaaacatgaaattaccgccttaatgtcttctgtaatgccaaaagagcggggaaatagttgatatactaattgatattccattgaatgaatgattttttacctcacaaagcagtatgacgaagccaattcgtgagtagcatcgcaatcaggttcatttccggtgttgttatcattgggacgaatcaaactttccaatgggtggaaatcgcacccctcagggttattctcatgactaacgagagccaattctaatgtttgaggatttatactcaaaccaaagttgctttcggaatttccatcttcaatgtattcctgaacaatttcaaagattctttcatcgaaagcatctctttcctgaactgtactgtattctttcatggttatctatttgaaattattggtttattatatgccattttttacaatttggaagtactgtttcgcaaatacccaatttgtaggttgataagtgattcagtgccttgaaaagcactgagacatcttcatcgggacacgcattttcaagtattgcccccaatagtgctatacttgccggattgtatttcaataccaatttctttgttgcaagtacctgtttgctgtccaactccctgaatatctcaattaatcgctgacaagcctgttcaggcgaagtgtcgggaatagttttgaagaagcgtaaacagtcaagtaattgcaaaatagggatattctcctttgtaatcgtattgggctgattgacaaaagatatttggtaagttcctctaataatcggtttcttctctttacggactgctatttgtaagtctgccggaacttgtgaagtaagaccgtatttgttgaaaatagtggtaccagtaatataaccaacaggcttgccattcttttcaatcaaatctttcaccacttgatcaatatcgggttgcaactctccaaattcagaaatttgaggtttgtaaaaacgtcccttagataatcggcgtatttgcccggcagcaaccatattgttcaaaatacggtttacagtggcttgtttgcttacatcaacaggaaaatccaatgttgtaaacacatatccagtagcaaaacgattgattgtatttctaattgtttcagtcatttgtatttgatattatcgacagcaaatataaaaataattttcttgtttctaccagaaaaaacaagaaaattataaacaaaagcaagaaaaagaaataaacaggttttaagacttgcagtatttgccgtgagaagggcgtttcagcagtcctgcgtccacaaatcgactgatttgcttctcggctgttttgtcggggatattcagatttttagcgactgcaagataagtctggcggtcaaattcagcaggcaaagcatccaataactgccgtttatgatttaatggctgttgtgttgcggtgtctttgggcagttgctcaaaaatgtatgctgcgtgtaaaacaagcacttttactatttccatcaccgtattgaaatcgctgtcattacaaacaagcacagacgaaacttcccccgtgtcaatgattctcaaagcggtcattatcatagctaaacgaaaagcaattaaacctaaccggcgaatgcttcccacataatcatctccgcacaattcgaggtattgaagttgagtttgttcaaagtaagcattgaacgctttttgttgactgcttgaaaaagcaaatctaaaccggactggttgctgacgaagaaaaagattgaaatccaaaaactcttttccgtaaacatcaaatttatgttcaagcggttgctcgtcatcaccagcaaacacatctttccatattgggcgaagattcataaagtagaacatgaaacggctgaaaagtccgttttcggcgttcggtatcaatgaagatacctgtttgggcgtgccagataaaagggcggaaagttgagggcttgctaactcaacaaattccctgtctttgcggcggttatacgaaattgtttcgtggtgaaacgctttgcggaaaccatcggaataatttccatgttcggacttgaaagtttgtgcaagcgtatctccttcggtttcaaaaatcaatcccttttcgttattctccttgagcaattgaaacagacctgttgcactgttgttagccggaataatcagcgttctgagaggtggttcttcgggtttttcttcatgtgccttatcgctgctggcgttgtactgtgtgagtttcaacttgtattcttcctgttcggctttgcattgctggcgcatcatttggtgaataggttctaccaaacgacgacaaagagaaagtcttcctttacctgccgaagccttagctgtaacaaaaagaaataggtttggaaatacttcatgctgaccatacacaccgtacacatttggcatacatgcactgaaaacagtgagggagcccagcaaaagcaagtctgcatcttcgggtgaatcggcatttgaagtgattgcatggagtaagccgggcaatgtttcaaatatgtctttcgggaaagcgggcaactgcttttcctgattctgttccagtaatgtcggctgctctcggcaaaggttcaaacgagtttgacctctgctctcgctggcacgacatttccccatttcctccatttccccattttggggaattggagatttagcctccccaacctctccaaaggaggggcttttgggaggttgaggaatagaaacgcttactcctgctgcttttgcaaggtggtaaagggttttgattgtaacaccgtggccgtgcgaagcaaggcaagcagagtattgtttgtcagtttcgctttgcgaataagacggataaaaacggcttaggcggtggtagtaattacgaccgctttcgcccaaagcgtcagcgagggcaaaaccaaggtcgcgccaatcggcataattgggggcaatatcgagagctgaagattcaattcttctcgtaatttcttcaatatcgttacttgtacctaaagactgtaaggactcttgggacttgggattttgtattgatttatctggaacccaatctgccgggttaaatgtcttcttgctcataattatttagttgaaggtttgtaaattggattaatgtatgcctgtgggtcgtgtggaagaaagcaggcgcgggatatatcccgtcctgatttatcgacttcaacaccataggtttgtagaatgtagtttgcaaccgcagcaaaatagttgctgtgggaaaagccccctaaatcccccacaggtggacttattgagattatccacttaatgccatctcctgagggacttacaaagagtaattgggtttcgaagtattcatcttgcaaaagttgcttgcgaagcagatcaacgctttgcaaatggtcaaagtcaatgcacaataagccggaatgactaatcaatgctttgtcgtttcgggtttgaaacattcctgaaaaagtacagtagtcgaatgttgaggctttgaattgccgtgcttgttttaggtcttctatacttctgagtttttccgttcgttgttttgcataatcgccgacaatgtaattgtaggcatcgagcaaagagattgacttgtgaggaatagtattccgaacgggagctttaaagaatgagaaatgcctcaccccaatatctaaactatgattattttgattatcaggattatgtgagatatttgattttttaccgttagcgtaaaaatcgaatttttcgccgattctcagattcattttcttgttcagcgtttgcagtatttcatcaccggactgtttataatgcagttcggcaaagccgaacggatcaccggcagggatagcgttttcgctatcctcgtgccgtgcaaactctctatctaaagcattacccaaaacattctccttgaaaataaaaatattcaatgtcggtttatcggcattgaatggatttttggttggcaaacaagtcctccccgaaagggagaggactgtttgatttggataatacaaactcaacacatgggcatatattccaataccgtagtgagttttagacaatatcgccgccttacttacgcttcccataatcacgaattttaatcatgctgtaattatcggcaagcaagcgttgtaagtcttggcggcggtagtacaatttattgccaatacgtgaaaatggcaacatgccattggaacgcagggtttgtaatgtacgggggctaatatgcagaatctgcattacatcttgattatcaatccaatcttcaagaaaggacttttcaagcatttcatcaatttcctcatttgaaagctggtccatctggacttgcttaatgttgaaatgtctgcgaaaatttacagccaacggctcgttgctgctctgaaaataatctttcaggatttcagataaaatacggggttctttcatcgtcttatcctccttcctttgccactgatataatcagctgctttttgttcaacttctgcaactgaagcagagcgagtacgggttaaccacaaatcaagttccggacggcggaaatagagtttctttccctgcggacaataacatgggattgtattgctgcttgtcagcttatacaaatggctgctgcttaagtcgaggtataagcaggcttcggcaaaggtaaaaatctccttttggagaagattctgttcgaccaagcgtttttcgattgagtcgagtttcagtaaaatctgttcttgcataatttcatttgctcgccaagttgttaggctttccgcttgcggcgaattccaaaagaaaagccgcaaccctcttgtgaagattgcgactgcaaatgaatagtcaaaaagagcttacaactggttgtacaacccggttgtaaattagtagtctttattcttttctattgatattgagatatttaatgatttcataatttcattgacttgtgatatttcagcatcatggtacgaactcaacaaaatacccttctgggcttcattataaagcttcttttcgctctgattcgtaagaaacgaaacaagcctgcaaattgctgaaagatcatttgcagacttccctttgcccatttgtttgagcatttccattattacgactgctcgaaccttacttgaaactcccttctcgctttcggttggaatttcaatattttcttgaacggcgagggctttagttcgctcaataagttttatttcatcttcaatctgtttgagtatgtccccttgattctgagcttgcttatatcgagtctgatactcctgataaaacaattcccgcttggataaatcttcaattttgtcagcttcaaatttcagaaatgcaaaatcaggaggtaaagccttgccatcagcatacgctttgccactatttaaaatcggctcaaaaggttctaaatatgccggatcaatcttcgccttaattcgattaagacagattgataaatttatacttgtccccggccttaaagacagaataagataaactcctgaaaaaattatgctggtttcataacttgtatgttcagcccttgctttatcccaatagttttgaaagtacatttccgggtgcttatcttgcctgattatatgacacatttcatacattttgttgaacatgtgaataatatcccgttttagtttaatacgattaggagctccgtcttgcattgccaacagaactccataaatttgagtattcaattcgtcattctcaataaaatcatcgagatcgtactttaaattataactatccatattgtaacttgattagatttttatttcaggaaaactgtcgattgcttcgcgagctcccttgtcggttatgtttgcgtaatgtttaatggttgtttgaacggatttatgcccaagtaatttgctgaccttgtaaatatcaacgccgctttcgagcaagataacaccaaacgagtgccgggcaatgtggaaatggagcgtttttttgagttctaatttggtggctatattcttcaacgctttatcacacgcctgttgcgtgggaacgctgaaaaccttgtaatcatcggctttgcgttcgccaagcaaagcgattgcctggggattcatcggcaaataggttacgcctgtttgtttgccgtttttggtctgtgttttttgctgtgagaatttcagccggaaatcttcggtgatatttccccaagtgaggtttttaatgtcggaatagcgcatcccgcaaaagcaggaaaacaggaatacggtttttactttcgggttaaggttgctttgtgctatccgggcaatttcatcggttgtaaggaaacttacaatcgtttcttgcttctctggagcttcaatatccaacagggtgtcggacgcaacaatgctttcggtaatggctcttttgataaacgaacggaatttggagaaataggcgttagccgtatttccgtgaagattgcttgtcaaataatcggcaaagccctggacaaactcccgctttacttcctgcatttggagcgatttgttgggcatatattctttgaggtgatcaacaacctgcatactgactttagttattgcctgagcttcgcaataggcaagaactgactgtttacgcttgtgtgcaggtgtgattccgttcgggctggcgataagctggttttcacgctgattgcgtatctgttgggcaagtttcagggattccttattggcttcccgttcttccttggtggggcggtcggatagtacggtgtagattttcaggtattcataatggcgttttccattctgaaaccaatccagataatagcttccgtttccatcggcgagtttcttaattctcagtttgactgtagttttcatatccgttttctttgaaacaaagatacaaaaaagaaacggtttgagaaacggttttgtgcaaaaaagaacaaatatgagcaaaaaagaagagtatttcgggaggtagtaaaatttgcaattatctaatatatagattattattagtttttgtttgctcttgttttctgtaaaaatgtggtatgtgattctgaaagcaaatcacaacacatcatctttgatgtgataatttttgcagttgtttatcagatcaaagatacaattttttgaaagcaaatcacaacttctcgtactccgatttcagcagtgtatatgttgtttatcagatcaaagatacaattttttgaaagcaaatcacaacattgccgaatcgatataatccttatcaattgttgtttatcagatcaaagatacaattttttgaaagcaaatcacaacaataatttttgaatatggattagtaattggttgtttatcagatcaaagatacaattttttgaaagcaaatcacaacttgttatctaaaatattttcccgacctttagttgtttatcagatcaaagatacaattttttgaaagcaaatcacaactggttgatggcaatatggcttccggttctgttgtttatcagatcaaagatacaattttttgaaagcaaatcacaactagttactttttcttatttctctggtaaatgttgtttatcagatcaaagatacaattttttgaaagcaaatcacaacgcattgtaaacggctattccaagaatataagttgtttatcagatcaaagatacaattttttgaaagcaaatcacaactgtataactatgtcaaaggcgacccgtttagttgtttatcagatcaaagatacaattttttgaaagcaaatcacaacgtatcaggtgatgcaacaggaagtggaacagttgtttatcagatcaaagatacaattttttgaaagcaaatcacaacgaaacagagaaacagcaactcagggaaacggttgtttatcagatcaaagatacaattttttgaaagcaaatcacaacttttgttcatataagtgtaaagaaaacattgttgtttatcagatcaaagatacaattttttgaaagcaaatcacaactttgcgttatcttttaacgtgttcggctttgttgtttatcagatcaaagatacaattttttgaaagcaaatcacaactgagctggtttactacttctctgttaaatgttgtttatcagatcaaagatacaattttttgaaagcaaatcacaactatcggtgccggtgcaaggataatcgatttgttgtttatcagatcaaagatacaattttttgaaagcaaatcacaacgccgattctaatgaaggtggatctgcttcagttgtttatcagatcaaagatacaattttttgaaagcaaatcacaacctatagtacacgatggaacaagttgaagaagttgtttatcagatcaaagatacaattttttgaaagcaaatcacaactaatcattagtaactaaatattccaaccatgttgtttatcagatcaaagatacaattttttgaaagcaaatcacaacgtaccgttcaaaccttcaccaaaaacttcagttgtttatcagatcaaagatacaattttttgaaagcaaatcacaacttggcaatctcttctgtcaggaatgatgttgttgtttatcagatcaaagatacaattttttgaaagcaaatcacaactgttgggatgtcttcgagggcgaaacacccgttgtttatcagatcaaagatacatcccgatttttatcgggattgaaagcataacacaaaaaaaagcgaggtgtaagccccgctttaaatgttttcacaacggaataatccttattgtgatttgcttcaaaaattgtactgcaaatatattacatttatttcaaaataaaagtttttttagttaattattcttttttatctttgagaaattaattaaaaaccatgaaacatgaaaaaaatattaggtttggatttgggcacaacttctattggctgggcattggtgaatgaagctgaaaaagaaaatgagaaatcatccattattaaacttggtgtaagagttaatccactgactgtcgatgaacaacaagattttgaaaaagggaaaagtattacaactaatgcagatcgaaccctaaaacgttctatgcggcgaaatttgcaacgatataaacttcgtagagaaaatctgattaaaattttaagagataataaatttatttccgatgaagcaattctttcagaaaacggaaactttactacatttgaaacataccggttaagggcaaaagcagtaaaagaagaaattacacttgaacagtttgctcgtgtactattgatgataaataagaaacgcggttataaaagcagtcgtaaagcaaaaggcacagaaaaaggagctttaattgacggaatggaagtggcaaaaacgctttacaacgaaaaccttactcccggacaatactgtttacgacttataaatgcacgaaaaaagacactacccgacttctatcgctccgatttacaaatggagtttgaaaaagtttttgacaagcaacttgagtattaccccgattttctttcaaatgaactaaaagaagaacttcgcgaaaaaaaacgagatgctgtttgggctatttgtgctaaaacattcaaagaaaagggatttgaattagttggcactaaaagacagggtaatacagcagaacaaaaaaccgagaattatgtttggcgagcaaaaggtttgtcggaaaaactggaactggaacaattagtgattgtattgcaacaaatcaatatccagctcaatagttcaagcggttatctgggagctatcagcgacagaagcaaagaactctttttcaacaaacaaactgttggagaataccagatggaggttttggataaaaatcctaatgcaagtttacgtaatatggtcttttatcgtcaggattacctggatgaattcaatgcaatttgggaaaagcaaactctttttcataaagaattgactgaagaactgaaacaagaaatccgggatgtggttatcttttatcagcgtagacttaaaagccaaaaatcgcttattagcttttgtgaatttgaaagccgaaagattgaagttgagattgacggtaaaaagaaatcaaaatcagtaggcagtcgggtaattcccagatcgtcacctttgttccaggaatttaagatttggcaacgactgaatgacatcgaagtatttggaaaagctaataaaacaaaaaaacaaaaaggcgtgtcattgttcagtgaaatagaagatccgctagaatatggtggaagacgtgaactctatcaggaagaaaaagaactattagcagctgaactctcgataaaaaaagaactcaagaaagcagaaatattgaagttgctcttcaataacccgaaagaactggatttgaattttccttccattcagggtaatttaacacaagctactctatttgatgcttacagacgtattatagaattgagtggacacgaaattgattttgataagcttaccacctcagaaattttaatatcaattgaagaaattttcaggggattcaattacaactcaggtattttgcattttaactctgaaaatgatttagataaagagccaatgtatcaattgtggcatttactttattcattcgaaggtgataattcaaaaacgggtgatgaaaacctgattaataaaataactgagcgttatggctttgagaaggaatactcaactattctttcaagcatttcttttcaggatgattatggcagcctttcagcaaaagctatccgaaagatattaccgtatcttaaagccggaaacaaatatgatatggcttgtgagtatgcaggttacagacactcggccagttcacttacaagcgaagagttggaaaataaggtttataaagaccgacttgatattttgccaaaaaattcattgcgaaatcctgtcgttgaaaaaattctcaatcaaatgataaatgttgtcaatgcaatcattgacgcctatggaaaacccgacgaaattcgtattgaattggccagggaactgaaaaagagcgcaaaggaacgcgaagagctgacgaaatcaattgctgaaacaaccaaactgcatcaacaatataaggacattctctcaaaatcaccttttaatctctcatacataagccgtaatgatattattcgttacaaactctatgaagaattgaaagataacggatataaaacactgtattcaaatacctacatttcaccttcggcagtatttagcggcgattttgacattgaacatattatccctcaatcacgtctgtttgatgatagtttttcaaacaaaacgctggaattgcgtagtatcaacattgaaaaaggaaacatgaccgcagttgattttatcaaatcaaaatacggtgaaaccggaagtgaaaccagcttggatatttttcttaaccgcatggaagatttacacaaaaaaggtgttatttcacgcgctaagtacaataaactgaaaatgcaggaaaaggatattcctgatggctttattgaacgcgatatcagagacacacaatatattgccaaatacgccaaaacaatgttgggcgatcttgttaaatttgttgtttctacttcaggcagtgttacagatcgtttgcgtgaggactggcaattaatagatgtcatgaaagaactgaactgggaaaaatacagaaacctgggactgacagaagaatttacaaatgaagaagggcacagaatacgcaaaatcaaggattggactaaacgaaacgatcaccgccaccatgcaatggatgctcttacagtggcatttacaaagcgcagtattattcagtacctcaacaatttgaatgcccggaatgataaaagttcaagcatttatggcatagaacaaaaagaactttatcgaaacggtaaaggcaaactgcttttcagacctccatttgatttagatgaattcagaggagatgccaaaaagcatttggaaaatacgttgatttcgattaaggcaaaaaataaagtggtaactcaaaatataaacatcacaaaaaagcagggtggagtaactaaaaagatacaactaacaccccgtggacagcttcataacgaaactatatatggcagtctgaaacaatatgtaacaaaagaagaagccgtaaatgccaaatttgatgcagccaggattagtgcagtttcgaaacctgcgtacaaggaagcattgttaaaacgtttacaagaatttgacaacgatccgaaaaaagcttttagcggagcaaacgctctttcaaaaaggccaatctggctgaatgaacttcatacggcacaagttcctgaaaaagttaaaaccgtaagtcttgaaactgtttatactattcgtaaagatatttcagctgacttaaagattgagaaagtaattgatgcaaatattcgaagaatacttgaagaacgattaaagaaacacaacggtaatgccaaacaagcattctccaatttagacgaaaatcctatttggctcaacgaagaaaaaggaatttgtattaaaagagttactatatcaggtgttagtaatgcagaatcgttacgagataaacgggataaaaatggaaaaataattttagacgataagggtcaaaaacaaccagtagattttgtgaatacaggtaataatcaccatgttgctatttataatgttccggtattagataataatggtcaagttgtattcgacgaaaacaaccagccaaaatatgaattgcaagaaaatgtggtttcttttttcgaagctacaacccgggttaatcaagggttgcctgttatcgacaaagagttcaaaaagtcggaaggctggcagtttctgttcagtatgaaacaaaatgaatattttgtattccccaaaactgaaaaacaagaaaaagtaaatgaagaaacaggtgaaattacagaagaagaagtgattacttttaatcccaaagaaatcgatcttcttaatcctgataattatcatttgattagtccgaatttgtttcgggtgcagaaaatatcttcaaaaaattatgtttttaatcatcacttagaaacaatggcagtaacaaacgatacattaaagaataaaaaacaattattaaatgttacacacagattcattcaaagcacttcaccattaattagcattattaaagtaagagttaatcatttaggccaaatcgtttcagttggtgagtattaaatcaaactcaacatcgatcgtctcggtaatatctcattataaactaacaaatcattcaagtaaaactaactcaaacttcaaaagaaattagctaaacagtgaggataaacagacagcagcatatatacctcaacaattacgactaatatatggcagcattggtatcatatatatgttagcaaacctaaggtatatatgccaataataaaatatcaggaagattcatttaaatacagctggtgtaagaactaaataatcaggaagaaaaagataaaacaatgagtatcaaatacaaaatgattcatcggggcgactacctgaaccccgaagagaagaaaaaatcgggttattatccacaggtaatccgatcgaaaacggtgagcctggaagaaatggctaccaccattgccaaaggaaaacgtttacaggcatttgaaataaaaagtacgcttgagttgcttctcgcatgtattgaagatgaacttttggatggaaatagtgtttgcctggatggatttggcactttctcgcttacagcacaaagcgttcgtcgggtggagaacccgaaggaaatacgggctgaatctgtggaagtaaagcgggtgactttcacgccttcgctcccactccgaaaacggttgaaaaatgcgaagtttataagggctgcagagtaaattattttaaaatcaacaagccatttccaacgtttaaaactttgggaatggtaatcttccaaaaaaaagaaacgaatatgtcaaaagcaaaactaaaaaaagaactgaacaatctgaccaaagaacaattgatggaacaaatactggatttgtatgataaaaacaaagcagttaaggagttttacgatttctatctgaacccggtgaacgaaaaagaactggtggaaaaatacaaaaaattgattcggaaagagtttaatgtagagagaccggaacgtggcagtgagaaattctctgttgctaaaaaggcaatcgcggattttaaaagcttgcaaccatcacccgaagcattagccgatgttatgttgtatttgcccgaaagtgcctgcgagctaacatattgttatggcgattattccgaacaattttacgattcgacatataataattacaaagctgcattggagtttatggcaaaaaacaaattactcaatgagttcaagctccgtgccgaacaatgtgtagaatgggcatcgccgtgtgggtacggctttgcagatgatattgccggcgttttttacgattattacggagaatagccttttcaacaagcttttcaaacgtttatatattggaaaagatgtgtaataaaacaaccaattcctatggaaaaattacaacccaattgcagctaccacattttcaatcatgccaacgggtttgagaatatatttatcgaggatgagaattatcgtttttttcttgataaatataatcagtacattttgcccattgcagaaacatacgcttattgcttgttaccgaatcattttcatttggtggtcaggattcggcggcgggaagtattggaagaagtttttcgcaacttcaaatctactaacttttccaaagttcaaaactttgaaaaagttgaagtcaccgataacatgattgaatactacatttcgaaacagtttgcaaatctgtttagttgttatacgcagtcgttcaacaaggtaaataaacggagagggtcgctttttctgaagaatttccgaagggaaccgattaaaaacaaagcttattttatgaatgccgttatttatacacatcgaaatccggtacatcatgctttttgcgacagatataccgactggagttacacttcgttttgcgaaataaaagaacggaatagtcagataattgaggtagataaattactccgtatgtttggtggccgggactcatttattgatttgcacgaacaatctgccaataaattcagagaatccttaattgcagatttgtagaaaatcgttttcaacttttccaatgtatcgtaccaacttttccaacgtttttggaactttggaaaagttgaaaaacaagaaaacaactaacgccatgattaaacgcacgctttatttcggaaatccggcttatctaagccttcggaatgcgcaattagtgattcatttgcccgatgccaatggcatggacgaccgaacgggaaacaacacctttccgatagaagatattggcgtggtagtgctcgatcacaaacaaattaccatcacacacggactcttagaagctttactggccaacaattcggcagttattacctgcgatagcagccgaatgcctgtaggattgctccttccgctgagtggaaacaccgtgcaaagtgaacgctttcaggctcagattgatgcctcgctcccactccagaaacaactctggcaacaaaccattcaggcaaaaatcagtaatcaggcatgggtactcaaaaacatgcgtggcgaagtagtaaaaaacatgcttgcctgggccgacgatgtaaaaagtggcgacagcgacaatctggaagcccgggcagccgcatattattgggcgaatatgtttccttttattcctgattttcgtcgtggacgcgaaggcgttccgcccaataatttattgaattacggctatgctatacttcgggctattgtggcacggtcgttggttggaagcggtttgctccctactttgggcattcatcatcacaaccgatacaatgcctattgtttggccgacgacattatggagccttaccgtccgtttgtagataaattagtggtagaattggttcaggaagaaatggaaagcggtaataatcctgataaaattgaattgaataaaaacgtaaaatcagctttattaaacattcctgtattggatgtgaaaatcaacggacaacgcagtccgcttttggtagcctccggaataacaacagccagtttggcgaaatgttatctgggcgagatacgcaaaatttcctatccggaattcttgtaatagatctattaccttttccaaaatttcaatactttggaaaaggtaatgtttgattatatatatggagcgtctaagcgaataccgaatcatgtgggtactggtactattcgacctgccaaccgaaaccaaaaaggaaaagaaggcatacaccgatttccgcaagaaattgattacagatggttttaccatgtttcagttttcgatatacctgcggcactgttccagtcgtgaaaattctgaagtgcatatacagcgcgtgaaaaactcactaccggaattcggaaacatcggaatcctctgtatcacggataaacaattcgggcaaatggaactctatcaagggaaaaaagcaaaggaggtttcaactccctaccaacagctggaattattctgaatacaggttactttataatataccgaaccaccgcgaataaacttttcaaaagtttaatttaccagcagataaaacaaaaaccctcatatctttctgaacatcagattaatacgagggtttttcgtacgcagagccgatacggggcaaaataagatgcgccgaaaaaaaggatagaaacgctcccggtgatttaaataaagccagcgggtacagtagattatccaaacctgaatgagcttgagattattttatctctatctgctttggagagttccggtaatataaagtgcgtgtattttaaataaattaattcattttttgtatcataattttgcttatatttgtcgggcattgctgaaaggctgtgcctgtttttatgtggattagagtaacgggtatacaggaatgacatgctaatccctccccgggataaacccctaaatgaaaaattaattaatcttaatacaacgaacaacctgatagaaaaagacaacaccgacaaacaggtaaagtataaaaagagtgaagcagatcgcggagaagttttttaccaatgaacgtgaagtaaatgctatgcccgactcagttaagcatgaaacagaacggattgactcccgtttcccggaacctgcttgcagtaatggtaatttcttagctgaggtactgagaaggtaaccaagtttaaactcaaagtgggcgtcgaccacaaaaccgactgcaggagcagctctgcgattacttaccggattgttggaatacactaaaaaccgaagaaaaatgaaaattattcatatattgattgctagctttctgttaccattggtttgttctggccaaaaccccattatacaaaccaaatacactgccgaccccgctccgctcgtttataacgacacggtttttctttacaccagccatgatgaagacgatgccttcggctttaaaatgcaggactggcttttgtacacgtctaccgacatggtaaactggaccgaacacggcgtgatagcatcgctgaaggacttcaggtgggtaccttacgacaatggtgcctgggctccgcaatgcgtaaggcgaaacaataagttttatctgtattgcccaatgccaaacggcattggaatcggagtattggtatccgacagtccgtacgggcctttcaaagaccctattggcaagcctctcattaagaatggggtgcaggacattgacccaacggtactgattgacgacgacggtcaggcttatctctactggggtaatcccgatttgtattacgtaaagctgaatgaggatatggtttcctattcaggcgggatagttaaggagccaaccaaacctgccaattatcaggaaggaccgtgggtttggaaacgcaacggacattactacctctcctacgcctccacctgctgccccgaagggattggttatgccatgagcaattcaccaacaggtccctgggaatataaagggaacatcatggatggcgacaaacgatcaaacggtaaccaccccggaatcatcgactataaaggaaactcgtacgtattcggctttaattacgccattctgaaacaaaccatggcaaagcattatgaacgccgctctatttgccttgaaacgcttatttacaatgcagatggcaccattcaaaagctgccattttggacaaacagcggtgtaaaacaacttggtagtttaaatccatacaaacgggtagaagccgagactatggcatggagcgaaggtgtaaaaactgaattcgcaacagaatgggagcgcaatgtatcctgggataaaggtaaaaagatagcagacagactgtttgttacatccatccatcatggcgactacattatggtaaagggtgttgacttttcgaagggtgcatcgtcggtagacgtaaatgtatcctcgctgtttggcggcaaaattgaaatccgaaccgacaagaaagacggccccctaatcggaacagtcaatataaacacatcagccgaaggagatctttggaaaacaataagcacaccggtaaaaaacatcaaaggaatacatgacgtctactttgttttcaggggtgaaaaagacctgttcaatttcgactggtggatgtttaacgctaaatgataacttattactaagtataataataaacaatataactatgtacaaaaaattcacaatcgcttgtagtctgtttgcaacgttgtttgccttaaacgctcaaaacccgataatccagacctatttcacagctgaccctgctccgatggtttacgacggaacagtgtatttatatacatcgcacgacgaagattcaacggtgaacaacttctttaccatgtacgacacgcgttgctattcgtcgaaagacatggtgaactggaccgaccacggcgcggtggcttcgcttaaaagtttcaaatggatgaacaaggacaatggtgcctgggcgcctcagtgcatcgaacgtaacggcaagttttatctttatgtgccgatacatggcgaaggaattgcagtgttggtttccgacgctccaaccggaccattcaccgatccaatcggaaaacgtttgatagacagcgaccatatttggcaggatatcgacccaacggtttcgatagacgacaatggccaggcttatttgtactggggaaaccccaaattgtggttcgtcaaattgaacaaggacatggtttcgtacgacaaaactattggcgacataggaattgtgtccatcgatatgaccaccgaatcttttgggtcgaaagccgggcgcgatggcaaacccgggccaacttatacggaaggaccatggttttacaaacgaaacagcttgtattacatggtttatgctgctgaaggcatcccggaatacatctcatattctacatccaattctcccgaaggcccatggacttacaaagggcacatcatgaaacgcgccgatcatctggcttttaccaatcactccggaattatcgacttcaagggaaattcgtacgtcttctatcacgaccagtcgttgtcgaaagggcagggctttaaacgttctgtaagtgtcgaacaatttgcgtacaatgccgatggtagcatccctgttattcctgcaaccaaagaaggcgtaatcaaaagtgtggcgaatttggatccatataaaagagttgaagctgagaccattgcctggagcgaaggcttgaaaacttcgggtaacagccagaatggcgtttatgtcaccaaaatcaccaacggcgactacatcaaagtgcgcagtgtcgatttgggcaaaggcgccaaatcgttcgaaggcagcgttgcatcagcaacttcaggagaaacaatcgaaatccgcatcgacggtaaagagggacaattactcggaaccctgaatgtttcggcaaccggcggtgagcagagttggaaaacgctgtcgtgcaaactggaaaaggcaaccggcattcacgatgtgtatttcgttttcaaaggtggcgaaggcaacttgttcaatttcgattggtggaaatttgggaagtagcacctgagctggcacgttggtgacgcgtgccttgaagtaaaaacaggtgataaaaagtaccggtttaaagagaattaattacaaatcattttagatatgaaaatccgtttgatttttttaatgttactgctggtggcttttaatagtcatgccgaagatggtcacaacctctggcttcgcgccaaaagcacaggaacggtgagtgttgtctgtgcaaaaacttctccaacccttgccatcgccaaagaggaactggaacaaggctggcagggaaagaacggcgcaaaaatcgcgctgaccatcacaaaagataaagcgattaaaggcgatggttttaagctttccgaaaatgaagtgcaggccaataccgaactgggtattttgtatggcgcttacgaattgttgcgccgtcagcaaaccggacaggcgatttcgtcggaaataagcaatccatcgtacgagcgccgcgtgttgaaccactgggataaccttgatggctccatcgaacgcggatatgcaggccaatccatattttggcacgatgaagccaaagggtttgctgtaaccgaaaaagacagaacgctgtggaaagaatatgcccgcgccaatgcgtcgatcggaatcaacggcgctgtgctgaacaatgtgaatgcctcccaattgatgctaacgaccgagtgtctgtaaaaatcgaaggcgattgccgaagtattgcgtccgtatggcattaaaacctatttatcgatcaaattttcgtcgccacagttaattggtgggttgaaaacttccgatcctctaaatccggaagttatccagtggtggaataacaaaataaaagagatttacgcactgattcctgattttggcggttttttggtaaaagccaacagcgaagggcagcctggtccgcaggattttggccgtacccacgccgacggcgccaacatgctggccgatgccttcaaaccttacggcggtatcgtgatgtggcgggcttttgtttacgaagcaaacagcaaggaccgcgcggctcaggcttacaaggaatttatgccgctcgacggtcagttccgcgacaatgtgattattcaggtgaaaaacgggcccatcgattttcagccgcgtgaaccgttcaacccgctttttggtgccatgaaaaagacctcagtaatgcctgaactgcaaattacgcaggaatatctgggtcattccattcatttggtgtatttggcgcccatgtgggaagaatgcctgaaaagcgaaacatatcaggaaggagtaggaagtaccgttgcccgggtaaccgatggtagcattttccctcagaaacataccgcgattgccggcgtcgccaatattggactggacgccaactggtgcggacacgattttgctcaggccaactggttcgcttttggcaaattggcatggaacgatcaattgaccagcgaaaaaattgctgacgaatggctaaaacttacttttggcaaaactcaggcttcgattgagtggaacgtatgttttctttcgcctgtaaaacagatgatgcttgaaagtcacgaagccgctgttaactatatgatgccgcttggttttcaccacatttttgcacctcaggaccactacggaccaggcccctggtggggacccgaaggcgttcggaaagactggacaccgccttattatcatcaggctgattcgaaaggggttggatttgaccggactcaaactggctcgaatgctgtaagtcagtatcacgaaccgcttagctcgcagtttagcgatgttacaacctgtccggaagtctatttgctttggttccatcacgtgccgtggacttataaactgaaaaacgggcgcactttatgggacgaaatctgctaccgctacgacatgggtcaaaagcaggtccgccagttccagaaagtgtgggatcaggttgagccgtatgtggatgccgaccgttttgccgccgtgcaacgcaggcttcgcaatcaatctggaaacacccaaatttggaaggatggctgtttgctgtatttccagcaattcagcaaaatgcctattccgtatgacatcgcccgaccggtgtacgatttggattacatcattaaaaatttcacgaaagaccggccataaggcactttaatcttagctcaagctggcgcgcgtttgtaacgcgtgcctcctctttaaacatacgatacacctttgtaaaagcacgaaatgaaacacacatacctgctactactcagccttttcccgatactttgtacggcacagacttttataagctttatacaaacaaaggaaggggttagcattgcattgaccgatggaacccttgacgtttttccacttacggataattctgtaagggttaaattttcgaaagataccgaaacccctttgcaggaactcgtgttcactaccaaagcccaaactcccggatttaaagtggtggatgccgcatcgcaactcgaaataaagagcaagaagattacagtaattatcgataaacaaaccggaagcctttcgtatgccaatagctccggaaaagtctttttacgcgagaaaaccggttcgcgaaagctcgcagccgccaccatcatgggcgagccttgctatgaggcagagcaaagcttcgaatcgcctgccgatgaatacatcttcgggctgggccagttccaggacgggcattataaccttaaaggcgtaacacgcaggctcacgcaggtaaactcacaaattgctataccgttcatctactccgatcagggatatggtttgctgtggcatcaatatggattaaccgattttaatccggctgacaattatattaatctcgaaaagcaggagcaatctgcatcgggcaataaccagatggctgaagtaacgaccaccgcaggtacacaaaaagtatcgcaaaaccaatcgctgtatacaggaaagttcaacattccagcaaatggcgagtattcaattttcctggatcttggaggaatgggtaatcgtcacctcgttgttattgatggaaaaccttgcgtagat

SEQ ID NO: 2112 - DNA, 24311 bp, synthetic construct
  source 1..24311: mol_type = other DNA
  misc_feature 1..24311: note = Synthetic
tggaaagcaaccagttgaatctgaataacaacagcgatttgaagcagttggacttaaatgccgacttgttgaagaaaacactggctgtgcagcgaaccaatttcatgccgacattggctgcatcgttcaactattcgtatacatcgctgaataatgacttcaagatgtcgcattacaagtggttcccatattctactgtcggtctgagtctgagtatccctttgtttaaggcaagtaactttacgaaggtaaagcaaactaagatccagatgcagcaactggccgagaaccgcatcaacgtatatcgccaactcaccatgcaagccaccagttatctggataatatggctgcaagtaccgagcaggtagtcagcaacaaagaaggaatcgtacaggcggaaaaaggacgtttgatagcccaaaaacgttatgaagtaggtaaagggactatccttgaattgaacgattcggaagtggcgctgacacaggcccagttgacttacaaccagtctatctacgactatttggttgctaaggctgatctcgatcaggtattgggaagagaagaagtaacagagtaactaaacacacaacaattaaaatttgaatatgaaaagatgtttccaattagtagccctgctcgccgttgtgctattgggctcgtgcactggaggaaaagacaaaagtgctgctgaaaaaacagaggaaaagccaaaagtgaaattggccgatgtgacagcacgcccggtagaacagatacaggaatacacggcaaccgtagaagctgaagtgaagaataacattgctccgtcatcaccggtgcgtattgataaaatctttgtggaagtgggcgatcatgtgtccaaaggccagaaactagtgcagatggatgctgccaacttgaaacagactaagctgcaactggacaatcaggaagtggaattcaatcgtatcgatgaactgtataaggtaggtggtgcttcaaaatcggaatgggatgctgcaaagatggcctatgacgtgaagaaaactgcttatcagaacttgttggaaaatacttctctgctgagtcctatcagtggggtggtaactgcccgcaattacgatagcggcgatatgtatagcggtggtaatccggtgctgaccgttgaaaagattactccggtcaaacttttgatcaatgtatccgaggtttacttcaccaaggtgaagaaaggtgctcccgtgaatgtgaagctcgatgtctacggtgatgaggctttcgaaggcaagatcagcttgatttatccgacgatcgatccgtctacccgtacattccaggtggagattcaattgcctaaccagaatcagaaagtacgtccgggaatgtttgcccgtgccagcctgaattttggtacggaagagaacgtcgttgttcccgatttggctattgtgaagcaagctggtgccggcgaccgttatgtgtatgtatacaaggatggaaaagtgacatacaacaaagtggaactgggacgtcgcatgggggctgaatatgaattgaaatccggtgtacccaataattctcaggtagtcattgccggtcagacccgattgatcaacggcactgaggtagaggtagaaaaataatgaatcaatgtaaccgtatgttgtgtacagctttataagttgaaagctatacaatccgatgacatacggcgcattatccacattttaataattagcaaaaatgagtttatacgaaggagcggtaaaaaaaccgattatgacctccctctgcttccttgcagtggtgatttttggtctcttctctttgtcaaaattacctatcgacttgtatccggacatcgatacaaatacgattatggtaatgaccgcctatcccggagctagtgcttcggatatagagaacaacgtgactcgtccgttggagaatacgctgaatgctgtcagtaacctgaagcatatcacctcccgttcgtctgaaaatatgtctctgattacattggagtttgaatacggtaatgatatcgacgtactgactaatgatgtgcgtgacaagctggatatggtcagctcgcagcttccggatgatgtggagaatcccatcatctttaagttcagcaccgacatgattccgattgtgttgctgtcggtacaggccaatgaaagtcagtcggcactttataaaatcctggacgaccgcgtcgtgaaccccttagcacgtattcccggtgtgggtacggtatccatcagtggtgctccccagcgtgagatccaggtttattgcgaccccggtaaactggaagcctataatctgaccatcgaaacaatcagttcgattatcggagccgagaataagaatattccgggcggtaacttcgatatcggtaacgagacctattcgttgcgtgtcgaaggagagtttgacgattcgcgacaattggaagatgttgtggtgggtagctacaatggagcgaatgtctatctgcgcgatgtggcccgcgtggtcgataccgtggaggagcgtgctcaggaaacatataataatggggtaaaaggagccatgattgtggtgcagaaacagtcgggtgccaactctgtggatatttcaaagaaagtggccgaggctttgccgaagttgcagaagaatttgccgagcgacgtgaagctcggagtgattgtcgatacatccgacaacattctcaacaccatcgacagtttggccgaaaccgtactgtacgcccttttgtttgtagttatcgtggtgttcctcttcttgggacgctggcgtgccacattgattatttgtattactattccgctttcactgatcgcctcgtttatttacctggcagtcaccggaaatacaattaatattatctcgctttcatctctctctattgccatcggtatggtggtggacgatgcgattgtggtactcgaaaatgtgactacccatatcgagcgcggttctgatccgaaacaggctgccgtgcacggaacgaatgaggtggctatttccgtaattgcctctacactgaccatgattgcagtgttcttcccactgacaatggtaagcggtatgtcgggggtgatgtttaagcagttgggttggatgatgtgtgccatcatgttcatctctacagtagctgctttgtcactgacaccgatgctctgttcgcaattgttacgtttgcagaagaaacagtctaagactttcaaacttcttttcggtcctattgagaaaggtttggatgctctggatacaggctatgcccgcatgttgaattgggcggttcgccatcgtccgattgtcatcttcggttgtatcgtgttctttgtggtcagcttgttctgtgccaagagtatcggaaccgagttcttcccggcacaggataatgcccgtatcgcggttcagttggagttgcctatcggaacacgcaaggagctggcacaggaggtctcagagaaactgactaaccagtggctcaataaatacaaaggtgtaatgaccgtatgtaactataccgtaggtcaggccgactcagacaatacctgggcctctatgcaggacaatggttcccacatcatttcgttcaatatcagtctggtcgatccgggagatcgtgacatcagccttgaacaagtctgcgacgagatgcgtgaggacctgaagaaatatccggagttcagcaaagcacaggtgatcctgggtggtagcaacacgggtatgtctgctcaggcaagtgccgacttcgaggtatatggttatagtatggaagaaaccgacagtgtagctgcacgtttgaaacgtgaactgctgaatgtgaaaggtgtatcggaagtaaacatcagccgtagtgattatcagccggagtatcaggtagacttcgatcgtgagaagctggctttgcacggactgaacctggcaactgcaggtaactatctgcgtaaccgtatcaatggtgccattgcctccaagtatcgtgaggatggagacgaatacgatatcaaagtgcgttatgcaccggagtatcgtaccagtattgaaagtatcgagaacattcttatttataacagtcgtggcgaagccgtacgtgtgaaagagttgggtaaagttgtcgagcgctttgctcctcctactatcgaacgtaaagaccgcgaacgcattgtgaccgtttcggctgttatctcgggcgaagcgttgggtaatgtagtgaatgcgggtaatgccatcatcgataagatggatattccgtcggacgtaacgattcaggtagccggttcgtacgaagaccagcaagattcgttccgcgacctgggtacgctggctattcttattgtggtactggtgtttattgtgatggcagcgcagttcgaatcattgacttatccattcatcatcatgttctcactgccgtttgccttcagtggagtgttgatggcgcttttctttacaaagagcacgctgagtgtaatgagcctcttgggagccatcatgttgatcggtatcgttgtaaagaatggtattgtacttatcgactacatcactctttgccgcgaacgtggactggctgtgctcaactctgtcgtaacagcaggtaagagccgtcttcgtccggtattgatgaccactgctactacagttctcggtatgatcccgatggcaattggtggtggacagggttcggagatgtggagcccgatggcgattgccgtaatcggtggtctgactgtttccactattctgactttggtcctgattcctactttgtactgcgtctttgccggtacaggtatcaagcatcagcgtaaggtattgagacggaaacgtgagctggaggcttactttgaagagcataaagatgaaatgattaagaaataataaagaagaaatcaagatatgaaatcagtattaatcacattcgatcaggcttattacgaacgtatcattgctttgctggaccgtttgggttgtcggggcttcacctatttggagcgtgtgcagggacgtggttcgaagaccggtgatccgcatttcggcagccacgcctggcctagtatgtgttcggccatcataacggtggtggatgacaagaaggtggacccgttgctggatgcgttgcatcggatggacatgcagacagaacagctcggtctgcgggcttttgtcactaacgtggagcgaagcatttaatcctttgcctacacagataacatcagaggagaatctgcgtgaatttcatgcagattctcctctctttttatgggttttatctatctttgcagcttcttattaaattaagagcgtgcatgaaaaattatttgaaatattcgttatggctgacattgatcgtcctgttcgcattaattggaatgcactggctgcctgctataacgatcgacggacatacgatgaggcgtgtcgatttgctgagtgatgtccgtatgcctgaacctgataaagatgaagtagtggcagacagtctgccgccggtcccggttgtgaaacctgcatttgtagatacgtgccgcagcggaatgacttgtatcgaagattatagtgactcgacgatgcgagggatgactcctttttatcgtgcgctggacgaaattcagtccaaaggtcgcttggtccgtatagctgtgttcggtgattcctttattgaggcggatattttcacagccgatctgcgcgagatgttgcagaagcgtttcggcggatgtggtgtaggctttgtcaccataacttcgatgaccagcggctatcgtccgacggtacgtcattcttttggcggatggtctagtcatgcagtgaccgacagtgtttactttgataaaaagaaacaaggtatttccgggcactattttgttccccgtgaaagagcttacgttgaacttcgcggacaaaataaatatgcttctttactcgatacctgccagatagcatccatctttttctataataagggcgaggtcaatctttctgtatgtgtcaaccgtggggaagctgaagcgcgggacttttctactactggtcgtttgcagcagatgaaagtgaatggtcgtatcggttcggtacgctgggatatcaatcgggcagattccactttgttctatggggtggcaatggacggcacacaaggagttgttgtcgacaacttctctttgcgtggtagttcaggactttcccttcgcagcataccatccaaaatgctgcaagagtttaatgcccagcggccttatgatttgattattctggaatatggactgaacgttgcaaccgaacgcggaagaaactacgacccttataagaaaggacttctcacagccattaaccacctgaaagaatgctttccgcaggccggttttcttttgttgagtgtgggcgatcgtgactataagactgataccggtgaactgcgaacaatgcccggagtgaagaatctgatccgctaccagcagaatatagcggcagagagtggtattgctttttggaacatgttcaaggctatgggaggagagggtagtatggccgggctggtgcatgccaagccctctttggctaattatgattatacacacatcaacttccggggtggacgtcacttggcaggactactatacgaaacattgatttatggaaaagaacagtatgaaaggagaaaggcctatgaggctgaatagatggctgggggtgttgatccttttgctttccggtgtttggtcggttcgggcacaggaccttttgccagcctgtccgcaggtggataaaggcacgaaggcttgtaagccgatgcgtgaaccgggatcattgggggatactgtttcggtaaaaattgtttttcccgtagctttcaaaggtgtagggaggaatgaggtcgtggatagtcttgggatactggctccggtgctcgaacatttgcggctggtgcaaaacgggagttcggaagatactgtgcgcattgttcatattggtgacagtcacattcgcgggcatatttttcctcgtactaccggtgcccgtctgaccgaaacattcggagcgatctcctatacggatatgggggtgaacggagccacttgcctgacttttacgcatcccgaccgtattgcagccattgcagccctgaaacccgaactattaatactttcgtttggaacgaacgaaagccataaccgaaaatacaattcgaatgtacattaccggcagatggaggaattgcttgaactgttgcgtgacagtctgcccgatgttcctatcctgatgactacgcctccgggatcttatgaaagtttccgtcaacgtcgtcggcgtcgcacatacgctattaatccccgaacggtaacggcagtgaacacgattcatgattttgcccgccgccataaactggtggtgtgggatatgtataatgttgtgggcggaagcctgcgcgcctgcaagaactggtcagacgcccaattaatgcgtccggatcacgtacattatctgcctgaaggctatacgcttcagggagaattattatatgaagccattattaaagcctataatgaatatgtttcccattgatattgatttcagccgcctgttggaggctttcaaatataatccggatgcgccgatgatattcagcagcggaatttttctttggctgttcgctgcgtttatggtaatctatacactgttgcaacatcgcaatacggcacggattctgtttgttgctcttttctcctattatttttattacaagagtagtggaacctattttttcctgttggccatcgttactgttaccgattttatgatagcctggctgatggatcgaaccgatgtccgctggaaacgtaagttttgtgtggtactcagtgtatcggtcaatttgggattactctgctactttaaatataccaattttctgggtggggtcattgcctcgctgatgggaggggagtttacggcacttgacatctttttgcctgtcggcatctcctttttcacattccagtcgttaagctacaccattgatgtctataggaaagagatcaaacctttgaccagtctgctggattatgccttttatgtctctttctttccacagttggtggccgggcccattgtccgggcacgtgattttattccgcaaattcgtaaaccgctctatgtgtcgcaggaaatgttcggcaggggtatctttcttattgtggcaggtttgttcaagaaagcggttatctccgattacataagtattaactttgttgagcgtatttttgataacccgacactctattcgggagtcgagaacctgatggggctttatggttatgctttgcagatttattgtgatttttcaggatatagtgatatggcaatcggcattgctcttttacttggtttccatttcaatctgaactttaattctccgtataaatcagcgtcgatcactgagttttggagacgttggcatatttctttgtcgagttggttacgcgactatctttatatttctttgggaggtaaccgtcacgggaagttccgtcaatacctcaatctgattattaccatgttccttggtggactatggcatggggcttcatggaattttgtgctttggggtacttttcacggagtggcgcttgctcttcataaagcatggatgtccattattgggcgtaaaaagggggagaccagtcacggtattcgccgggtattgggtgttatcattactttccactttgtctgcttttgttggattttcttccgtaatgctgactttcacaattcgatggacatgctgaatcagatttttactgctttccgtccacagcttttcccacaactgatagaagggtattggcgggtatttgcactgatggcagttggtttcctgctccattttgctccggatagttgggaaaatgccgtttgccgtggagtgatcaagcttcctttcttaggtaaagctattgtaatggtggctatgatttatctggtcatccagatgaagagcagtgagattcagccgttcatctatttccagttctagtagttatcgcctttacttcttgaaagtattttagcttattttgatcttgtcaatatgcaggaaagtcctagtgatgttgttatttattttgaatagaagaatgttattcctgagcaatattctggacgggaaacctgcaacaagagattctatgatcttgtcgttgttcaagatttccctctttgcagtaaaaaaaactctgaatatccgttgtcgtcacaggattttgaagcagagtaatcagtacatcaaccgtaactggcgtatggtggctgaaggtatccgtatggcacagtatttattttgcgtcttttttataaaagagttatattgataattatccggttagttgtaagttattgaggatttcgtataacgttgacggtgttcttccgaagcagtaataccgcaatcattagtggttatcttcactgggatcagtttacccatgcacaggattagctgctttttgaaaagaatatcggtgcttacgtctgtattgataaagttgccctttcgcgcggtgaactctccatactcagcaacaaggcttcccatggtggcaaaggcagtattgtcgccataataagaggtatggatatctatatggtaagctctgtgttattcagactgtcccgtcgtcgttatcaagtgcgtgacatcaaattggatatgactcccaatatggagcagattgttcgtagttgctttcctaccgccaaacgagttattgaccgtttccacaagaaactggcttatgaagctgttctggagactttagtagcacaaaaaaggacgaggcaaatgccccatcctaaatgttttcacaacggaatagtccttattgtgatttgcttcaaattagtgacccaaagataatgaataatttttattatcatgtttatttatggaaaaatattaatatatttggggtgttgtgataaaatgagttaagtatgaaaaggatattgggattggatttgggtactaatagtatcggttgggcattggtgaacgaggcggaaaataaagacgagagatcgtcaattgttaagcttggtgtgagagtaaatcctctgacagtagatgaattgaccaacttcgagaaaggaaagagtattacgactaacgcagatagaacacttaagagaggaatgaggcgtaatctacaacgttacaaacttcgtcgtgaaactttgacggaagtgttgaaagaacacaaattgataacagaagatacaatactttcggaaaatggtaaccgaacaacttttgagacataccgattaagggcgaaggcggtaacagaggaaatctcgttggaagagtttgcgcgtgtattgctcatgattaacaagaaacggggttataaaagtagcaggaaagcaaagggagtggaagaaggtacgttgattgacggtatggatatagctcgtgaactttataacaataaccttacacctggtgaattatgcctgcaacttcttgatgctggtaagaaatttttgcccgatttttatcgttctgatttgcagaatgaacttgacagaatttgggaaaaacaaaaagaatattatccggagattcttactgatgtattaaaagaagagttgagagggaaaaaacgtgatgctgtttgggctatttgtgccaaatatttcgtttggaaagaaaactatacggaatggaacaaagagaaaggcaaaacagaacaacaagaaagagaacataagttggaaggtatttatagtaaacggaaaagggatgaagcgaaaagagagaatctgcaatggcgggtaaatggtttgaaggaaaagttgtcgttggaacaattggttattgttttccaagaaatgaatacccaaatcaataactcaagcggttatctcggcgcaatcagtgataggagtaaggagttgtacttcaataaacagactgtcgggcagtatcaaatggaaatgctggataagaatcccaatgcgagcttgcgaaatatggtattctatcgccaagattatttggatgagtttaatatgctttgggaaaagcaagctgtatatcataaagaactgacagaggaactgaaaaaagaaatccgtgatattatcattttctatcaacgcagactgaagagtcagaaaggattaatcggtttttgcgagtttgaaagtcggcagatagaggtagatatagatggtaagaaaaagattaaaactgtaggtaatagggtgatatcccgttcttctcccttgtttcaagaatttaaaatatggcagatattaaacaatatagaagtaactgttgtcggaaagaaaaggaaacgaagaaaactgaaggagaattattctgctatttttgaggaacttaacgatgcggaacaattagaactgaatggtagccgtcgtttatgtcaagaagaaaaagaattgcttgcccaagaactttttgttcgtgataagatgacgaagtctgaggttttaaaattgttgtttgataatccacaagaattggatttaaattttaaaacgattgatggtaataaaacgggatatgcgttgtttcaggcctacagtaaaatgattgagatgtctgggcatgaaccagttgacttcaagaaaccggttgagaaggttgttgagtatataaaagcagtctttgatcttcttaattggaatacggacattctaggtttcaactcgaatgaagagttagacaatcagtcttattacaaactctggcatttattgtattcttttgagggggacaatacaccaacaggaaacggtcgtttgattcaaaagatgacagaactatatggctttgaaaaagaatatgctactatactagcaaatgtttcttttcaagatgattatggcagtctgagcgcgaaggctattcataagattctacctcatttgaaagaaggtaatcggtatgatgtggcttgtgtatatgccggatacaggcattcagaatcgtcattaaccagggaagagatagcaaataaggtgttgaaagacagacttatgcttcttcccaagaatagtttgcacaatcctgtggtggaaaagattctgaatcagatggtaaacgttattaatgtcattatagacatttacggtaaaccggatgaaatacgtgtagaacttgctcgtgagttgaagaagaatgccaaagagcgtgaagaactgactaaatctattgcacaaactaccaaagcgcatgaggaatataagacacttttacagactgagtttggtttaaccaatgtaagccgtactgatattttgcgttacaaactttacaaagagttagagtcgtgtgggtataaaacactttattctaatacgtatatttcacgagaaaaactgtttagtaaagaatttgatattgaacatatcattccgcaagcacggcttttcgatgatagtttttctaataaaacacttgaagctcgtagtgtaaatattgaaaaagggaataaaacagcgtatgattttgtgaaagaaaaatttggtgaaagcggagctgacaatagtttagaacactatttaaataatatcgaagacttgtttaagtcggggaaaatatcgaaaacaaaatacaataaactgaaaatggctgagcaggatattcctgacggctttattgaacgtgacctacgtaatacgcagtatattgccaaaaaggctttgtccatgttgaatgaaatttcgcatcgtgtggttgctacaagtggatcagtaactgacaagttgcgtgaagattggcaattgattgatgtgatgaaagaattgaactgggaaaagtataaggcattaggtctggttgaatattttgaagatagagatggaaggcaaataggtagaatcaaggattggacgaaacggaatgatcatcgtcatcatgcgatggatgcgttgacggtagcatttacaaaggatgtattcattcagtattttaataacaaaaatgccagtctggatcctaatgcaaatgagcatgcaataaagaacaaatattttcaaaatggcagagcgattgcgcccatgccattgagagagtttcgcgcagaagctaaaaagcatctggaaaatactttgatttcgattaaagcgaagaacaaggtcattacgggtaatattaacaagacaaggaaaaagggtggcgtgaacaagaatatgcaacagacaccacgtgggcagttgcatttagaaacaatctatggtagtggcaagcaatatctgacaaaagaagaaaaggttaatgcttcgtttgatatgagaaaaattggaactgtaagcaagtcagcttatagggatgcattgttgaaacgtttgtatgaaaatgataatgatccgaagaaagcgtttgccggtaagaattcgctggataaacagcccatatggttagataaggaacaaatgaggaaagtgcctgaaaaagtgaaaattgtaacacttgaagcgatttatactatacgtaaggaagtctctcctgatttaaaagttgataaggtaatagatgtaggtgtccgtaaaatactaattgacagattaaacgagtatggcaatgatgcaaaaaaagcattctccaatcttgataaaaatcctatttggctgaataaagagaaaggtatatctattaagcgagttacaatttcaggaatcagtaatgcgcagtcattacatgtgaaaaaggataaggacggtaaacctatattggatgagaatggtagaaatattcctgtggattttgttaatacaggcaataatcatcatgtggcagtttattatagaccagttatagataagaggggacaattagtggttgacgaagctggcaatcccaagtatgaactggaggaagttgtggttagtttctttgaagcagtgacaagggcaaatcttggtctgccgattattgacaaggattataaaacgactgaaggctggcaattccttttcagtatgaaacaaaacgagtattttgtttttccaaatgaaaagattggatttaatccgaaagagatcgatttacttgatgtggagaattatgggttgataagtcctaatttgtttagggtacagaaattctctcttaagaattatgtttttagacaccatttagaaacaacaattaaggatacaagttctattttgagaggtattacatggatagattttcgtagctcaaaaggcctggacactattgttaaagtccgtgttaatcacatcggccagatagtgtcggtaggagaatattaatataatgaatgacttatggacaaaaacaataataatcctccaattccatctgatttctttctctataaaaacagcaatggagaggtgaaagtcgaaatctatatttttaatgagatggtttggctaccgcaagacaagatcgcacaattgtttggagtggacagaagcatagtaactaaacatctgaagaatgtatataaaagcggggaattatcaaaaggggtaacttgtgcaatttttgcacaagttcaaatcgaaggcacaaggcaggtcacaagacagattgagttttacaatctcgacgctatcttatccgtaggctaccgtgtcaacagtattcaagccacacaatttggaatttgggcgaacagtgtgctgaaagaatatctgattaaggggggtgccatgaacgatgagcgattgaagaatccgcaaatattgtttggtaaggattatttcgaagaacagttagcccgtattcgtgacattcgtggcaacgaacaacgcttctatcagaaaataaccgatatttattcgtaatgcagtgccgactatgaagcgggtagcgatgttactaagaagttttttgcaattgttcagaataagttgcattgggcaatttccaggcaaacggcggttgagattattgtttctcgtgtggacgctgataagcctaatatggcattaactacttggaagaatgcacccaacggaatgatacgcaatccggatgtttctattgcaaagaactatctcaatgaaatggaaatggatgatttgaaccgcattgtttcgatgtatttggattatgcggagcgtcaagcaaaaaaaaggacaagtgatgtacacgagagattgggtgaaaaagttggacgcatttttgcagttcaacgaataagccgtcctacaacatagcggacgggtgagctatgagattgccaaggcattagcggaacaggaatatgacaaattctatgttagacaacttcagagctacaaattgaactttgacaaacttttaaaaggaatgagtcatgattaagaaaacactttatttcggaaatccggtttatctatcgttacgaaatgcgcagctagttattaaacttcctgatgtagaaaaagcaacggttttgccggaaacgttgaaaaagcaggcggaagtaacgaaacctatagaggatattggaatcgttgtgttggataacaagcagataactatcacttccggtgtgctggaggctttgcttgagaacaactgttccgtaatcacttgtgatagcaggagtatgccagtcggattaatgcttcctctttatggaaatactacgcagaatgagcgttttcgtaaacaattggatacttcgcttcctttgaagaaacaactctggcaacaaactattcaagcgaaaatcaacaatcaggcatctgtgcttaaagattgtatggacgaggaagtaaagtgtatgcgtatttgggctaccaatgtgcgtagtggcgatcctgacaatttggaagcacgcgctgctgcatattattggaagtctttattctcagatgttgatagtttcactcgggaacgtgagggaattcctcccaacaacttgttaaactatggatatgccattcttcgtgcggtggtggcgcgtgggttggtaataagcgggttgcttcctacgttgggtatccatcatcacaatcgctacaacgcttattgtttggcggacgatataatggaaccttatcgtccttatgtggatgaattagtgtttagtttgatacaagagtatggaaaaaatgcggagttgacaaaagagatgaaaactcgattactgactgttccgacattagaagtgataattggaggtaagcgcagtccgttgatggttgcggtagggcaaactactgcttcactttataaatgtttcaatggagagcttcggagaatttcctatcccgaacgatagattatggatcgttttaatgaatatcgtattatgtgggtgcttgttctttttgatttgccaactgagactaagaaagaaaaaaaggcttatgccgatttcagaaagaatctacaaaaggatggttttacgatgtttcagttttccatttatgtgcgtcattgtggcagtagtgagaatgcagcagtacatataaaaagagttaaatcatttctcccagaatttgggcatgtcggaatcatgtgtattacagataaacaatttggagatatagagcttttttatggaaagaaagtgcaagatgtcaatacgccgggacagcaattggagttgttctagaacacaaaatctcgcattaatgcgagattttgtgttggaaacagtcttctttttctttgttctaatttactcttaacttattgaagaacaatatgttatgtgaaatctgctgtttccaatggttcaaagatactaatttgaaagcaaatcacaactctgttaaccttgctaaaatcggaggtaggctgtttccaatggttcaaagatactaatttgaaagcaaatcacaacattccggataaaggtaaactgattgattgagctgtttccaatggttcaaagatactaatttgaaagcaaatcacaacatgtttgatgtgaatggagaaagatatgtagctgtttccaatggttcaaagatactaatttgaaagcaaatcacaactatgtcatcctgcatattatagttgcttgcgctgtttccaatggttcaaagatactaatttgaaagcaaatcacaacagaactggccaaattgaagttggtaatatcgctgtttccaatggttcaaagatactaatttgaaagcaaatcacaacatgttcaaattccatatacaccagaatttagctgtttccaatggttcaaagatactaatttgaaagcaaatcacaacatcccagacatcgctaattctattggctcgctgtttccaatggttcaaagatactaatttgaaagcaaatcacaacttcggataaaagtgttaggacttcgtacctgctgtttccaatggttcaaagatactaatttgaaagcaaatcacaactatgattcgtatgtacttacaataggaaacgctgtttccaatggttcaaagatactaatttgaaagcaaatcacaacccgtccgtggagttcggcggttgttacggtgctgtttccaatggttcaaagatactaatttgaaagcaaatcacaacttctacgggactccttcatacattgatccgctgttcccaatggttcaaagatactaatttgaaagtaaatcataacgcatcgctttgtcttcatcagatagtatatgctgtttatgatggtgtagataataattaaaaagtactctacttagtaattgaaaagtatgctactaagtgtatctgattagacggtttaaatatagttaccattagaaactgtttcgaattgtgaataaccatttaatagattgtttatcggtttgttaattggataatattttgtaatttgtcctttggtctttaacagtaagctcctcccgcttccattcccaaccttgcttttaaaaatcccctgcccccatgcttgtcctaatcgcaactatccctttccatccgccacttatcccttttcccataaaatacccccttttttctctattttcttcattctcaatcctttttctcctcttgtttcctctcttcctattacttgatttaacacactgttaaatcaagtcttttgttttcaaagaacaagtcttttagaagcaaaagctttgttctttccatccctgaaataaaagtctttcccaccgcattaacaatgttaacgcaggattccgttccattcttgtttgatttgggtttgattcctgtctgatccctgctcaattttcattcaattcccgttcagtcctcgtctgatttcccgtccaactcccgtcaattccctacctgtttttcagtttatctccctccaaatcccaattccttccgcgattttcctcctcgaaacatcccttttcctccccgaaatgtccctttcccttccctttctcggcaaatacccctccctttcgcatccaatcttcttttccctctcccctataaatttcccctatataatataataatgtgtatctttccttccccgaccttttcctttcccataatcaattatcagaaccttcctctccctcaggtctttacgtttttattcaaaatattttcaaaaaaatccccttttatatttgtctcttatctcctaatgccttacttttgcacccgctttccaagagacggacagcatttaattttgacatgttgcaacggcgtaggatctgccttacagaataacaaaaataatttcctttttatttggatcattattataaaagtcgttatctttgcagtccgattcgcagagcgagggtctttgtccgacacttctttccctttcgcacagagaggcttggaaataaaagacgggcattgagaaaaaaacttcccaaaacatttggcagtttaaaataaaccccttacctttgcacccgcttttgagacgaagcagaaattaaaaaagaagagttctttgaaaaattgataaacaatacaagtagtacaagtcaaatttagaaccgtcaatacttattatataggtatgtaaaaatgaccgtcaataaattttcgacatcctgaacagagctaatatcatcccttatgggatatataacaatacttttacaatgaagagtttgatcctggctcaggatgaacgctagctacaggcttaacacatgcaagtcgaggggcatcaggaagaaagcttgctttctttgctggcgaccggcgcacgggtgagtaacacgtatccaacctgccctttactcggggatagcctttcgaaagaaagattaatacccgatggcataatgattccgcatggtttcattattaaaggattccggtaaaggatggggatgcgttccattaggttgttggtgaggtaacggctcaccaagccttcgatggataggggttctgagaggaaggtcccccacattggaactgagacacggtccaaactcctacgggaggcagcagtgaggaatattggtcaatgggcggtagcctgaaccagccaagtagcgtgaaggatgaaggctctatgggtcgtaaacttcttttatataagaataaagtgcagtatgtatactgttttgtatgtattatatgaataaggatcggctaactccgtgccagcagccgcggtaatacggaggatccgagcgttatccggatttattgggtttaaagggagcgtaggtggactggtaagtcagttgtgaaagtttgcggctcaaccgtaaaattgcagttgatactgtcagtcttgagtacagtagaggtgggcggaattcgtggtgtagcggtgaaatgcttagatatcacgaagaactccgattgcgaaggcagctcactggactgcaactgacactgatgctcgaaagtgtgggtatcaaacaggattagataccctggtagtccacacagtaaacgatgaatactcgctgtttgcgatatacagtaagcggccaagcgaaagcattaagtattccacctggggagtacgccggcaacggtgaaactcaaaggaattgacgggggcccgcacaagcggaggaacatgtggtttaattcgatgatacgcgaggaaccttacccgggcttaaattgcagtggaatgatgtggaaacatgtcagtgagcaatcaccgctgtgaaggtgctgcatggttgtcgtcagctcgtgccgtgaggtgtcggcttaagtgccataacgagcgcaacccttatcttcagttactaacaggtcatgctgaggactctggagagactgccgtcgtaagatgtgaggaaggtggggatgacgtcaaatcagcacggcccttacgtccggggctacacacgtgttacaatggggggtacagaaggcagctagcgggtgaccgtatgctaatcccaaaatcctctctcagttcggatcgaagtctgcaacccgacttcgtgaagctggattcgctagtaatcgcgcatcagccacggcgcggtgaatacgttcccgggccttgtacacaccgcccgtcaagccatgggagccgggggtacctgaagtacgtaaccgcaaggatcgtcctagggtaaaactggtgactggggctaagtcgtaacaaggtagccgtaccggaaggtgcggctggaacacctcctttctggagcgatgttgaaaacgacgttcattggttctaaaattgtactactggtacttgtttatttatagaatatagatcaaccatctatagcaatatagatagagataaacaagagaaaaacagaagccgagtctaaaacaggacacggttgaactagtcctatagctcagttggttagagcgctacactgataatgtagaggtcggcagttcaactctgcctgggactaccaacagatagatattttatcttgtatgattgggggattagctcagctggctagagcatctgccttgcacgcagagggtcaacggttcgaatccgttattctccacaattgatactccgacaatgtaaattgcggaatgtaatcaaacgatctttgacatgatgtacagaaaaaagtaaatttagtaagagctaaaagtatatatcgaaccattgggttcatctcctttcaaaggaaatgatccctggcgataaaagaaagtaaataagggcgcatggcggatgccttggctctcggaggcgatgaaggacgtgataagctgcgataagcttcgggtaggtgcaaatgacctttgatccgaagatttccgaatgggacaacccggcattctgaaggaatgtcatccaacctggttggaggctaacgcagggaactgaaacatcttagtacctgcaggaaaagaaaataaataatgattcccctagtagtggcgagcgaacggggattagcccaaaccacccatgttacggcatgtgtggggttgtaggaccacgctctcgcaagacagttattgagaagaaacgactggaaagtcgtgccatagacggtgatagcccggtattctaaggtaaccgaagcgtagtggtatcctgagtagcgcggagcacgaggaattctgcgtgaatcagccgggaccatccggtaaggctaaatactcccgagagaccgatagcgaaccagtactgtgaaggaaaggtgaaaagcacttcgaatagaagagtgaaatagtccctgaaaccatgcgcctacaagcggtcggagcagcttaagctgtgacggcgtgccttttgcataatgaacctacgagttactttttccggcaaggttaagcatcttgagatgtggatccgaagcgaaagcgagtctgaacagggcggatagtcggaaggagtagacgcgaaaccaagtgatctacccttgggcaggttgaaggttaggtaacactaactggaggaccgaaccgataagcgttgaaaagcttccggatgacctgagggtgggggtgaaaggctaatcaaacttggagatagctcgtactccccgaaatgcatttaggtgcagccttgagagttactaatgtgaggtagagcgactgataagatgcgagggcttcaccgcctatcaagtcttgataaactccgaatgcgcattagttctatctcaggagtgagggcatgggtgctaaggtccatgtcctaaaggagaagaatccagaccatcagctaaggtccccaaataaacactaagttgaactaacgaagtcagattgctaagacagctaggatgttggcttggaagcagccattcatttaaagagtgcgtaacagctcactagtcgaggagtttggcgtggataataatcgggcataagtgttttaccgaagctatgggatacgtaagtatcggtaggggagcattccactcggcgttgaaggcgaagcgtgagctttactggagcgtgtggaaaagcaaatgtaggtataagtaacgataaagggggtgagaaaccccctcgccgcaagactaaggtttcctgatcaacgctaatcggatcagggttagtcgggtcctaaggctcagccgaacggtgaggccgatggcagaacaggttaatattcctgtactacctgtaggagtgacgtggagacggaggagtgacaacgccgcggactgacggaatagtccgttaaagggtgtagatgttgattatcccaggcaaatccgggataagagtcgaacctgacagtataccaatttccccggaaaacggtaatagtgcgtgtaaacatactcccaagaaaatccgctaaacttaatcttacaggtacccgtaccgtaaacggacacacgtagtcgggttgaatatactcaggcgcttgagtgaatcacggttaaggaactaggcaaattgaccctgtaacttcgggataaagggtccctacccggtgacgggagggcgcagagaataggtccaggcaactgtttaacaaaaacacagggctgtgcaaaattgaaagatcacgtatacagcctgacacctgcccggtgctggaaggttaagaggagatgtcatcgcaagagaagcattgaattgaagccccagtaaacggcggccgtaactataacggtcctaaggtagcgaaattccttgtcgggtaagttccgacctgcacgaatggtgtaatgatctggacactgtctcaaccgtgagctcagtgaaattgtagtatcggtgaagatgccgattacccgcgatgggacgaaaagaccccgtgaacctttactatagcttaacattgaatttgggtaattgatgtgtaggataggccggagactttgaagcaggcacgccagtgtttgtggagtcgctgttgaaatacggccctttggttatttgagttctaactcgctggtgcgaggacactgtttggtgggtagtttgactggggtggtcgcctccaaaagcgtaacggaggcttctaaaggtgccctcacgccgattggtaaccggcggtagagtgtaatggcataagggcgcttgactgggagacttacaagtcgatcaggtaggaaactagagcatagtgatccggtgtttccgtatggaagggacatcgctcaaaggataaaaggtactccggggataacaggctgatccctcccaagagctcatatcgacggaggggtttggcacctcgatgtcggctcgtcacatcctggggctggagaaggtcccaagggttgggctgttcgcccattaaagtggcacgcgagctgggttcagaacgtcgtgagacagttcggtctctatctatcgtgggcgtatgaaatttgcgtggctctgacactagtacgagaggaccgtgttggactgacctctggtttaccggttgtgccgccaggtgcattgccgggtatctaagtcgggattggataagtgctgaaagcatctaagtacgaagccagccacaagattagatttctttcagggtcgttgtagactacaacgttgataggacgcaggtgtacaggtggtaacatcacagccgagcgttactaattgcccgatgactttcttttatccgccttcaatggtttatatatccgtttagcttcactatttatataatagaccgctgaatttacttttgtacattatgtctgccttattcaggtgactatagcatcagggttccacctcttcccattccgaacagagaagttaagcctgatcacgccgatggtactgcgtaacagtgggagagtaggtagtcgccgtttttttcagatggttcatccccttcggtcgaaagaccggaggggatgacttgttttatacaggggggaaggaaagggagcgccgggctgccctccggataacactttcttaatggagatggctatgggaaatccgatagccttttcttgtcct

SEQ ID NO: 2113 - DNA, 24311 bp, synthetic construct
  source 1..24311: mol_type = other DNA
  misc_feature 1..24311: note = Synthetic
ggcgcagaaatagaaataattatgtttctccgcgttcaggacggcgtcgattgccgctatcgagggtatgcatataggtcccggcggcaaacctgcgtatttgtaggtgttgtatggcgaatcaatctttttgtgcacgtcaaggacgcgcctgatgctgtagtcgcccaaggcgtaaatgagtgtcggatcggcttgtaacggccagcgttttcgcagacggttgagatatacgcctgctattgtgggcatttccgagaccttggtcgtctctttgtcaatgattgacgctaagatgctgacttgccgaggcgtcagtttgatgtcgttggctttcgtcagtcgtttctcgttccaaaaacgattatgttctgccaccattttttcgatgaaatcatcggcatctgtattccaataaaactcgtaagtgtttggtataaaagtagttgcatcaacatcagcattgttattgatagccgtgataattgataatgagtcggcctctatctgctcgcctatgcgtcccgcaagctgctcaacggtgcgaatattgtgaaacctgactttcacaggcgtttggtatcccattcgtaacatgttgattagctgttggttactcatcccgtcagtcaagacatatctgcctggatgcacattctcactataatgtgatttttttgcgagccactcgaaggcatttttgtttttaagtacttcaagcgacgataactcatttataacatattgataatcagagcctgtcgggatataaagcgacacatcttttccttctgccgtttgtatgataggtcttgagatataaagataatttcttgcataaaaagcacatacggcacaggctatcaccaaaactatcattatgacaatgcgcagcttgccattttttctctttcggtcgcgatatgttttatagcctctcattttttgttaatatattgatattcaacctgatcgataaatccctgtgatgttttataccattgtcttttaagtccgcaccgctcgaatcccagcgactcgaacaagatgttgctttccacattcgttgccaaagtcaagacatatatctgattgagtaacaatgtgttaaaacaataatccaaaagtaatgttattgcgtttttagcatatcctttgccccgatatttcttgtctatcaaaataccgaaaccggcgcgtgagttgaactcgtcgtagtcatagatgtcgatgcaacctacagagtcgttggtttttgcgtcttcaacaatgaaacggagttgtcgctcactcatcaagtcattgttattcaataaaaacgccttgatttgatgcaacgagaaggggacgcgtgtctcgctgtcgcgccacacctgcatgtcgttttcccaattgcatattttgtcggcatcatcgggttccgccatgcgcaaagataccatgtcattgtttataaacatcattttgcaaagatacaaaatccgtcgaaaacatgagtcgccggacctgataatattatgttttttattgatttaccaaacaattcaagcctcacattaagggttgctatagtcgttttgatgtcaatattgttgccgccgtaccacaatgccgccgctatcgcagaggctgtcacaccggtgccgcatgccaaagtctcatcttctacgccacgctcaaaagttcttatataatattgattgtcaatcacttccataaaatcgacattgagaccgtctgcggagatggtcttgtcgtttctgattgcggcaccatattttctaacatcatagtttttcagattcccgactctggtgacataatgcggtgagcctgtgtcgattatgagccgttcatcgctcaaatcatagttcccgatgtcgcgcatcgtgacggacaccatgtattctttgtctgaatttttagtcacaagagctttatgcaagccatcaacagcctcatattcaatattttgcgatgccaatccttcttcgacggcgaaagctgccacacatcggccaccattgccgcagaaagtactctcgtgcccgtcgcagttgtaatatttcatcctgaaatcatgtttttcggacggcaaaaccatgattaatccgtcggcacccacgccggttcgtcggtcacaaatcgccttcacctcatcatccgacaaaatgacaggcttttccacagcgtttatcatgacaaaatcgttgcccgcgccatgatatttgctaaatttaattccttgataatcagtattttgcataatatttaccaaataattcgccaatgactgaagtttggcaagaattttgttgtaaaaatagtataaatttttgagaaacgatacaagaatcttaaaaatttagcgttaaaatgaaaataacactaaaactcagtaaaatgaaaaggttttttttgataatcggaataatgtgtatggctctcactttgagggctcaggttgattttacggaagctgcggagaaatctataaatacggtggttcacattcgcgcggaaatcgtgacaagaggcaacagctactatgattttttcgggccattgctcgagcaaatatatggcggaaggatacaagtgcctgacaatgtgtcagttggtttcggttccggcgtggttatttctccagacggatacatagtcacaaacaaccacgtggtggaaaacgcaagaaaaatagaggtcacgtttaacgacaagcacaagagggaggcgacgataataggctccgacccgaccaccgacatcgcgcttatcaaggtggaggccgacaatcttgaatatctctctttcggcgattccgacaaggtgagaattggcgagtgggtgcttgccgtcggtaaccctttcaacctgacatccactgtcacggccggcattgtgagtgccaaagcacggaatatcaacattttaggtgaaggaaccatagagtcgttcatccaaaccgacgctgccgtaaatcctggaaacagtggcggcgcattggtgaacactaaaggcgacttgattggaatcaacgccgcaatagcctcacgcacaggcagttatgaaggatattctttcgcgataccatcaaatatcgcaaagaaggtggtcgaggatttcttgatatacggctctttgcaacgcgcctatctcggcatctcaatgatggagataaccgaagagttgggcgattacaagggtcttgactatttgtcaggtgtttacgtggctgaggtcttcgacggtggcgcggcacagaaagcaggcatcaaaagagatgacattatcttgagtatcaatgggttgaccatagatacacgcgcacagctgatgggcactctggggcaatatcgtccgggcgacgtcgtggatgttaaaataaaacgcggagaaaaagaaaaggttattaaggttactctgacgagttatctgcaatgataaaaaacaatggttatgagacagctaaagatttcaaaatcaataactaatcgggaacagggtgcgcttgacaaataccttgccgacatcgccaaagagccgatgataaccccggaggaggaggtcgaactcgcccaaaagataaaaatgggagaccagatagctcttgacaaattggtcagagctaatctgcgttttgttgtatctgtcgcaaaacaatatcaaaaccaaggacttagcctcgccgatttgattaatgaaggcaacgtggggcttatcaaggcggctcaacgtttcgatgagacgaaaggcttcaaattcatatcatacgctgtctggtggattcgtcaggccattttgcaggcagtagccgagcagtcaagaatggtgcgtctgccactgaatcaagtgggtttcattggtcgcgtgaaaaaaaccgtgtcatatcttgaacagctttaccagcgtaaaccgaccattaaggaaatagccgacgaacttgacatgactgaagagaaaatcgaggccatactgaaaataagctccaaagaagtgtcaatggacgcccccgtcagcgatgacgacgacctgacattcatcgacaccttggtgcctgaagacaactacgataccgacaaacagctgatttcccaaatggagtcagatgagataaaacgctcattatcaatactttctgaaaaagaaagaaacgtgataatttattatttcggtctcgattcaaacgagcatccatacaccttggaggaaatcggctatatgttggacatgacacgtgaacgcgtgcggcaggtaaaagacaaggctctcaagaaactgaggtcccgttctaaaaaaagtttgcagaatgtgctaaacgatgactaaaaattcgtatttttgcgccttattatcgaaaatatttcactatgaataaaaactcggttattggaattatccttattattggaatttttatcggatggtttgtctggatgacaccgtcgaaggaagagatagaaagacagaaacatgtccaagactctatatatcaagcaaatagagcgcgttacattcaagattcgatacgttttgcggaagctcaaaaggccgtcgagcaacagacggtggcacaaaacgagaatgttgagatgacggatgccgtcctgcgcgacaaatatggggttttcacctcagcgacaaaaggcgaggagaagattctcaccatcgaaaacgacgtcttgaagatgacacttacctcgaaaggcgcattcgtcaagaaagtggagctgaaagactacaagacgtgggactcgctgccgctcataagttttgacgagaacaccacaaagttcaatctttcgttttttgcctcaaacagaaacatcaacaccctcgacttgtactttgagccgtatatcaacggcttgaaatattacggtgacggcgacatagtggtgatggacaacccgttgattatcagcttcaaagccttcactgacaatctgtcagatgagctgaatccgaatcaatacattgagtttacatataccgtcacgaaggacgaatatatggtcgattttgatgtcaagacggtgaatatgagaaatatcatcgcctcgaacaccaatttcgtcaccatcgactggtatgttgaccttttgaaacaagagaaggccgttgaccgttacaacggttccaatgtttactacagatattccaatggcgatgtcgagtcgttgagcggtgacagaggaggggagaaagacggcgagaaagacattcgctccaacctgaagtggctgtcgttcaagcagcgtttcttcagctatgcattgatagccaaggacaatttaagctcggcagtggtgggcatgaagactgatgtgagaacaaaaaatccacgttatctcaagacaatgtatgcaaccgtagatgtcccgtttgacggtttcagcgagaccaatgagatgccgatgcagttctattttggtcctaacagcttgaaaatcatggacaaatacggcatcggtcttgacaagcagatacctctcggcggtaagctcgtcggatggattaacagatacctcgtcgtcaatgtgttcaactggctcggcagctatggctggaactacggtatcgtgattctggtgctgaccatcatcataaagctgtgtctgatgccgtttgcatacaaatcgtaccagtcgtcggctaagatgcgtgtgttgaagcctgaaatcgatgccatcaacgagaaatatccgaaagaagaagacgcgatgaagaaacagcaggcggtgatggacctctacaagaaagcaggtgccagtccgacatcgggttgcttgccgatgttgctgcagttgccaatattgtgggctgtgttccgtttcttcccagcgagtatagagctccgtcagcagccgttcctctgggccgacgacctctcgacatacgacagcatcctcgacctcggatttaccatcccgttctacggcgaccatgtgagcttgttcaccttgctgatgacagtcacgacgatactgtacacctatatcaacaacaagcagatggcatcgaccaaccagcagggcatgaagggaatgaaggttatgatgtacatcatgccgataatgttcctcggcttgttcaacagttattcggcaggcttgagctattattatatgttggtgaatatcatcactttcctgcagatgtacctcttcagagtgtttacaaatgaggagaagcttcgcaagaaaatcgagatggcgaaacagaaaccggtgaagaaatcggcattccagaagcgactcgaagaaatgcagaaacagcaacaacaaatgcaacgcaaacgttagtgttatcagatagaatatacatcatcgggtatatgtgttccgggaagtcgtcgatttcacggaagctggcgacgcgattaggttatgaaccatacgacaccgatgatttgttcgaggagaaatatcatatctccgtgcaggatttcttcgataaatatggtgaagactattttcgcaaatttgaatccgagatattgaaaaatacaggtgagatgcaccatgtggtgatttccactggtggcggcacgccttgtttttttgataacatgcagtggatgaaagacaacggcacgacgatattcgtgaaagtgagcccgctgacagcgttccatcgtatcctgaatgcgaaacgcaaacgcccgttggtgtatggaaaatcggaggaagaattgtgccaatatgttgaaaatcattacaattcacgactgccatattatgagcaggctgattttaccgttaaaggcgagaatttgaatatcgacgagataatcaattatttatcgcagctctaacagcaccacattttcgacatgttgagtgtgcgggaacatatccaccggttgcacggctttgacagcgtagaactcgtcaagtagttgtaagtcacgggcttgcgtggcagggttacagctcacatatacaatttttttggctttaatcttcttgagctgttcgatgactttgtccgccatgccagcgcgcggaggatccgtcacgatgaaatcgggcttgccgtgctcagtgatgaactcgtcggtgagcaccttcgccatgtcgccggcaaagaaactcgtgttcgttatattattgaactgcccattgacttttgcgtcctcgatagcctcctcaacatattcaatgcccaccacccgtttcacgaaacgggagaaatacaaggctatggtgccggtgccagtgtagaggtcatacatcagctcgtcgccctgcacgtcggcgaggtcgaaagccgctttgtaaagcctttcagcctgatacacattggtttggaagaacgacaccggtcccacacggaacttcaggtcgtcgaatcccggaagcggcgactgcatagtctcaaccagatacggctcacctttgaggcactcgaacggcaaatcggatattgtgtcgttgaacttgctgttgatgacgagcatcagcgagatgatttgcgggaacttctccgatagggcgggcatgagttcatttctcacgacctcgttttcctcatttatcaccatgatgaccataaactcgcctttgccgttgcagcgaatgatgacgttgcgcatggtgccgacgtgagccttcacattatggtatgaaagcttgtgtctcattgtgaagtccttgataaacaatcgaatatcattcgatgggtcggcttggaggtagcatttctcgatgtcgatgacacggtcgaagaggccgggcagatggtagccgaaacctttgcagtcttcctcaccataggtgccggcaggggcgccgtcggtgagccatttacgatttgagaagctgtattctaacttgttgcgatagaaaaactgtttctcgcagcccaaaataggcatcatctcagggtattcaatcttcccgatgcggtcgaagttgtcttttatctgtttctgtttgtaatacagttgccattgatagtcaaggtgttgccatttacagccgccgcagagtccgaagtgttggcagacgggtctcacacgtttgtcggattcttttttgatattgagaatctttccgtcgaaacaattggatttcttcttaaatacttgaatgtcaacgacatcaccaggtgtgccgaaagggatgaacaccactttctcgtcaggcttggcgatactcatgccctcggagccggcgtcgatgatttctacatcttcgatatatagaggttgcctattttttttcatgccgcaaaaatacgaaaaagactttagagtttagaggtcagactttagattttttgataatgacataaaacttttttgtaaatttgcgaaaaaattgtcaccatgaagattccgaacattaaatccgcgcgtgaggccgatgcctataccattgatactgagcctgtttcgtctgtcgatttgatggaacgcgccgccacacagatttatttctggctgatgaggaaaataaaatcaaaggaagtgtcgataaaaattttctgcggcatgggcaacaatggtggcgacgggcttgccttggcgcggcttctcgccacgcaagacatttacgctcaagtgtttatcgcccatgttagtgagcgtttcagtgacgattgcgaggctaattacgaacgtctgaaagagattcccgaggtcccgatgtttggcatcttctctaaagacgattttccgaaaatctcggataatgacattgtgatcgacgctttgttcggctccggactgtcgcggccattagaaggtttggcggctgatatgattagtcatattaatgataatcaagctattagaatcgcaattgacatagcgtcagggttaaacggcgatgctgtcaatgcgggcagcgtcattttcaaacccgattacaccctgtcgatgcagtttccgaagatggcgtttttttatcccgagaacgagccttttgtgggtaaatgggaagtcctcgacataaaaatccatcctgatttcattgagaaagtggagacgcaaaatttttacaccacggcagatgtcgtaatgccattgctgcataaacgcggaaagcattcacacaaaggcacttacggacacgccttgttgattgccggctccaccggcaagacaggtgccgcgcttctcgcctccgaagcatgtatgcggtcgggtgtcgggctgttgacgacacatctgccgaaagcggcgacgctgccattgcagatttatcttccggaagccatgacaagccttgatgaatcggaaaactgtttctcgcaagtgccagatttacagtcatttaacgcgataggagctggtccgggtcttgggaaagccgatgagacagccaaggccttgaaacgtctgattcaagatgtaaaagtaccgttagtgcttgatgctgacgcattgaatatcatctctgaaaacaagacgtggcttgcgtttttgcctgagcgcacgattataacgccgcatccgaaggagttcgagcgtttgttcgggaagaccgataactctatgcaacgtattgagcttcaacgagaaatgtcgcaaagatacaacattataatcgttttgaaaggagccaacacctcaataacattccccaacggggcatgtttcttcaactctaccggcaatcccggcatggcgacggcaggcagcggcgatgtcttgacgggcatcattttgtcgcttttagcgcaacgttatacacccgaagaggcagcagttatcggcgttttcatgcacggcagggcaggcgacaaggcagcggaaatgaggggaatggagagtgtgattgcgagggatattgtgaaggctttagactttagaccttagagtaaaagagcccccgttgaggacgagggcggccttaatgttttcacaacggaataatccttattgtgaattgcttcaaaatttgttctgcaaaaatacaatattttttttatatattttgaaaatatataacttttttttatttttgtgctttgaaatcatacactaaagcacatgaaaaaaattctgggattagacctcggcaccaacagcatcggctgggcggtggtgaatgaagctgaaaatgctgacgaacaatcgtctatcgtaaaactgggagttagggtaaatccgctcactgttgacgaactgactaattttgaaaaaggcaaaagcattacaactaatgccgaccgcactctcaaacgcagtatgcgtcgcaatttgcaacgctataagctgcgtcgtgaaaacttaattaagattctgaaatccagtggttttatctctaacgacaccattttatcggaaaatggcaatcgcacaacctttgagacataccgattgcgtgcaaaggctgccactgacgagatttcgttggaggaatttgcgcgtgtgcttttgcaaatcaacaagaaacgtggctacaagagcagccgaaaggcgaaatcgaccgaggaggggcaactgattgacggcatggaggttgccaaacgcctttacaacgagaatttgatgcccggtcagttgtcgctggagttgcttaaaggtggcaaaaagtatcttcccgatttctaccgttccgatttgcaggctgagttcgacaaggtttggaacatacagaagcatttttatcccgaccagctcactgacggactgaaagacgaattgcaaggaaagaacaaaagccagacatgggcgatttgcgccaaaccattcggcattgtcggcatcaaacgcactacaaaaggctttgagcagaagattgaaaatttccaatggcgttgcaaggctctttccgaacaacttggattggaggaattggctatcgtacttcaagaaatcaacggccaaatcagcaatgcaagcggttatctcggcaacatcagcgaccgaagcaaggaactatatttcaatcatcagacagtcggtcaataccaaatggcgcagttggacaagaatccgaactacagcctgaagaatcaggtcttctatcggcaggactacctcaacgagtttgagaccatctgggaaacgcaggctagatttcataaggagttgaccgccgaactcaagaaagagattcgcgatgtggtgattttctaccagcgtccgctcaagtcgcaaaagggattgatttcgttctgcgagttcgagagccggcaaatagaagtggaagtcgatggcaagaagagacagaaaaccatcggattgcgtgtctgcccaaagtcatcgccgttgttccaagagttcaagatttggcagcggctgaatgacgttgaagtgtcgggaatgataatacctaatcagcaacaggacctatttggatactccaaagactataattatggcaagcgctggttgttgcctgaagaaaaagagcttctttttgccgagttgaactacaaagagaaattgtcgaaggctgaagcactgaaaatgctcttccctcatcagaaagaagttgacatgaacttcaaggagttggacggcaaccgcacgcaagccgagttgttcaaggcatatcaagccattgccgaaatgagcggacacgatgtgggagatttacagaaaaaatcagcaaaagaaatgcagcaaagcatttctgagattttcgatacgataggtattgacactcgcattctgaccttcaattccgaccttgaaggaaaagattttgagcagcaaccaatgttccgactgtggcatctattgtactcgtttgagggtgacaattcatccattggcaatgaaaaattgattgaaaagttgcacggtacgtttggctttgaaaaggaatacgcaacggttcttgccaatgttgttttcaaggaggctggcgattatagtagtctgagcaccaaagctatacgtaagatattgccgcatttgaaagacgggaacgactacagcgtggcttgcgaatatgcaggttatcgccattcaaagcagtcgctcaccaaggaggagattgaaaacaaggtgctgaaagacaagttggaacttcttccgcgcaacagtctgcgcaaccccgttgttgagaagattttgaaccaaatggtcaatgttgtcaatggcatcatagaggaatacggcaaacccgatgaaatccgtatcgagttggctcgcgaactgaagaagtcggccaaggagcgcgaggaactcacgaagtctatcaacgaaacaactcgtctgcatgaggaattggtcaagaaactgcaaaatgaatttggtctgtcgcatgtgagtcgcaacgacattattcgctacaaattatatgaggagctgaagaataacggttaccacacactctataccgacacttacataccacgcgaaaaactcttcagcaaagagttcgatattgaacatatcattccgcaggcaaaactattcgacgactcattctcaaacaaaactttggaagcacgtcaagccaatctggacaagtcgaacactacggctttcgattttgtagccacaaaatatggcgaagatttcgccaatggcgattacaagaatcgcattgacaagttgttggatgacaaagttatcagcaagacaaagcacgacaaactgctgatgaaagaagctgacattccgagcggcttcatcaaccgcgacttgcgcgattcgcaatacatagccaagaaagcccgtgagattctggaagagcttgtgcgctttgttttgcctacaacaggcagcataaccgaccgcctgcgggaggattggcagctggttgacgttatgcaggaactcaactgggacaagtacaaccaattggggctgaccgaaatcatcgaaggccgagacgggcaaaggatacgccgaatcaacgattggacaaagcgcaatgaccatcgccaccacgccatggacgcacttacgattgctttcaccaaacgctcattcattcagtatctgaacaatttgaacgctcgtgtgcaaaaaggtgttgacgattggattgaccttgacatggttgaatttgccgatttgaacaaagaggacaagaccaaggctgtttatgccatcgagaaaaaggaactctatcgcgacaaccgtggcaaattgcgcttcaatccgccaatgcctctcaacgagttccgtgccgaagccaaacgacagttggagaacaccttgatttcaatcaaagcgaaaaacaaggtggtgacgcgcaacgtgaacgtcacgaaaaagaaatcgggcaagaacaaaaaggtgcaactcaccccgcgcgggcaactgcatctggaaaccatctatggcagttcgaagcgatatgtcaccaaagaggaaaaagtcaatgcctcgttcgatgccgagaagataaatatggtggcaagcaaccgctatcgggaggcgttgatggctcgtctgaaccaatttggcggcgatgctaagaaggcgtttacaggcaaaaacgcattggacaaaaatccgatttggctcgatgagttgcataccgcccaagtaccggaaaaagtaaagactgttgggtttgagacgatttacaccatcaggaaagaggtttcgcctgacttgaagttggacaaagtagttgacgtgagtatccgcaaaattctggaagacagactgaaagaatttggtggcgatgcgaagaaagccttttccaacctcgatgaaaatcccatctggctcaacaaggagaagggtattgctatcaagcgtgtcaccattacgggcatcagcaatgccgaagctttgcacgacaaatgcgacaaagatggcaatctcttgcttgatgaaaatggcaataaacagccaatcgattttgtgaataccggtaataatcatcacgtagctatttaccgtaagccgaaattggacaagaacggccaacctgcactcgatgaaaacggcaacatcatgtatgagcttgacgaaaagatagtttcgttctacgaggctacttcacgtgccatgcagcatttgccaataatcgacaaagagtacaaacgcgaggaaggctggcagttcctgttcaccatgaagcaaaacgaatactttgtcttcccgcgctacgatgccgatggtaatatgacattcaacccattggaacacgatgaggcttggtacaagaaccctgaaaactatgccgcgataagtccaaatctgtttagggtgcaaaaaatgacaaacaaagattatttctttaggcatcacttggaaacaacggtgcaagacaatgcgaaattgaaaggtattacatggaagcgttttggattaaatggtattgaaaatatcctcaaagtccgtgtaaaccacattggacagattgtttctattggcgaatactaaaacaagaaaaactatgaccaacatcaaactattccaagacaagaaaatccgttctgaatggaacgacgaggaggagcaatggtacttctccgttgtggatgtggtggccgcattgacggattccattaatccaactgactatctaaagaagatgcgtaaacgcgacgaagcattaggatcgttcctagggacaaattgtccccaggtagatatgctcacagaaacaggaaaaaaacgcaaaactttggcggccaacgtcaaaggcctgttccgaatcattcagtccatcccgtcgcccaaagccgagcctttcaagcagtggttggctacggttggctatgagcgcctgctcgaaatcgagaaccccgaactggcccaagagcgtatgaaggaactctacgagaagaaaggctatcccaaagattggatcgacaagcggcttcgtggtatggccatccgccaaaaccttaccgatgaatggaaacgacgcggcattacattggaacaggattatgccattcttaccgctgaaatatccaaagccacctttggcatgacaccttcggaatacaaagagtttaaaggcctgaccaagaagaaccagaacctgcgcgaccacatggacgacctggagctgattttcaccatgcttggcgagcgcgtcacaacggaaatctcccaaaaagaagcccctgagtcgtttgaggagagcagaaagattgcaaagcgaggcggaaatgtagctggagtggccagaaaagaaaccgaaaaggaacttggtcgtagtgtttcgaaccccaataattatttacccacacaaaccaccctggaaatagaatcagatgattaaacgcaccctatttttcggcaatccggcgtatctttcgacgaagaactcccaacttgttgtcaaacaaaccgacaaagtgacccaagaggaggtgacaaaaaccgttccaattgaagacatcggcgtggtggtactcgaagaccgtcagataaccatcacaaacgtggcgttggacgcattgttgcaaaacaactgtgctgtaataacctgcgatgaaaagcacatgccgtcaggattgctcttgccaatcgaaggcaacacgattcagagtgagcggttcaacaaccagataaacgcgtcgctaccattgaaaaaacaactctggcagcagacggtgcaggctaaaatccgaaatcaggcttcggttttgaaaaggttgagtggcattgaggtcgggtgtatgtttgcatgggctaatgatgtgaaaagcggtgacagcgataatcttgagggacgcgcggcggcatattactggaaaaacatatttccgaatttgcctggatttactagggatagggaaggggagatgcccaacaatctgttaaactacggatatgccgtcgtcagagcagttgtggcccgcgccttggtcgcaagcggacttttgccgactttgggaatccatcatcacaacaggtataacgccttttgtctggccgacgacatcatggaaccttacaggccatacgttgacgagctggtgataaacatcatgcggagcggagccgattacggagagcttggcaccgatttgaaacgacagctgttgggattgcccgtgacagaggtcgtcattggcgggcaacgcagtccgatgatgattgcggcgtcacagaccacatcgtcgctgtgcaaatgtttctctggagaagcgcgaaagataacttatcccacaatggatatctgatggaccgtttcagcgaatacaggattatgtgggttttggtgtttttcgatttgccgaccgatacgaaaaaagagcggaaagctgctgctgagtttcggaagaagcttttgaacgacggattcacgatgtttcagttttcgatatatctgagacattgtgcgagcatggagaatgccgaggttcatatcaaaagggtgaagatgtcgttgccggagcttggcgaagtggggataatgtgtgtcactgacaagcaatttggcagcatggagatatttcacaacaaaaaagtcgagcccaccggcactccggggcagcagttggagttgttttgaaatcaaaatgtggggtaaaattaaaaaatccggcacacgtagagtcggattttttgttttggaaacaatgtctaacacattgtgaatcaggcgattgcatggattgtattgtttccgatgcaaatttacacaaattttgaaagcaattcacaacccatatttttttttattattcaaagtctaaattgtttccgatgcaaatttacacaaattttgaaagcaattcacaacaacacgtcatttatttcgcaagtacgaaatattgtttccgatgcaaatttacacaaattttgaaagcaattcacaacaatcaggtactacagtaataccatctttacattgtttccgatgcaaatttacacaaattttgaaagcaattcacaacttaccgtaggaaattatatacgatttttgattgtttccgatgcaaatttacacaaattttgaaagcaattcacaacccatttttttttctaataataaaaagttgaattgtttccgatgcaaatttacacaaattttgaaagcaattcacaactgcaatagtgtatgcataacatggcaggtattgtttccgatgcaaatttacacaaattttgaaagcaattcacaacatatttatataacccctttttataccatatattgtttccgatgcaaatttacacaaattttgaaagcaattcacaacataaatttttcggcactgccattactcgccattgtttccgatgcaaatttacacaaattttgaaagcaattcacaacagttatggggttattagctccaacagcggattgtttccgatgcaaatttacacaaattttgaaagcaattcacaacggcagcagcagttggcaaagatggattcaaaattgtttccgatgcaaatttacacaaattttgaaagcaattcacaacttaccgataattctactaatagtgatagtattgtttccgatgcaaatttacacaaattttgaaagcaattcacaacattgaatttgatgccgctaacaaaaatctattgtttccgatgcaaatttacacaaattttgaaagcaattcacaaccctacacggtctattcatcgcgaccttcaaattgtttccgatgcaaatttacacaaattttgaaagcaattcacaacgaagacgggctaatacttggtcttctttatattgtttccgatgcaaatttacacaaattttgaaagcaattcacaactgaatatggttctaaagacggtagaccacaattgtttccgatgcaaatttacacaaattttgaaagcaattcacaactacaatctttgacactttaacatatgataaattgtttccgatgcaaatttacacaaattttgaaagcaattcacaactggtatgaacaagccattttactgtcctgaattgtttccgatgcaaatttacacaaattttgaaagcaattcacaacttcgtggcggtatatcttccactattctacattgtttccgatgcaaatttacacaaattttgaaagcaattcacaacattaaaaaaattcagatcatggaaacaaaaattgtttccgatgcaaatttacacaaattttgaaagcaattcacaactacgtcaaccactattggcactgacaacatattgtttccgatgcaaatttacacaaattttgaaagcaattcacaacaatgtgtatagtgatgcgctgccggacgtattgtttccgatgcaaatttacacaaattttgaaagcaattcacaacgcaacccttgtagttcaccattggcttgtattgtttccgatgcaaatttacacaaattttgaaagcaattcacaacggtttgcgagcagaccaagttgaaccttaaattgtttccgatgcaaatttacacaaattttgaaagcaattcacaacgccgcacctgagcctccgacaaggcacgcattgtttccgatgcaaatttacacaaattttgaaagcaattcacaacgcaagcgactaacaccagcttgctcgagctattgtttccgatgcaaatttacacaaattttgaaagcaattcacaactcattggcacatagaaatatcgtgtacgaaattgtttccgatgcaaatttacacaaattttgaaagcaattcacaacaggtcatcatgtgtaatttgatagctgtggattgtttccgatgcaaatttacacaaattttgaaagcaattcacaactgctggttatggcatcgctaagcaacagaaattgtttccgatgcaaatttacacaaattttgaaagcaattcacaacttttcacggaaataattaaatcctttatcaattgtttccgatgcaaatttacacaaattttgaaagcaattcacaacttgctcattatacttattttgagcattccaattgtttccgatgcaaatttacacaaattttgaaagcaattcacaacaatcgtatcgatgtaacttgacctgcgagaattgtttccgatgcaaatttacacaaattttgaaagcaattcacaacggaacagcgtgaggtggtagtgccacgagtattgtttccgatgcaaatttacacaaattttgaaagcaattcacaactacaaactatcgaatccgacaagaaaatgcattgtttccgatgcaaatttacacaaattttgaaagcaattcacaacaatcgtgtcaatatagctggatctgcgagaattgtttccgatgcaaatttacacaaattttgaaagcaattcacaacaatgtactcttctcttataccttaaatgtattgtttccgatgcaaatttacacaaattttgaaagcaattcacaacgacatttaactatatcgttgaaagtcaacaattgtttccgatgcaaatttacacaaattttgaaagcaattcacaacattgggtaatcaaatttggtacaaaaggcattgtttccgatgcaaatttacacaaattttgaaagcaattcacaacaacaccttattattatactaagcgtacatcattgtttccgatgcaaatttacacaaattttgaaagcaattcacaactactactaaaaaagatatccattccatattattgtttccgatgcaaatttacacaaattttgaaagcaattcacaactaaaatctgagattaagaaaatagatgctgattgtttccgatgcaaatttacacaaattttgaaagcaattcacaactgaccaggatggctacataatcgccatagattgtttccgatgcaaatttacacaaattttgaaagcaattcacaaccccttctgtaaatgccgaagttgaagcttaattgtttccgatgcaaatttacacaaattttgaaagcaattcacaacaggcacagaatttgatagtgtaggagtaaaattgtttccgatgcaaatttacacaaattttgaaagcaattcacaactacgcaagaaattacattttacgaaagaaaattgtttccgatgcaaatttacacaaattttgaaagcaattcacaacccgtgacgaccatcgacaacaagcccggcattgtttccgatgcaaatttacacaaattttgaaagcaattcacaactctaatgcccaaaattctcttaacttgcacattgtttccgatgcaaatttacacaaattttgaaagcaattcacaacgaatgggacttgattccgcgaaaacatgtcattgtttccgatgcaaatttacacaaattttgaaagcaattcacaactataggttggtggaaaccaaaatatcacctattgtttccgatgcaaatttacacaaattttgaaagcaattcacaactggacgctcatttgaaagtgcaggaaaaaattgtttccgatgcaaatttacacaaattttgaaagcaattcacaaccgcggcctcaaatacagcgtcaagcaggaaattgtttccgatgcaaatttacacaaattttgaaagcaattcacaacgcgcaaatttagatcccaacggcacaatggattgtttccgatgcaaatttacacaaattttgaaagcaattcacaactcgaaaatatcgtggaaatgaagtacatggattgtttccgatgcaaatttacacaaattttgaaagcaattcacaacgtggcgtgtgcaatgaattcctctttagtattgtttccgatgcaaatttacacaaattttgaaagcaattcacaacgtgcctgttacggcaacgacatacaggcagattgtttccgatgcaaatttacacaaattttgaaagcaattcacaacatcatggatgaaaacggcaactattacggcattgtttccgatgcaaatttacacaaattttgaaagcaattcacaacatacagcagaacacagcaacttagcgaagcattgtttccgatgcaaatttacacaaattttgaaagcaattcacaactcgtcgtgcgggatacgccagcggtcgaagattgtttccgatgcaaatttacacaaattttgaaagcaattcacaacaaattcgccatacactacgacatattttaaattgtttccgatgcaaatttacacaaattttgaaagcaattcacaacacctcccgactgtatactcacgctattactattgtttccgatgcaaatttacacaaattttgaaagcaattcacaacagaatcgccgttgctgcgtgcatgtccctgattgtttccgatgcaaatttacacaaattttgaaagcaattcacaacaatgtcggttgtcttgcgcacgaaggcgaattgtttccgatgcaaatttacacaaattttgaaagcaattcacaacactcattgcttaaaagttttatggcaaccaattgtttccgatgcaaatttacacaaattttgaaagcaattcacaacttccttttccatttctaaaaattctgctgcattgtttccgatgcaaatttacacaaattttgaaagcaattcacaacagttgaaagcgagacctgcaccgtgaaaatattgtttccgatgcaaatttacacaaattttgaaagcaattcacaacgaagaggaattccttcttctggatccgaaaattgtttccgatgcaaatttacacaaattttgaaagcaattcacaacgtggcgtgtgcgatgaactcctctttcgtattgtttccgatgcaaatttacacaaattttgaaagcaattcacaacaggcgcgaccatatttctttgtagcccatcattgtttccgatgcaaatttacacaaattttgaaagcaattcacaaccgaatgagttatctccgcagttgttcccgaattgtttccgatgcaaatttacacaaattttgaaagcaattcacaaccaggtcgttgtaatcaatatacatggcaccattgtttccgatgcaaatttacacaaattttgaaagcaattcacaacagagaagcacaatactcaacaagatggtgcattgtttccgatgcaaatttacacaaattttgaaagcaattcacaaccaacctgtcgaaaagggagctctgtcagaaattgtttccgatgcaaatttacacaaattttgaaagcaattcacaacccaagccggaaagcgtcaggtgctgaagttattgtttccgatgcaaatttacacaaattttgaaagcaattcacaacactggcatcggtgaatggtttcagaggggtattgtttccgatgcaaatttacacaaattttgaaagcaattcacaaccaacttcggtgtgcctgtgcggaacccgatattgtttccgatgcaaatttacacaaattttgaaagcaattcacaacttatgactggtcacaccgaaacccgaccagattgtttccgatgcaaatttacacaaattttgaaagcaattcacaagtgacattaagataaaaacacagagttttatgctgacatgaaattcaccgcaaaggtattgaataattttgtatatttgcaatttgttgataaataagtaataagtgtttatgttaggagcgataattggcgatatagtaggctcaaagtatgagtttaacaacatcaagacaaaggattttccactgttttcagatggatgttcgtttaccgacgacaccatcatgacagtggcggtggctgaatggctaatgacatcaagccacatgcgccatctcgttagtatcatgcagagttatggtaaaaaatacccatttccacaaggcggttatggcggctcatttgcacgatggctgcgtgatgccaatccgatgccttattacagtttcggtaacggtgctgccatgagggtgtctccagttggtttgaaataccacactctatctgccacgctgtcaactgccgaagtgacagcatcaataacacacgaccatcctgaaggcatcaaaggtgcagtgtcggtggctcatgccatgtacattgcgagaaccgaacacaacaaagagttactgcgtgatgtaatccaatcccaatatggttatgatttacaaacaacatgtgatgaaatcagaccaaacaacatgtttaacgaaacctgccaaggtacagtgccacaagctattgttgctttccttgacagcaccgactttgaggatgccatcagaaacgccgtatcattgggcggtgacagtgatacattggcggctataacaggcggtatagctgaagcctattatggtgtgccggataacctgaaacaaatggcaatgtcttatttgccgaatgagtttagacaaataatagatagattttacaacatgattgaaacacattaaatatggaaaaattaactgataaacagaaagaactgctgaaaaattgcaggtattataatggaaaaaaagagtgtccttatgatgtatatcctaatgattggttttgggatatggaacgtgtatatgtgacatcagatggtgtcgcaggtggtgaggcatcatattattacagggtgggtggtaaatcatatccaggtatccccaacaaccttgtaacagtaatgttcacatcatggggtaaaacggctttcgatataaaatccactatatcaaagttttacgcattgattgaagaataccttgagattgcaagcgaccattatgagaaagataagctgccatctgagggcgcaaaagattaataacctatgtagctatcaggtacgtaactcaaatctttcagttcttgacaaataatctcaacgtcaatataatattgaccatatctgcattcaactttggtcactctcattttagtgcctcgctggaacaacgtttcatgttctttgctaaatgatgaaaattctttgtgaccatcccagctgcgtccatcgccattgccgtacgcactaaaaggctctgcatacgttgctttcgtgccttttggtgcgtatatgtttaatataacttcgccgctaaatcccttgcctttttgactgccagcggacatgaaaccaccctgatgtaatgtctttccaaccaagcattgagggtctgcaacaatatctttaaatgacaccttttcgccagcaaagcgcaaaagtgattcaataaccctgatgccaccgccttcacctctttgaaaccacatgtcacaaggcaatgatgacctgtcaatatacgattcaatctttgcaacacggtctaaaaattcatcttttgtctgactgcctgaatatcgcctcattgtcaatggttcgttgatattgcaatagtggcgtgtgtactcatatatcctgtcacgttcttcgtcaaaggctgctaaccaatcgtgacttgcagaatcacgtaatgtctttgcagccaatgagccgtcgcctttatcccatacagcattgtttttcctttcatcagtatatgcggaattgacgaatgggcttaa

SEQ ID NO: 2114 - DNA, 24308 bp, synthetic construct
  source 1..24308: mol_type = other DNA
  misc_feature 1..24308: note = Synthetic
tgctttttagagaggaagccattcaaaaatcgatgccaacgagggtgattatcaagccattgtacaaattcctcttcagaatgagggttcgcccagttgtaaatatacaaactcaccggcaaccctaaaatatacgaattaggcttttgaaagataaaattgtttacctttgcatcatcagtaagggcatcattcacataaaccttgttttcgcgcagcaaataatcatcggcagccacccgtttagtagcctcacaagccgacaaatagcagagcaaaacacatagcccactgataaacgaatatcgaaaaaacgcctttttcacaaataattgtttttagggctcaaaattacataatatatttatgcttagcaaaaatcaagtaaaattaattcagaagttacaccacaaaaaatatcgtaacgagctgaacctcttcatagtagagggcaagaaaagtatcaacgaatttctacaagcaggctacaccccccagctgcttatcgctactgaagcctttactaccagcgtgccacagcatcttattacacctgttagcaaagacgaattgcgcaaggtcagtaccctccaaaaccccgatgagggcttagccgtttttcagcagcctaagcacaaaggcattttgcaagagggcgttattgtagcactcgacaatgtacaagaccctggcaatctgggcactatcatccgcctatgcgattggttcggagtcgaaaccctactctgcaacacccaaacggtcgattgctacaatcccaaggtggtacaagccactatgggctcgcttacccgcgtagcagtgcattacctcgatttagccgcttttctaaccaccacagcgctccctgtatacacaatggatttagagggcgaaaacctctatacagccactttccctaaggattgcatacttattttaggcaacgaagccaatggcatcagttcagaggtacgcgccttatccaatgaggtgattacgattccccgctttagccaacaccaacgcaccgagagcctcaatgtagcgatggcaggagcgattattttaagtgaagttatggggcatcattagaaaatttttctaaatacacctatcctatacaatcgatataggaaggatacaggaacaccgaacaatcaccgaaggattagcgaaggattagcgaagtacaaacgtccaacaatcgaccttaaaacagaaaaaagtactatacccaccagtatattaagtattctcttttattcaataaaatcatatttttcgtgtatacttgcccgtcacatctccccctttgaagggggctgggggggatgttaatacccccgtttgcccgtcacatctccccctttgaaggaagtccgcgagctagcgcagcggagtatgtgttaggggggatgttaatacccctcccacttttagcacgatttttgcatcacattctaaaacctaacacctacaagatgcccctaccttatatattaatactgtttcgctttttattagctcccactatattctggatagcctacgccacccccgaaagcgtagcccgccccgctattgtcatcgcaatagtagtaggactcctatccgacatcttcgatggcatcatagcccgccataggggcattagcaccgtaaagatgcgccgcctcgatagccaaaccgatttagtcttctggctctcagtgggggtagcctgctattggctcaatcccgccctaattacagcctaccgctatcagattataaccctattcgttatggaagccctctgctatggtttgagttttttgcgctttggcaaagagacctgcacccacgccttcctttctaaaatatggggacttacccttctcatagcctttgtctcccttattggttttgggtatggcggcttcccattgcagttagctatctattggggactattatcccaaaccgatgtcattcttattatattattgctcccccgttggcaaaacgacatccccagcgcctaccacgcctaccttatcagaaaaggaaagactatcaaaaaaaataaatggctgaatagttaggatagttagaaaaaagtactatatttgcggctcaattataaacttttaaaaacgtatgaaattaccaatcattttagggcttcttaccgcctctattacagccagctttgcacagccttttcgcgacactactgtgctacaattagccgacaccaaagtgctaacagcagaaacttcccaagcccaacacttaaacctaaacccttttttagtaaaggacaaagaattcgattttggagcgctactcaaagaaatcaatttcgtacctttagagaccacggcacaaagccgtttagggcagattcgcaaagtcgttaccactgccgaacacatctatattatggacgaccttgatgagtcgggcatagtcattttcactcggcaagggaaattcgtaaagcgtattcctaatggcaagaagccagaacaactctatcgcctttatgacatcgattttaatacccaaaccaatgaactgattgcttacaaacgttcctttcttcttatttttgataaagaaggcaatttccttcgtttcaaatacctgcctataggctttctcaatatggcagctacccccgacggatatgtgctaaaatcgcttgtagggcaaaataaaaacttaggcgacaaaagcaactaccgtttgcagtttataaataaagacctcaagctcaatgcggtagcgctacccgataaagagagcaaagccttttcggctaaaagttacctttatagagtagccgatttggtaaagataacagccgaaatatccgacactatctatcaatataaccctaaagacaacaaattggcagcagagtttattttagattacgaccacaaactgccacgttcgtatatttatggcaaagattttagtgtttttgaaaatgctatacgcgaccataattataactattgtataggcgattatatcgaaaccactcatcacaatgtgttttttatttctaataaaacagccaatgttgtagtttaccgcgataagcacagtggcaatatggtaggagggggtatagcccaaagcaaacaaggacttcctttcttagccttccctgatagtttttatgatgatcagcttatcaagtattattatccaggggaaaatgattacgaagtgctaaaagagatgccatttctttctgaagccaataagaagaaaagcgaatccttcaaaaaaggcgataatcccattctaatttattacacgttgaacaagttctaaagagataactaaagaaataaagagatatagaaatgtagaaatattttttgataaagaacttcggaaaaaactttgctaaaagctataggaatacccactatagcttttagcaaagtttttttgcacaatatcccacccgtccctacatcatattgttcgtgtatgcttgcccgttgcatctccccctttgaaggaagtccgcgagctagcgcagcggagtatgtgttaggggggatgttactcccaagcctcccacctatccctacatcatattgttcgtgtatgcttgtccgtcgcatctccccctttgaaggaagtccgcgagctagcgcagcggagtatgtgttagggggatgtttcctcccaagcctcccacctgtccctacatcatattgttcgtgtatgcttgtccgtcacatctccccctttgaaggaagtccgcgagctagcgcagcggagtatgtgttaggggggatgttactcccaagcctctcacctgtttctatatcatattgttcgtgtctgtttgcccgtcgcatctccccctttgaaggaagtccgcgagctagcgcagcggagtatgtgttaggggggatgtttcctaccaacctcccaaaaaactttctctcactaacctctgatttccaaccacttaaccatcatcctcaaaaaaacttcaaaaaaaagtgtcaaaaaatttgcagaattaaaaaaacgccgtacctttgcacccgcaaatgagacgataagtgctcttgcaaaaagaaacaacacgtacattgacataatgttgtacagcacaaaaagatttaaagaatcgagtgaaacctgaagtcaataacttaaaaatcggttagaagaaattaaagattttaacgatgaagagtttgatcctggctcaggatgaacgctagcggcaggcctaacacatgcaagtcgagggaggagccttcgggcttcgaccggcgtacgggtgcgtaacgcgtatacaatctgcctttcacatagggatagcccgaagaaatttggattaatacctaatggtatatagggatggcatcatttttatattaaagctgaggcggtgaaagatgagtatgcgttctattagctagttggagaggtaacggctccccaaggcgacgatagataggggttctgagagggatatcccccacactggtactgagatacggaccagactcctacgggaggcagcagtgaggaatattggacaatggtcggaagactgatccagccatgccgcgtgcaggaagacggccttatgggttgtaaactgcttttgcaggggaagaataaggactacgcgtagtttgatgacggtactctgcgaataagcatcggctaactccgtgccagcagccgcggtaatacggaggatgcgagcgttatccggaatcattgggtttaaagggtccgtaggcgggctaataagtcagaggtgaaagcgctcagctcaactgagcaactgcctttgaaactgttagtcttgaatggttgtgaagtagttggaatgtgtagtgtagcggtgaaatgcttagatattacacagaacaccgatagcgaaggcatattactaacaattaattgacgctgatggacgaaagcgtggggagcgaacaggattagataccctggtagtccacgctgtaaacgatggatactagctgtttggttgtaagactgagtggctaagcgaaagtgataagtatcccacctggggagtacgcacgcaagtgtgaaactcaaaggaattgacgggggcccgcacaagcggtggagcatgtggtttaattcgatgatacgcgaggaaccttaccaaggtttaaatggagactgacaggtgtagagatacgcttttcttcggacagttttcaaggtgctgcatggttgtcgtcagctcgtgccgtgaggtgtcaggttaagtcctataacgagcgcaacccctgccattagttgctagcgagtcgagtcgagcactctagtgggactgccggtgcaaaccgtgaggaaggtggggatgacgtcaaatcatcacggcccttacatcttgggctacacacgtgctacaatggtcgttacagagagcagccactgcgtgagcaggcgcgaatctataaagacgatcacagttcggatcggagtctgcaactcgactccgtgaagctggaatcgctagtaatcggatatcagccatgatccggtgaatacgttcccgggccttgtacacaccgcccgtcaagccatggaagctgggggtacctgaagacggtcaccgaaaggagctgtttagggtaaaactagtgactggggctaagtcgtaacaaggtagccgtaccggaaggtgcggctggaacacctcctttttagagacgaccgatgttatagacgaatagaaggataacaccttttctttaaatcttgctggacaacaaaaaaacaagcagtctcatagctcagctggttagagcgctacactgataatgtagaggtcggcagttcgagtctgcctgggactacgaaaagataagctgaattgaggaaattctaggagctgaagagttagatagttaaatggctaacgactaacgactaataactaacgactaaacacggggaattagctcagctggctagagcacctgccttgcacgcagggggtcaagggttcgaatcccttattctccacaacacgcacccacaagttccctctcctttggagagggttagggtgaggaaaacagtacattgacatattgggataaaaagcataagagatcaataatagattattgataatctaacgaaaaaatattaaaaagaatcaaagagaacgaggtattttcttaatttagaatttaaaattcagaattaagaaagactacaagcgcgaaaagttatgtaagggcgtatgggggatgcctaggctctcagaggcgaagaaggacgtgataagctgcgaaaagttgcggggattggcacatacgattagatccgcaaatatccgaatggggcaacccagtacattgaagatgtactacaccgattggtgggcaaacctgctgaactgaaacatcttagtaggcagaggagaagaaaacaaaagtgattcccagagtagtggcgagcgaaatgggagcagcccaaacccatattgttacggcaatatgggggtagtaggacccagatataggttgtaaaactggattagaagtgtttggaaagacacaccatagagagtgaaagtctcgtataggtacagctttataaatcttatgggtatcctgagtaggtcggggcacgtggaaccttgactgaatccgccgggaccatccggtaaggctaaatactcctgagagaccgatagtgaaccagtaccgtgagggaaaggtgaaaagaaccgtgaataacggagtgaaatagaccctgaaaccatacgcttacaagcggtcggagcagcgtcagctgtgacggcgtgccttttgcataatgagcctacgagttactgttaccagcgaggataagtatttcagatacgaatccgtagcgaaagcgagtctgaatagggcgataaatagttggtagtagtagacgcgaaacctggtgatctacccttgggcaggttgaagcgctggtaacacagcgtggaggaccgaactggttgtcgttgaaaagacttcggatgacctgagggtaggggtgaaaggccaatcaaactgggaaatagctcgtactccccgaaatgcatttaggtgcagcgttgatgcgagtttaatagaggtagagctactgattggatgcgggggtttcatcgcctaccaattcctgacaaactccgaatgctattaaatgctcatcagcagtgagggtatgggtgctaaggtccatatcctaaagggaaagaacccggaccatcagctaaggtccccaaatatatgctaagttgaccaaacgcggtctgactgcactgacagctaggatgttggcttggaagcagccatacatttaaagagtgcgtaacagctcactagtcgagcggttgggcatggataataaacgggcataagcatattaccgaagctatggggttattacttgaagtaatataccggtaggggagcattctattggcgtggaagctaaaggcgtgagccatagtggagcctgatagaaaagaaaatgtaggcataagtaacgataaggcaggcgagaaacctgcccgccgaaagatcaaggtttcctcagctatgctaatcagctgagggttagtcggggactaacgcgaacccgagtaggggtagtggatgtacaataggttaatattcctataccattagtctgttaaaagtgacggaatgagataactaccgcgtactgacggaatagtacgtttaaggagttgttatgacttcgaaagtacgctgaggcttcggccgaggtgagtgtggtgacaacgtttccaagaaaagcgaaggctaatgcccgtaccgtaaaccgacacaggtgattgggatgagaattctaaggcgctcgagagattcatggctaaggaactaggcaaaatagacctgtaacttagggagaaaggtcgcctatcattagataggccgcagtgaaaaggtccaagcgactgtttatcaaaaacacaggactctgcaaaatcgaaagatgaagtatagggtctgacacctgcccggtgctggaaggttaagaggagagcttagcagcaatgcgaaggtttgaattgaagccccagtaaacggcggccgtaactataacggtcctaaggtagcgaaattccttgtcgggtaagttccgacctgcacgaatggtgtaacgatttggacactgtctcggccatgagctcggtgaaattgtagtatcggtgaagatgccgattacccgcagtgggacgaaaagaccctgtgcacctttactatatcttcgtattggtcttggataagtgatgcgtaggataggtgggagactaagaagcggctattccggtagttgtggagtcattgttgaaataccaccctttgcttatctgaggtctaactttgcacaaggcaaaggacaattcgtggagggtagtttgactggggtggtcgcctccaaaagtgtaacggaggcttctaaaggttccctcagcacgcttggtaaccgtgcgtagagtgcaatggcataagggagcttgactgagagacatacaagtcgatcaggtacgaaagtagagcatagtgatccggtggttccgtatggaagggccatcgctcaaaggataaaaggtacgccggggataacaggctgatctcccccaagagctcacatcgacgggggggtttggcacctcgatgtcggctcgtcacatcctggggctggagaaggtcccaagggttgggctgttcgcccattaaagtggcacgcgagctgggttcagaacgtcgtgagacagttcggtctctatctactgtgggcgttagaaatttgcgtggatctgactctagtacgagaggaccgagttggacgcaccgctggtgtatctgttgtcttgccaagggcatagcagagtagctaagtgcggatgggataagtgctgaaagcatataagtacgaaacccgccacaagatgagatttcttttaagggtcgtgggagatgaccacgttgataggttacaggtgtaacggtggtaacatcatagccgagtaatactaataacccgtagacttttcgcgcagcattctttttaaggtaatagttagttaaatatttgctttttatcctcatatgttaaaatatatgggctatgtagtcagtatgtagtctaaatgatttaaggtggttatagtcaaaggtctcacctcttaccattccgaacagagcagttaaaccttttagcgcagatggtactacgcaagtgggagagtatgtcgccgccttcttataaaaagagcaatctaaataattagattgctcttttttgttttaaattttaaattgataaacagatatgagagtagtaattcaaaaagtaacacaggcttcagtaagtatagaaaatcaaatagtagcctctatagataaaggcttatttgtcttagtaggtatagaagatactgacactaatgacgatatagcgtggctatcagctaaaatagtcaatttgcgtgtttttgacgatgataatggggtaatgaatctctcggtaaaagaagtggagggagaggtgcttatagtgtctcaatttaccttgcacgcctctactaaaaaaggcaatcgtcctagttatataaaagctgctcgtccagaggtagccatacctatttacgaagcctttataaagcaagtagaaagtctgttaggcaaaagagtgcctacagggcaatttggtgtgatgatgcaggtcagcctatgcaatgatggaccggttaccattcttatagacaccaaaaataaggaataaaaaaagccccgaagatagtcgaggcactaaatgttttcacaacggaataatccttattgtgaattgctttcaaattctgcgacaaaagtaagtataatatttttaatgtacaaatctttttttaatttatttttactttttatttctttttgttatttttgcctcaccaaattacaaaacaatgaaaaatatacttggattagatttgggtaccacctcaataggttttgcccatatcgtagaagatgaaaataaagaaaaatcagagattaaggaattaggagtgcgtattgtttctttagccacagatgaacaatccgactttgaaaaaggaaaatcaattagcactaatgcaaatagaacccttaaacacggagcaaggctaaatcttgatcgttatcaacaaaggcgaaaatttctcatagatttattgcagaaagcaaatctaattacttctgcctctatcttggctgaaaatggcaaaaataccacacattctacttggcaattgagagctaaagccgttaccgaacgtattgagaaagaagagttcgctagagtattactagctattaataaaaaaagaggctataagaatagcagaaaaacaaaaactgaagatgaaggacaagcaatagatggaatggctatagcaaagtgcctctatgatgaaaacctaactccaggacagttatcgttacaattacttcaacaaaacaaaaaactcctcccagatttttatcgttcagatttacaaaaagaatttgaccttgtttggaatttacaaaaacagttttatcctgatatcctaacagatagtttttacaaagaattgcaagggaaaggtaaggatgctacttcaaaagccttttctaaaagatatcattttgacacagctgaaaacaaaggttctaaagaatctgttcgtttgcaagcctatcagtggcgtgcggaggctatatctaaacaactttcaaaagaagaagtagcttatgtcttaaccgaaatcaataataatttgaacaactcaagtggctatttaggcgctatttccgatagaagtaaagaactctatttcaatcgtcaaacagtagggcaatacttgtatgcacagcttcaagaaaatagacataatagtcttaaaaataaagtattttaccgtcaggattacttagatgagtttgaacgcatttgggaaactcaagcttcatttcacaaagaattgacagatgaacttaaaaagcaaatccgtgatgtggtaattttctatcaacgtaaacttaaatctcaaaaaggattggtatcattttgtgagtttgagagcaaagaaattgagatagaaaaagacggaaaagctataactaaaagcataggagctcgtgttgtccctaaatcctctcctctatttcaagaatttaagatttggcaaatactcaataacgttacctgtaagagaaaaggaattagaaaaaagaaatcatctgctaaatctactgaattagacctattcaatgaaccctctcaatcaatttttagtttggatatggagtgcaagcaactcctttttgacgaactgaacctaaaaggagacctaaaatcggataaagtactgaaattattaggctattctcctcaagaatgggaaatcaactacaatcaattagaaggaaatcgtactcaaaaatcactctatgaagcgtatttaaaaattattgaaatagaaggttatgaggtgaaagatattttacaaataaaatctacaaaagacgattggtctttagatgaatctcctctttcagcttccgaaattagagaaagagtaaaggttatcttccaaacattaggaatatgtactaaaatcctttattttgaccctcttttgcctgtaaaagagtttgaacagcagtattcctatcagttgtggcatttgctttattcttatgaaagtgatgattctacttctggaaatgaaaccctttaccgaatcttagaaaagaaatacgcttttaagagggaacacgctacaatactcgccaatgtagccttgcaagatgactacggtagcctatctactaaagctatccgcaagatatacccttatataaaagaaaatcagtatagcacagcttgtgaattggcaggttataagcactctaaactatctttaaccacagaagagttagaggctcgtgaactgaaaaatatcattccactacttaaaaagaatgctttgagaaatcctgtagttgagaaaattctcaatcagatgatcaatgtagtgaacgctttaattgagaaaaacagtgaacgagatgctgaagggaaaattacaaaatattttcatttcgatgaaattcgcattgaattagctcgtgaattgaagaaaaatgcccaagaaaggtatgaaatgacccaaaatatcaacaaagctaaattagaacatcaaaagattagcgaaaaacttcagaaacagtttggcatcaagaatcctactaaatctgatattattcgttatcgcttgtatcaagaattggaacacaatggctataaagaactatataccaacacctatatagcccccgatgtattgtttagcaagaatatagatatagaacatattgtccctaaagctcgtgtgttcgatgatagtttttccaacaaaacattagctttcaaagagtttaatatcaaaaaaggagaatctacagcttttgattatatcacctctttaaactgtgaaggagaactcaatcaatatctcaccagagtagagaatgcttataaaacaaaaagcatttcacttactaaatacaagaatttactcaaaaaagcctctgaaataggtgatggctttatcaatagagacctgagagatactcagtacatagccaaaaaagctaaagaaatacttttccaagtaactaaaaatgtgctgtctacctcaggaagtatcaccgatagattgcgcgaagactggggcttggtcgatgtgatgaaagagctaaatatgcctaaatatcagtcattaggactcacagaagtagaagaacgcaaggatggcaataaagtaactgtaattaaggattggacaaagcgcaatgaccaccgtcaccacgcaatggatgcccttacagtggctttcaccaaaccttcatacatacaataccttaatcatctcaatgctcgaaaagacgagaataacaaaaattattcggttattttagctatcgagaaaaaagaaacaattaaagtcccaattaataatggtaagaataagagagtttttatagagcctatacttaactttagacaagtagccaaaaaacacctcgaagaaatattcatttcgcacaaagcaaagaataaagtagttaccaaaaatataaataaacctgctggtactgacaaacaacaaatcacactcactccaagaggtcagctacacaaagaaactatatatggtaaataccaatattatgtcaataaagaagaaaaggtaggcgtaaagtttgatgaaagaactatcacaaaagtctctaatcctctttatcgcgaagcattgctgaaaagactgcaagctaatgacaacgaccctaaaaaagcctttgcagggaagaacgcactatctaaaaaccctatttatttagatgaagcaaaaactaaaactttaccagaaaaagtaaatctcacctacttggaagaagacttttctatccgcaaagatatttctcctgataatttcaaagatttgaaatctattgaaaaagtaattgaccaaggagtaaagcgcattcttatcaagcgactccaagcctacgataatgatcctaagaaagcctttgtagacttagaaaagaatcctatttggctcaataaagaaaaaggaattgcgattaaacgcgttactataagtggcgtgagtaacgctcaacctttgcacatagggaaagaccatttaggaaaaactactttaaataaagaagggaaagaagttcctgtagattatgtaagtacgggcaataaccaccacgtagctatttatagggataaagaaggtaatttgcaggaacaaattgtctctttctttgaagctgtcgtgcgagctcagcaggggcttcctattattgataaaaactataaacaagcagaaggttggcaatttatgttcactatgaaacagaacgaaatgtttgtatttcctaacgaagcgacaggttttaatcccgctgaaatagacttgttagatcctaaaaataaaaaattgataagccccaatttgtttagagtacaaacaatatcaattgtaaaatatggaaatagtgtggttagggactttaaatttagacatcatttagaaacaactcttcaagatgataaaatattacaaggaattacttttcaacagattaaaagtttagaacccttaaggaatatcgtaaaagttcgtattaatcacttaggcgatattgtaaacataggcgaatattaaaaaacttttttaaaaccaataaaacaccctttaaactatgttataccgttctatttacattggcaatccagctcatttaaagtggaaagatgagcaactcatagtctatcttgaattatgatcatagcagaacgatataatgcttatagaattatgtgggtattagtattatacgatttgccaacagaaacgaaaaaaatgcgtagagaagcacaggtttttcgtgataaacttataaaggatggctttacgctctttcagttttcgatgtacataagacattgccccagtagggagaatgcccaagtgcatatcaatcgtgtaaaacaaaacctaccacagtacggcaatatagctattatgtgcctaaccgataagcagtttggcgatatggagttcttctactgccaaaaggaaacaacagcccccgaaacctatgtacaattagagcttttttaagaagaataggaaagagaaaacctcctcttttgcctttgtttataaggcaaaagaggaggtttttcagtgctgtttttaagtaaaactgattgatactaaaatctttaaaagattgaggatgttatcaatcacaaaactacaaaatttgaaagcaattcacaacaaagacttccctattttgaataacctgatagttgttatcaatcacaaaactacaaaatttgaaagcaattcacaaccagtccttaatgtgtagagggaactgccatgttgttatcaatcacaaaactacaaaatttgaaagcaattcacaacgagctatgtagctatacacaatgagggagggatgttatcaatcacaaaactacaaaatttgaaagcaattcacaactgccagccttgtagcatatagatagcgttagatgttatcaatcattaaactacaaaatttgaaagcaattcacaacaaaccgcttactccaataatcgcgtttgttgttatcaatcacaaaattacaaaatttgaaagcaattcacaacaggcttttttgaaggggtttttgcttgaggttgttatcaatcgcaaaactataaaatttgaaagcaattcacaaccaacaaatgaatgaaacagcaaaacaaagtgttgttatcaatcgcaaaactacaaaatttgaaagcaattcacaacaactacatcttacaaggctttggatttagggttgttatcaatcacaaaactacaaaatttgaaagcaattcacaacaaaagctggaacgcccttttgacgagtatagttattatcaatcgcaaaactacaaaatttgaaagcaattcacaactacgttaggcattataacctttgccgatgagatgttatcaatcgcaaaactacaaaatttgaaagcaattcacaacctctcgccctccctcccgttggtcggttgggatgttatcaatcacaaaattacaaaatttgaaagcaattcacaacaaagcattaaacaaacaacaagagatacaagttgttatcaatcacaagactacaaaatttgaaagtaattcacaacgttttctaactttatgaaacccggacaagagttgttatcaatcgcaaaaccacaaaatctgaaagcaattcacaacctgtcacctatttggtattgatttgaaaaagatgttatcaatcacaaaactacaaaatttgaaagcaattcacaactacccagtggaggaccctcaagcacactttgatgttatcaatcacaaaactacaaaatttgaaagcaattcacaaccaacaaatgaatgagatgagcaaacaaagtgatgttatcaatcacaaaactacaaaatttgaaagcaattcacaaccaacaaatgaatgagatgagcaaacaaagagatgttatcaatcacaaaactacaaaatttgaaagcaattcacaacttttagcacaaacaagaacgtacgaaagttgttgttatcaatcacaaaactacaaaatttgaaagcaattcacaactttttttgcataaaaaagttttaatttgttttattatataataattcttatctttgtactttaatttaaatttttaatttatgggaattattgcaacacttattattggcgccatcgcaggatggttaggaggaactatctacaaaggtagtggattaggactaatagggaatatcattattggtgttcttgggagtagcgtggggtattggcttctaggaagtgtattacacatctctcttggagaaggattgattggttctatcttaacaggagctattggagctattgttattttatttttaataaatttgatatttaaaaagaagtaataaggaaataggagaaataaaaagccccgaaatattatatatttcggggctttttagtatactttttctcttaattacctttttgcgttagcaatccaggtctttccatctgtagtatacagaatgtacagtgaagatgcgtttattctaattacttttaaaccatcttgcaaatcaacatttactaaagtgttatctccttcttttttgaaactaacaccttttaggtcttcaatgccatctgaaaaacggaaataataatcatttcctgttttaacaactgttactgaaccattgtcaacagattttttttcttttccttttaggaaagaaatttcacctttataggttcctacaaaaaggtcattgtctgctgggtcatcatttttgctacaagaagcaaaaaaaactagtgataaacaaatcactgaagctaatgcaataattttcttcatagttgattaaatttaaaaattaatattaaagtttgatgtaataattatattattgagatgcttaatgcaatttttaaaagatattaattgtaatatttttttaagaaaatattttttatttgtttttatttaaatatctttttgctaaaagttgcattccgtatcccaaagctatatttaaccatcgtttgttgttaaataaagagcccaaagtattagctaataagttttttggacttaaactttctgctgaagctgatacttgttgtgtgagagatagtcggtcaatctctttttctaatcgcagtagtctaatctcattgtcaatttcttcaaatgatgaataggttttattgttcattttcttcttcgtcttctgggtcagatttaaaatagatttctgatagtttttgcaatagcgacttctcaattagtttcctgcgaaacaataaaactactaacgataacaatatatagaacgctcctacaatagcaaaccctaaaccattactacctaaagcttcacctatagcataagcagcggcaagtgataggaaaaataatattaataagcaggcaaaagcataaacaaaaaaagttataagcccatacgaagacttagctataaacctgaaaactatcattttatagtaagcaaattgcgaattaaaggctgtgtttgcttttgtagggacttctacaaacgtttctttaatagaataaatcgccataaaattacttcttgattttagcggcttcttctttcaatgaagctaatttcttttctagcagactaattacatcttcagctttattgcttgattttgaaaagagtctatctactttttcttctaaagaaccttttaattccaaagatttctcacgcacgctctctgtaagattatctaattgctctttaaattcatcagacttgtctctaagagagtccttaatttttttacgtgtgtttttaccttcgtctggcgcaaaaagaatgcccaaacctactccgatagcagtacctactgctaagcctaatacggcatttgctgtttttgacatagtgttcaaatttaatgttattaaattagttatataaattaagtatggtgcaaaggtataaataattttgataaaatatattttttaataatactttttaactataagacataagaaaaacttattattactttttatatgtttgtttttaagaggtttatatatttcttttaagtttgttttcccattgataatccataagctaaggatataaaatcattgcgatagcccaaatgattgccagcaatattatccaaggcaaacaacctgaaaacatatggtataaggctctaaacgcttcgaatattatattatttttcataacaataatcagtattattacggtgctaagcgctctattttccaatcgtagtcttcggtgagggtgtaacgcagacggtcgtgtaggcggttggggcgtccctgccagaactctatgctctgagggcgcactaagtagccgccccaatgcgcaggacgcggtacttccttaccttcgtattgcatttctaaagcgtgtagttgctcttctaagtactcgcgtgtgggtattacctcgctctgtggcgatactatagctcctaatctactccccaaagggcgcgattcaaaataaccgtcagaggtgttggcgggcactcgctctgctatcccttttatgatgacttgccgctcgatagaaggccaaaagaatgataaacacagatgcggattagcttctattgccttacctttttcgctgtggtagttggtgtagaagataaacccttcgtaagtgtactgtttgagcaacactacgcgcgttttaggaaaaccgtcaagtccgatagtgctaacggacatagcattggcttcgtctatactatctgtttcatctgcttcgtaaaaccacgtctgaaaaagctgcatagggttttcaggagcatctttctctaaaagctctcgtttattataggtttttcgataattacttaagtccattttgtttttctgcaaatatactaataatttataaatcggcaattaataaaataaaaataagaggcaataagcactcacttattacctcttattttattacttatcagttgtttctattaatagaaagcacttatattttctttgatagtagcactattttcaagcgatttgagtatgccttgtccagcgcgctctgtgcgtagcttctcgatagtctctgcatacgttttgtaatcattagtagcaggtgctactgatactgatgatacttgtatcacatatacagcattctcaccatcgataggtttagagatagcaccttgcttaagtccaaaagcagccccgattactttaggttcgcgtccttctcctataaggatagggttgttcatcgttagtccggtagccgtttttacttctgttttgttagccgaagcaattgctgctaaactgttgcctttagctttctcttttagtatagcggcttttttctcgcgtataagaataggttttacaaatggcgctacgtcttgtacgtcgctaagtccttcttctccttgtttcactaattgagctactatatagttacctccgttagtgaattttttaaggtctcctacttttgtttctttgttgaatagccactgtactatttggcggttagcaccaagcccgatgatttggtcgtcgtttttgtgtaggttatctgcacgaagcacagtcaagtctgatgatttagcgatgttagaaaaatctttaggattttgactcgctttcatctcaaaattgctcactttagagaaaagttcgttgagggtagcttcagaaggctcaaccttgcgagtgatagtagccaactgcacggtaggcgctttatcagttactttcactacgtggtaaccaaaatcagtttctacaatacctatagtacctacagggttagcgaaaacgaattgctcaaaaggttttaccatagccccgcgtttgaagaatccgaggtcgcctccgcgatagttagcacctggctcatcagaattttcgcttgccaaagccgcaaagtcagcaccagctgctttagcctcagccaaaagcgattcagcttttgcttttgcttcttctttagtgcgagtagtattaggagtagcggcttggctacctttgtaagcgataagtatatggcttgctttcacagctccgttagggtctttagctatcatacggcttagttttaggttgccgtcttcttcataaggaccgaatactttgccaactggtagggcgaaaagagtatcagcataagcagaacgcaaatcttctttgcttacgaaaagggtatcataaggagtatcagagtggcggtctacgaactcttttacgtttttagtttgagcgaaaccagcgatagtatcgttagcgtgtgtttggttgttaaacacgatttcaggctgaagcaatttgttgatagcttctttttcagcttgcgtatcggcagccgaaggtttttcgttcaccactatatattgtatattgcggtaagcctcttgtttgaattgtttttcgtgttttttgatataatcttttatttcgctgtcgctaacatttatgtttttatcgtcaatactgctgtattgtagcgcaacatagctaatgtcagccatatctttttcttggtgataagctatttcggcttcagcattggttacccctaagccagcgcgtataaggctaaaatacatttgctgtttagccccttcgataatagcgtcttcttgcattttccactgagcataggcttgcggattgttgcttttgagggtattgaggtaagcggtaaatttagaagggtcaaatacaccgtattcgtttacgaactgagggttttgagcaagaggtgttttagcgagtatagagatgatttggtctttctccacgctgagtcctaatttctcaatttgttgattgagaagtatttgttgaacgttttgctcccacacatactttgcagcttctatgctacttgcctgaccgttagcctgatgcacggcattttctacctgtagacggaaagcgtcaataggtacatcttcaccgtttaccgtacctatttcggtaggttgatggttactaaagcgccctttgccaataaagtctgagatgataaaagcaaagagagcgagcccgataattgcaatcaagaatacggttttacttctgattttttcaagtactgccattgtttataatcgtttataaaaagtataaatttgtttggtgttattaatcaaacggcaaaagtaatcctttttattgaaatacaaaaataattagcaaaaaaaatgttgatttgtcaatttgccgatttgtcaatttgtcgatttgctaattttcccaaacctccattaattagaaattttatcttttatacttaccctttactttagatatagctaccctttaccttgagcgaaggattagcgaaagatgagcaaagtataaacgactaatcaacgccccaaaaatagtaaaatatgctacgctccatcttgcttctcttttcatctctcataatcgccaaatcggcaaatcggcaaattgccaaatcaataaaatttgctaattatcaaatttttactatctttgcgctttgaaatatctaaaaaatgcctaccactatctataaaacttatgtatgtatccttttctttgcgctacaactctgcttttcccaaaaaggggaggaggcactgtttatcaaagaaggtacgctacttaaatgtgagaacaaccgcattcctgctgacggtcgtatagagttaccacgtacagttaaagccattgctcctgaggcatttaaagattgctcccgactcaaatctatcaacataggggggagcgtaactctgataggcgaccgtgctttctacggatgtaatacccttactaaagctgagttcctgcccaatacagttaccgctataggcgaacaagcctttgctttttgtgggaagctcagcagtgctaacttgcccaactcggtggctactattggcactgaggcgtttcgtgcttgttttgcgcttaccgctatcactatccccgaaagtactactaatataggtgataacgcttttttagattgcagttcgctacagcaggttacttttcttactaaccagttacctatacttccttccggaattttttaccaatgcaagcagctcaaagaggcgttactgcccgctagtgtgcggcgcatcaaaagcagtgcttttgcttattgcgaaaacctcagtagggtagtgctgccggaacagttagaggctataggcgatgatagttttgagtactgcaagagtttgcgcgctattgatattcctgatagtgtggtgtttataggggcgagtgcctttcatagctgtagtttgctaaccgatgtgaagttgccctacggcttgcgccatttgctcaacgatacttttttagattgcacttcgcttaaggctattctcatacccgatacggtagaaaagattgatatgcaggtgtttcgcaactgtagttcgttagaggcagtacaatttcctttggcactaaccgacatactctatgccgctttttacggttgcaaaaagttgcaagaagttaccctgcccgacgaggtaaaatatataggtatgtttgcttttgctgaatgcgagagtttagcgtatatagagttgccccgtgcggtggtcgatatagccgctaaagtgttttataactgtacgagtcttagcgaggtgaagctctctaaattcaccgccactataggggtacaggctttttacggctgtacgaatctaaaagacttacgccttccgccctcggtagaaaagattgacttaggggcgtttgaaaatacgggacttaccgaattgcactgcaaggctatcgcaccgccagaggtgaacaggagttttggatataaggggaaagtattagtacctttccgttcgttagacgcctacaaagcggcgataggttggcaagattgtgccttagaataaaaaaatattaaaaaaagttttgcagattaaaatatttgcagtacttttgccacccaaaagcgtgcataataggacgcttaataactcaccaaataaattaatacattatggttcagtatgttaaagaatcttacgaagaactaaagaaccacgttacgtggcctactcttgccgattcacagcgtgaaatggtggtagtagtggtattctctatcttattctcattagttatctggggaatggattcgttctttgaatggataatagctgagtattttaaatttatgcaataaaaacaacggagaatgtctggattgttagaaaaaaaatggtatgtaatcaaaaccgttaccggtcaggaaaacaagattaagaactacgtagaaacggagtcagctcgtttgggctatgccgactatgtagaagaggtgttggtgcctaccgagaaagtggtgcaagtgcgcaatggtaaaaaaactaccaaagacagagtgcatatgcctggctacgtaatggtgaaagctcatttagcaggtgaggtggtgcatatcatcaaatcaataccaggggtagtgggcttcttaagcgagactaaaggtggcgacccgctgcctttgcgcaaagccgatgtaaaccgtatgttggggcaagtagatgagctatcagaaaccgtagaaacggtagctataccttttgaagtaggcgaggtagtaaaacttatcgaggggcctttcaacggctttaacggtacaatagagcgtgtgaatgaagagaagcgaaaattggaagtaatggtgaagattttcggtagaaaaacacctttagagctcaactatacccaagttgaaaaattgtaacttataagtccctgaaaggtattcctaaaggggtatattttaaataatttattaataataaacaatggcaaaagaaattagtaaagtagttaaactacaagctcggggaggtcaagcgaacccatcgccaccaattggacccgcattaggtgctgccggtgttaatattatggagttctgcaagcagttcaacgctcgtacgcaggacaaacaaggaaaagtaattcctgtagttatcaccgtgtacaaagataagtcattcgactttattatcaaaacag

SEQ ID NO: 2115 - DNA, 24305 bp, synthetic construct
  misc_feature 1..24305: note = Synthetic
  source 1..24305: mol_type = other DNA
aactgtgcggaagatcgaaagtatatatcattgtatatgcattgctcactgcgacgggatatttaattccaatgcgaatccacatttcggtatcttcgggatgtgtaacatttatattaaaccccccaacattactaaaaacatttttgggtacagccactgccgatgttactgcaagcctgtagttaaggctggctccaaaatgatcgggcacaatgcccctgtagttctcttcaacccctataaactgtggggtaattatatttcccttagcaatttttatggtatatcttgaggcgagcattcctgcatcaggataatcagtatgcagtttatgtataacctccagatgttccggaagccaaatgtcatcggcatctaaaaatgcaataatttttccggaagcattttctatacctgtattgcgcgcagccgaaaccccttggttaattgtttttatatattttatacggttgtctgtaaattgttttacaacctcttcgctgctatcggtactgccatcgtttacaataataatttcaaagtcagtaaacgtttgggcaagggcactttttatagtgttgctaatgtattcctgcttattgtataatggtgttactaccgaaaaaaaaggcataaagctatggtttggttagtacaaaaacagtttcgttagccgttagtccatgatattcatctccttcaaaaatgcgcgcatctgcaacaaacccggcctgttctaacctgcctttcagtccctgtacagagtatatccttacatggtcgtcctgcccaaagtgaatttcgcgttctgccgggcttgttatactgaaatcctcataaatatctccgtctttaaaaggggtctggataattgctttgccatttggtttcagtacacgatatagttctgccattgccttggcatcatcagggatatgttctaagatatgatagcaaataataaggtctacagtattgtctttaatatcaaggctggtaatatcatactgaaaatcggcaataaaattaccggacagatcggtgcttatatagttaatattcccgattgacttcatttttcttgccagtgccctcgacggggaaaaatctaaaacagtaatcccgttgtagagaaaaccggagtttaataatgtccataagcgcctgtcgcggctaaggctgccacaacgtgcacaaagcaaatcgttattaggcaattgtaaaaagcggctaagttttttattgcaaacactgcactggtgcttgctgccactgtataataaagagtatatgtttcttaaaaacacctcatgcttcatgagctgcttagggcttacaatacgggaaaggattttttttgcagatacgtacatctgttatgtgttactttaaagagcaaagataacctaaacggtaaacatcaaatataaataatgacggacgtttgcttaaaaggttctttttccagctatttttaaagaggttaaaaataaaaaccacagttccggtcaggcctgtttttttaattttatcgtaagctgcacccagcctgatataatttacgggtatcagatggttgtctatcaggtatttgaatccaacggtggcttcttcagatttttttatgaatttttcgctggtatccagtcccaaatggcataccgggttgtgcacatgatgtatctttacatgcttttcgctcaaattgtaagaaaaaagcacgtcttcataccgcaaattagggattgtctcattaaacgatactttactaaaaatgctttttgtaatagcaaagttaagggtaagcaaagaaagatagggcatatcctggcggggcactacatgcaatgcctcacgctcacggccatacacccagcgcaaaagtttttcgcgcggtggcacgtgcgacgtgtattctattccgccataaaccactttttcttcgctgttaaggtattgcaggtagttagctataagttgtttatttattgggagagtgtcggcatcaagaaaaagaagccagtgatagttagctttttgtgccaacaggtttcttattttactcctgcctatattttgttgcagtaaaatataggtacaatcatcaataagagcaatattttggtttttgctaacagtttcctgatctgtagaggcatcgtctattacaatgatctcaaaatctatatgctcccgtttagcctgtgtttgcagttcctgagccagcggaaaaacattataattatatgtaggtataagtatagagagcattatactgttctttgcacaacttcaaacagggttttattctcgcattttagggttttggcaggaaacttcattatcagggcataatcgtgtgtggccataataatggttttgccgttttggttaatttcgagcagcagttgcattacctctacactggtttgcgggtcaaggtttcctgtgggttcatcggcaagtatcacttcgggatcatttagcagtgcacgggctactgcaatgcgctgctgctctccacccgatatttgatgcggcattttaggagcggcatttttcatacccactttatctaaaacttcgtttattttaacatccatttcgcgtttttcactccaacctgtggcttttagcacaaacaaaaggttttcatataccgttctgtcaggcagaagtttaaaatcctgaaatacaattccaatttttctgcgcaggtaaggtatgtcgcgctctcttagtgtagcaagattatattctacaaattcaccttcgccttcttttagtttaaggtcggcatacagcgttttcatcaggctgctttttccactgcctgttttaccaataatatatataaactctccctggcttacctcaaggttaatgtctgagaatacaacattgttttcctgatatattgtaacattttttaatgataataccggatgagacatatatttaaaattattagtatttggtaaaagtagtaagtatgtgcctgtaatcaaaattttatttaagatgcattgttccaaataactttaaaattggttaatctttggttaaaattagggctgttttttaatgttaatttaatgatatgtcaggttttataaggttttgttgctgtttactgcattagagcagtaatactaaaagcacaaaaacatccgtttcataaaaataagaagtgctatatttggcttaccataaaacaactataacctatgcgtaaacttaacaggcttttgctctgctccataccttttatggggttaagcctttcggcacagcaatcggctatttacacccatcagcttaaagattatgacaaggcagtaatgctttataacgacaggcagtatcaggctgcccaaattctttttgaaaaaacaaaagaaggaaaccaggatacagaggttcaggcagactgtgcctattatattgccgttagcgcagtaaagctaaaccagaaaaatgccgatgtgctggtacaggattttgtagaagattatccgtcgagtacaaggctcaaccaggcctatgccgaggttgcaggctatcattttagccagggaagctataaacaggctttagaatggtatgaaaaagtagacgaaagaacactaactgctgatgataccgatcggtataattttcaaaagggatacagctattttactgccggcgataaaaaggaggcagataaatatctcagtaaggttaaagactctaagacttatggcactcaggcaaaatactatttaggttttcttgcctatgagggcgacgactataaaaaagccacgcaatattttgagcaggttaagcagggtagcgaaaaagaaaagtatagcgaaaaaatgtcctactttcaggccgatatggcctttaaagaaggcaactttcaaaaggcaatagattcaggcttaccacaattacccaaaagcgatgctgccgaaaaatcgcagctcaacaaaataataggggagagctactttaaccttggccagtatgataaagccataccataccttaaaaattataaaggtacagagggcaaatggaataacaccgatttctatcaattgggttatgcctattacaagcagggtgattttgagagtgctatagcagagttcaataaaataattggaggtaacgatgctgttgcacaaaatgcctactatcatttgggcgaaagctaccttaaaaccaataaaaagcagcaggcactcaatgcctttaaaaatgcctctgaaatgacattcgaggctaaaattcaggaagatgcttaccttaattatgctaaattgagctatgaaattggtaacccttatcaaagtgtgcctgaagtgctgggtgcatttatagaaaaatatcctgcttcgccattcagggcagaggtacaaacactgcttatcaattcatacataacctctaagaactataaagaagcacttacgcttttagataaaaataaaagtcccgaaaacagggctgcctatcaaaaggtaacgttttaccgtggtatggaactttttaccgatggcgattttcagggggcgctggcattattcaaaaagtcggttgccgagtctaaagacccgcgcattaccgcacgcgccacattttggaaagcagaaacagagtatatactggaccaatacagcgaagcacttattagttacaagcaatttgccggatatgccgatgctaaaacaacaccggagtttaagcatgtagattataatattgcctacacgtattttaaacagaaagagtatggccaggctgctgtttattttggcaattatgttgccgcgacaacttctaaagatgataagcaaaggctgaacgatgcttacctgcgtttgggcgacagccagtttgttgcaggtaaatactggccagccatggaggcatataacaaagctatagaaatgaatggtatagacggcgattatgcattgttccaaaaggcaattagttacggttttgttgcccgtaatgaaaagaaaatagacgaccttaaccgctttatacaaaactaccctaagtctaaatatgccgatgacgccttgtatgaactgggtaacacgtatgtaacagaaaagcaaaacagtgttgccatacaaacctatgacaaacttattgcgaattataaagagagctcttatgtaagtaaatcgctaatgcgccaggctcttatatattataactctgaacaggatgccaaagcgcttgccaaatttaaagaggtagtgcaaaagtttcctaatacaccggaggctatggaggctgtagaaacctcccgacttatttatgttgacagtggccgtaccgaagaatatgctgcatgggttaaaaccctcgattttgttgatgttagcgattccgaccttgataacactgcatttgaagctgccgaaaagcaatatctgcaaaataacaccaagcaggccattgcatcgttaagcagttatgtggcgcaattccctaacggaatatcgtcgcttaaagctaacttttatctggcgcagtcatattatgccgatggattggagagtaatgcagtacctaactatgagtttgtagtgtctaaaccacgtagtgaatatacagagcaggcactggcaaggttagcgcaaattcatttaaaggctaacgactacactaaggctatcccggttcttaaacgccttgaggcagaagcagactatccgcaaaacgtaacctttgcccagtctaaccttatgaaaggttattatgaacaaaaagattataccaatgcagtggtgtatgccgataaggttttggctaacaataaaaccgaagaccgtgtgaagagcgatgcccagatcatcgtggcgcgatctgccataaaaactaacgatgaggttaaggcaaaagcggcctatgccaaattgttaaccattgctaaaggagaacttgctgccgaggcattgtattatgatgcttattttaaaaataaagaaggcaaatttgatgcaagtaacactgttgtacaaaaattatctaaagactattccggctacaaatattttggagctaaaggccttgtaataatggctaaaaacttttacggattaaaagatagtttccaggctacttatatactggaaagcgttatcaagaattttactgcctacccggatgtggttgaagaagcccaggccgagctgagcaggattaaaggagaagaaggaaaacgcaactcatctgtccaaaattaatttaagtaaagccatgaagataaagtttcagtataaaatagccgtattggttgcatttgcaggcctgcagggagcacatgcacaaaaaaaagacgagaacattggtacagaggtggtaaatgtggttaaaccttacacaccaacaatatctgatgcatttaaaataaaggaaacccctgttatagaggatgagaaagacgcccctaaagaggagataaaatataatattttttcgtttccggtggcttctacctttgcgcccgcaaaaggtaaggcagccgcggtagataaagaagcacgcgaaaagctgtttaataactatgcgactttaggattgggaaactacggtactatcaacgccgagctttttgttacccaaaaccttaatgatgggcaatatgttggcggaatgctacgtcatttatcgtcgcagggaggcataaaagatgttttgcttgatgacaagtattataacaccggcttagaccttacctatggcagcaggcaacaggactacaactggaataccgatcttggttatcagcatcaggtgtacaactggtacggactgccattagagttccgcacgtttgatgaagctactgtaaacagtatagatgagcagcaaacttatcatactttttatataggaggaaaagttactaccaaagacagcttttttcatgaggcaagtgcacagtacaaacgtttttgggatgcgtttggttctgccgagaaccgcttttttataaagccttcttttgatgtggatgttgccagcgagaaagtgaaggtagatattattgccgattatgcagggggcgattttgagaagaactattacactaacgacgacctgacctacagtaattttaatttaggtgtacaaccatctattttgtttcaacagggagatgtatcagttcagttaggagccggggtgttttacagcatgggcaagattaacgataataaagacaacaagtttttcatatatccccaaattaaggcttcatacaagcttgtgggcgacttattggttgcctatggaggggcagaaggtggtttaaagcaaaattcgtatgccgattttgtatcgcaaaacccatttgtttcgccaacactgcctgttatgcctaccaatcagcaatatgatatttatgtgggtcttaaaggaaaagtagcagagggtgtagcttacaacattcgcggatcttaccaaagtgaagatgacagggcgttttttgtaaacaataacgctttggaaatactgccggatagggatcttaaaggatattcttatggtaactctttcgggttggtgtatgataaactaaaaacagttagcttttttggagagttaaaagctaatctgtctaaaaaaatagcctttggcattaacggcacctacagcagctacagcacagatcaggcagaagcgtggaacctgcccgaaataaaagtgggcgcaagccttgatgcagatattacacaaaaatggtatgctggtgtcaacgtattttttgtgggcgacaggaaagacaggataggtgttactgatgttacagacccaacattgtacactttgcaaactgtaacccttgacaattattttgatcttaatgcacatgcaggctataaatacagcgatcgtcttacgggctttttaaagcttaacaatattatcggtcaggactaccaaaaatggttaaattatcctgtgcagggcttccagtttttacttggagcctcttataagttcaatttctaataaagtaattgctctttaaaacaccaaaccctgaatatcaattattcagggtttggtgttttatgtatgtaaagcttagctaaaccttattttggcattaagtctttttaataagtcggtagcaatggtgctgccaaattcttttttacggtatttggttataggctgtatcccggtaataacattcgttataaaaagctcgtcggccttttgcaggtcaaaaggagatattgatgcctctgcaacttccaggccttcaactttagctgcaatagccaggatctgctttctcataattccgttaaggcaaccgtcagaaagggggggagtaaccagtttagaacctgtaagcataaatatattgccttgcagggcttcaaccacgtttttgtcttcgttaataataagacaattattgtaaccattttcgctggcaaatatgcttccggttatctgtaccatcttattggtgcttttaagcgtgcttaagagttgtttggttacatgataatctttaaataattcgacctcataagcagtgtttgtaaagctatataaagggttttcgagattttcggcagtaattatatactcggtgtcattagttgcaggcaaataacgccctccgttttccctgaaaaatgtgattctggctctgaaagaagcggctgacggaagagcgctaatcaaacttaaaatttgttcttccatgtactccattgtaaagttcataggtatttccatccttacaatgcgcaacgaggccattaacctaaaataatgatcttcaagaaaaagaaccttattgtctaaaacttttaaggtttcaaaaatggcatctccatataagaatgccctgttttggtggatggatatgttagattcggcaacgatgctgccgttataattgatcataaaaaaagccctgaaaattcagggcaaatatactgtaattaaattaatgttttaaacagaacctaaaacatgctttagatcagatatctggttttcccataactgttttgattcgctcagatcttttgcctcagcaaaatcaactaccattaacgatacgtctttagtaatttcgtctacaaggatacgtaactcaaaataataatcgccatcattgttctgctcatcaatccaacggaacttaactttttcgccactttttttagaagacagcctggctttttcctctgcatcatcccatataaaagtaaagaactctccacgtgaattaacattatcggcaaaccattcagataagcccgatggagtagaaatatattgatatagaagttgtggcgatgaagttatcggaaattcaagttcgtatttaattttttcgtccattggtgtaaaaatttttggaaatatataataattacctttcaaaaaaaagcatttagtaaaataattttttttgtaaaaaaatgtttgcagcctttaaataaagttctatatttgcacccgcattcaggcaatgaatgcttgacaaaatggcgaggtagctcagtcggttagagcgcaggattcataaccctgaggtcacgggttcaactcccgtcttcgctacaaaatgtagtaaaaccctttcaggaaactgaaagggttttttgtttttattatgtttttttgatttaacggtacacagtttattgtgtttcaatggttggtatccttaaatttagggcataaaaaaagccccgaaggtagtcgaggcactaaatgttctcacaacggaataatccttattgtgaattgctttcaaattgtactgcaaggtaattaaatattttatacatacaacaatcatgtagtaaaatacccattaatagggatgttaaagaagtatttaatttttaactttcggagaaaaataaaatgcttaatatgaggatttccttattttttgtaattcttttttgatttattttaatattgataaacaaagtaattatacatgaaaaatattttaggtctggacctcggcacaacttctatcggtttcgcatatattgtagagggcgaaacgccggagcaatcgtctatacaaaagcttggagtaagggtaaacccgcttactaccgatgaacagacgaattttgaaaaaggcagaccggtatcggtaaatgccgacaggaccttaaaacgttctgcccgccgcaaccttagccgttttaaagaccgccgcaataaccttataaatgttttgcagaaagcaaatattatagatgataatgctttgctcgccgaagatggtaagaatactacacatactacctttatgttgcgtagccaggctgctacacagcgtgtagaaaaagatgaacttgcccgtgtgctgcttgccataaacaagaagcgtggttataaaagcagccgccgtgcaaaaaacgaagaagaagggcaactggtagacggcatgggaatagccaaacgcctgtatgacgaggggcttacgccgggtcagcttacttatatattgcttaaagaaggtaaaaaacaggtgcctgacttttatcggtcggatttgcaggccgagtttgacaaggtttgggaattccaaaagcagttttacccggagatttttaccgatgccttcaggaaaaatatagagggcaaagggcaacgtgttacatcggcagcgttttggggtaactataattttaatacagccgaaaacaaaggcacccgggaagaaaagcgcctgcaggcctacaaatggcgggccgaagcagtagaaaagcagctggctaaagaggaggccgcttatgtggtgactgaaataaatgcgaaccttagcagttccagcggttaccttggggctataagcgaccgcagtaaagagctgtactttaataaacaaacggttgggcagtacctgtataagcaactagccgataacccacatacgcgccttaaggggcaggtgttttaccgccaagactatcttgatgagtttgaaatcatttggcaaacacaggcacaataccaccccgaacttacagaggcattgaaagatgaggtaagggatattgttattttttaccagcgtaagctaaaatcacaaaaagggctggtaagtttttgtgagtttgagagtaaagaggtagagcgaattaaagatggcaaaaccgtaaaacaaaccatagggcttaaggtagcgccaaaatcgtcgccgctattccaggaattcaaaatatggcaggtgttacaaaacttggagttccgtaataaggaaaccaaagaaaagtatatacctgatgaagcggccaagcagcagctgtttgacgaactcaaccttaaaggcaatctttcggctgccgctgccattgcgtttttaggctataagccaaagcagtgggaggctaattacgatatgcttgaaggtaacaggacagcgcgttcattttatgaagcatatatgaaaatactcgacatagaggggtatgatgtgcgcggcacctttaaacaacctgatgccgatgttataaagcctgaagatataccgttaccccccgcacaaattaaggaagccatagtacccatgtttgaaatactgggtattgatacaggtatcctcaattttgatgcggagcttgacggcaaggcatttgagcagcaaccgcagtaccggctttggcatttattgtattcggcggaagacgataccaaaaagtattctgaagacgaaatttttacctacggcaacgataacattggcctgaaaaagcaattgtgtgaaaaatttggttttaaaccggagcacgcaaagatattggtaaacattccgctgagtgatgattatggcagcctgagtactaaggctatgcggaagatatacccatatatcaaagataacaattatagcaccgcatgtgccaatgctggttacaatcattctgcggcttcgcttacgcgcgatgagattgcaaaccgcccgctgaaagggaaacttgaattactcaaaaaaaacagcctgcgtaaccctgtggtagaaaagattttgaaccaaatggttaacgtggtaaatacattaatagataccgaaaatgataagcttgaatccgccgggcagtcacgcgactttaaatttgatgaggtgcgtatagagctggcacgcgaactgaaaaagaatgctaaggaacgtgcagaacttagcagcaacatcaacagcgccaaggcagagcatgataagatagttaaggtgctgcagtcgaaatttggcattaaaaaccctgtgcgtaatgatattgtacgctacaagctttatagcgaacttaaaaacaatggctataaagatttgtatacaaacacatatataagacccgaaatgatttttagttcccttaccgatgtagaccatatcctgccgcaatcgaggttgtttgatgatagtttttctaataaaacgcttgtattcaagaaagataatcttgaaaaaggtaaccgtacagctcacgattatatagacagtaaatacggcgctgaaggtctcgcagaatatgaagcgagggtaaaaatgctttttgacttcggggtaaaagggaaagaaaaagaggagggtatttctaaagctaaataccagaaattgttaaaaaaagaaagcgaaataagggatgggtttatagcccgtgacctgcgcgaaagccagtatattgccaaaaaggccaagaatatgctgtatgatatcactcgtgtggtagtgtctacttcgggccagattaccgacaggctccgcgaagactgggggcttattaacataatgcaggaactgaattttgaaaagtacaaagcccaaggccttacggagttcttagaaaagaaagacggttcgcttaaagaagtaattaaagactggactaaacgtaacgaccaccgccatcatgccatggacgccctaactgtagcctttaccaaacagagttttatacaataccttaaccatcttaatgcaaagagtgaaggacataaagaccatgcccatatcattggcattgagcaaaaagaaacccacagagtgagagaggaccgcgataacagtaagcgtgtgtttaacttacccatgccgaaattcagggaacaggctaaagcgcaccttgaaagcgtactgatatcgcataaggcaaagaacaaagtggtaactataaaccgaaaccatataaaaaccgctaaaggtgaactggtaaaaccggagcttaccccacgcggtcagttgcataatgaaactgtatatggaaagtatagatattacaacggcaaggaagagaagataggccctaagtttgatgaagcaaccattaaaatggtaagtaacccccaatataagaaactgcttttacaacgattggcagaaaacgacaacgaccctaagaaagcatttggcggaaaaaatgccttgtctaaaaacccgctttatattagtagtgaaaaaacgctgggagttcctgaaaaggtaaaactaatatggcttgaggaggattattctataaggaaagacattactccggaaaatttcaaggaccttaaaagcattgaaaaaatacttgatgaaggtataaaacggatcatgctacagaggcttgaggagtttggtaatgatccaaagaaggcctttactgatatagagaaaaatccgatatggcttaataaagaaaaaggcatttctataaaacgggtaaagataagcggtataaagaacgccggggcgttgcatactaagaaagatcatttgggtattgatattttagacaaaaataacaatcctattcctgtagattttataagcacaggcagtaaccaccatgtggctatatatattgatgaatcaggtaaacttcaggacagaatagtttctttttttgaagctgtaaccagggctaaacagaagatttctgtagttgataaaaattacaactctcatttaggatggcggttattatttacaatgaagcagaatgaatattttgtatttccaaatgaggaaacgggttttaacccttcagaattgaatcttctaagtcatgaaaataaaaatcttataagtcctaatctttttagggttcagaaattatcaagattaatttatggaaccgccgtggtacgtgaatatgtattcaggcatcatttagaaacatctgttatagatactaaagaacttcaaggtattgcttacaagtcaataaaggggcttacaccgtttaaagatattgtaaaagtcagaattaatcacttaggggatatagtgcaagttggtgaatattaataaagataattatggtaaaacgtacgctcttttttgccaacccggcttatctaaatactaagaatgagcaactggtagttaattttcctgatgaagataagccaccggttacgatccctattgaagatttgggttatcttgtgctggaacatccgcagattacccttactaatgggcttatctgtaagctcatcgaaaataaaacctctataataacttgtgataagcaacatttacctaatgccctcttacaacccttaacggggcatagcgaacagaccgagcgattcaggcatcagcttaactccagtgtgccgcttaaaaagaacctctggcagcaaaccattagtgcgaagataagtaatcaggcattccatctatcagcaaggaataaagattcaagaaaactaatgcgctgggctgatgaggtaaaaagtggagataccgaaaaccacgaggctattgctgcagcgctgtattttcagagcctttttaatcatgttgaagggtttagccgtaaccaaaagggtatagccccaaacggattgctaaattatggttatgccatattgagggccgtaactgcccgtgcactgataagtacgggtttgttaccatcggtggggatttttcacagcaataaatacaactccttttgccttgcagatgatattatggaaccctaccgtatttatgtagatgctctagtatatgatattacgcatagaggtgggggctatgaagagttgacgcaacagctaaaggccgaactgttaaccatacctgctatggacgtggttttagaaggaaagcgcagcccacttatggtggccatgagccgcactacaaacagcctgtatgaatgttacgcaggcataagcaggaaaatactgtatccggtatttgaaattacagtatgatgccttatggaagccgattactattcaaggtttaaccaataccgtagtatgtgggtactcgttttctttgatttgcctaccgaaactaaaacagaacgcaaagcagctggaaagtttaggaaagacctgctagacgatggttttacaatgtttcagttttcgatttacctgcggttttgccccagccgggaaaacgccgatgtgcatacaaaacgggtaaaacgctttttgcccaaacagggaaaagtgggtattatgcaaataacggataagcagtttggcatgatggaaatattttatgctcaaaaagaaatggcaaaagatacacctggtcaacaacttgaattgttttaggatttaaaatttgggattgtatataaagtgaagaacaaaaaagagtgctttttttaattctaattaaaagtgtaaatgacaggataccagttttttatgtcgggtatcctgtgaatcatctactaaagtacaatttttgaaagcaattcacaacatccggttagaaattgcgaaaaaaacaaacctgtgaatcatctactaaagtacaatttttgaaagcaattcacaacagtagcctacaaagctcttgataagcgttacctgtgaatcatctactaaagtacaatttttgaaagcaattcacaactctgctgtacctgatccctcagaccatggccctgtgaatcatctactaaagtacaatttttgaaagcaattcacaactgccgctgagtgacagccgaccagcgatacctgtgaatcatctactaaagtacaatttttgaaagcaattcacaacattgcaatcggcaaacacaatgctaaaatacctgtgaatcatctactaaagtacaatttttgaaagcaattcacaacattcacaagagcgttatccagaatttaagcctgtgaatcatctactaaagtacaatttttgaaagcaattcacaaccaaaagggttatcaattaattgctttggcacctgtgaatcatctactaaagtacaatttttgaaagcaattcacaacccgaggttattgcatggattaacagcacgccctgtgaatcatctactaaagtacaatttttgaaagcaattcacaacggacatagttatcaaggtgctcagggttgtacctgtgaatcatctactaaagtacaatttttgaaagcaattcacaacaaggtcaatgttatcatcgtagtcataaaccctgtgaatcatctactaaagtacaatttttgaaagcaattcacaacaccagcattaaaaatatagctcaaacgctgcctgtgaatcatctactaaagtacaatttttgaaagcaattcacaacctagtggtcaagaaatgattagtgggaacacctgtgaatcatctactaaagtacaatttttgaaagcaattcacaacagcgcaaactgtgttggagataagaaaaaacctgtgaatcatctactaaagtacaatttttgaaagcaattcacaactgtatttcaatatattagacgacaagacacctgtgaatcatctactaaagtacaatttttgaaagcaattcacaacctgcactgactgtggttgtatcagttgtacctgtgaatcatctactaaagtacaatttttgaaagcaattcacaacgaaaacacttaattccttttttctacaaggcctgtgaatcatctactaaagtacaatttttgaaagcaattcacaacaagtagcggccattgctatagccggcattacctgtgaatcatctactaaagtacaatttttgaaagcaattcacaacgcagtgctttagattgttttaaaggctttccctgtgaatcatctactaaagtacaatttttgaaagcaattcacaacccaaagggcgtcaaaagacaggtcgggcggcctgtgaatcatctactaaagtacaatttttgaaagcaattcacaacagggttcttaaagtcatacacctcatgtcccctgtgaatcatctactaaagtacaatttttgaaagcaattcacaaccagtcaaattaacctttttgaagtatgatacctgtgaatcatctactaaagtacaatttttgaaagcaattcacaactagcctcaaaaatagaattattaagcagtacctgtgaatcatctactaaagtacaatttttgaaagcaattcacaacacctacgcttctacccatttgagcaactgccctgtgaatcatctactaaagtacaatttttgaaagcaattcacaacagacaggtaaatatagtaaacattcacttgcctgtgaatcatctactaaagtacaatttttgaaagcaattcacaacctcaaactcgttttcttttccatcaggaatcctgtgaatcatctactaaagtacaatttttgaaagcaattcacaactggcgctgaaaatacaggaggtgtactttgcctgtgaatcatctactaaagtacaatttttgaaagcaattcacaactagtctctccgtcgttagcctcagcatcaacctgtgaatcatctactaaagtacaatttttgaaagcaattcacaacagacacaaggacaaaaacagaggatttactcctgtgaatcatctactaaagtacaatttttgaaagcaattcacaacatcgcgttttcggggcttggtaatggctgccctgtgaatcatctactaaagtacaatttttgaaagcaattcacaacaaaagtcatttgattgggttgcaaaaaatacctgtgaatcatctactaaagtacaatttttgaaagcaattcacaacctatatccccgttagcgtctgtcaacgcttcctgtgaatcatctactaaagtacaatttttgaaagcaattcacaacacctagcaactgaaattgaccaaattaaagcctgtgaatcatctactaaagtacaatttttgaaagcaattcacaaccaacctccttagaggttgcagatttatccccctgtgaatcatctactaaagtacaatttttgaaagcaattcacaacaaaaaaaacttttttattgtggtgtggcggcctgtgaatcatctactaaagtacaatttttgaaagcaattcacaacgcagttagtgacgatgtttcaggaagtgaacctgtgaatcatctactaaagtacaatttttgaaagcaattcacaactgaacatccttcttacacaaattcctgtagcctgtgaatcatctactaaagtacaatttttgaaagcaattcacaacaggatggtttgtgataagccccggcaatacctgtgaatcatctactaaagtacaatttttgaaagcaattcacaacacatcttcgcttcctataatatcatatctccctgtgaatcatctactaaagtacaatttttgaaagcaattcacaactaagagatatatggaaatacggaatatgccctgtgaatcatctactaaagtacaatttttgaaagcaattcacaaccagacttagaaacggagacagaatagcactcctgtgaatcatctactaaagtacaatttttgaaagcaattcacaacgggttcaatgtcaaagggaactgtgccatccctgtgaatcatctactaaagtacaatttttgaaagcaattcacaaccaaaattcatgatacacctgccttggtctgcctgtgaatcatctactaaagtacaatttttgaaagcaattcacaaccagagcatgtttataccgaacctttaaactcctgtgaatcatctactaaagtacaatttttgaaagcaattcacaactgttaaaggctttgcaaacggttggcaccgcctgtgaatcatctactaaagtacaatttttgaaagcaattcacaacataacagttaaaggggttgagataatacctcctgtgaatcatctactaaagtacaatttttgaaagcaattcacaacagcaacgaatacagagcattgtcgaatgctcctgtgaatcatctactaaagtacaatttttgaaagcaattcacaacaaaaaacttttttattgtagtgtggcggtccctgtgaatcatctactaaagtacaatttttgaaagcaattcacaacgaaattttgcagaagacgcgcatgggcgccctgtgaatcatctactaaagtacaatttttgaaagcaattcacaactaataccatctgtaccgttctgtatagcaccctgtgaatcatctactaaagtacaatttttgaaagcaattcacaacaaaaaaacttttttattgtagtgtggcggtcctgtgaatcatctactaaagtacaatttttgaaagcaattcacaacactaagcgcatgagttgagtaaaacttatccctgtgaatcatctactaaagtacaatttttgaaagcaattcacaacttagtatttattttaaacagaacaccgcaccctgtgaatcatctactaaagtacaatttttgaaagcaattcacaacgagttcaacgcaggacgggtcgtgaaatgtcctgtgaatcatctactaaagtacaatttttgaaagcaattcacaacgcaatcaatcgatgaaacagcagttaatgacctgtgaatcatctactaaagtacaatttttgaaagcaattcacaacctaaggatttgctccttttttgcccgctctcctgtgaatcatctactaaagtacaatttttgaaagcaattcacaacaacagcttagggatagaggattagatttttcctgtgaatcatctactaaagtacaatttttgaaagcaattcacaacgaaaaaataactctacatttgacgtacgttcctgtgaatcatctactaaagtacaatttttgaaagcaattcacaacttattttattttgttattgtattttttgtgcctgtgaatcatctactaaagtacaatttttgaaagcaattcacaacttaggtatttgctcctttttttagcccgaccctgtgaatcatctactaaagtacaatttttgaaagcaattcacaaccgctgaacaggagcgattggccgccaaggacctgtgaatcatctactaaagtacaatttttgaaagcaattcacaacccgttctatggaacacctcagttataatgtcctgtgaatcatctactaaagtacaatttttgaaagcaattcacaacaacgatggttaggctgtgtttttagcagcacctgtgaatcatctactaaagtacaatttttgaaagcaattcacaaccctgctgatgacactaaaacaaacatatatcctgtgaatcatctactaaagtacaatttttgaaagcaattcacaacaacatctgaaaaactactcctgtgggctgtcctgtgaatcatctactaaagtacaatttttgaaagcaattcacaacatacataaaatatcaaaaggctaaaatgaacctgtgaatcatctactaaagtacaatttttgaaagcaattcacaacctattgcttttttagaatcggaggccgcttcctgtgaatcatctactaaagtacaatttttgaaagcaattcacaacataatggaaaaaataaaatggctaacagaacctgtgaatcatctactaaagtacaatttttgaaagcaattcacaacattaacgatgttttgaccacctgcataaccctgtgaatcatctactaaagtacaatttttgaaagcaattcacaggtgtaagctttacatcgtaagctgctttcacctgtgaatcatctactaaagtacaatttttgaaagcaatttacgatacagtttagctaacgctacaaaatgtagtaaacccctttcaggaaactgaaaggtttttttacttatatattacagcctacactttaaaaaggaaaacaaccgttaaaatttctacaaccgccatgcatcatagtattctccctttgtaactttaagagttcaaaactacgctatgaaacagcccctgctggcatttaacgataaaggcatttactgcgcacaggccgatgtgtacctcgacccatggcgtgcagtgcctaaagccattattacccacgggcacagcgaccactcccgttatgggcatggcagttatataacccaccacatgaacgtgcccattatactacaccgcttgggcaacattaacgttagcggcaaggcatggggcgaaacttttaccataaatggggttacgttcagttttcatcctgccgggcatattatagggagcgcacaaattcgggtagaatataaaggcgaagtgtgggtatttacaggcgattacaaaaccgaagacgacggaatttctaccgcatatgaagtggtaaaatgccacacctttattaccgaaaatacttttggcctgccctgttttaaatggacgccacaggcagaggtaatgaacgacataaataactggtgggcacaaaacaaagccgatgggcaaacatcggtactctttggctatacccttggtaaagcgcaacggttgcttaaatacctcgacccatctataggcaaaatatatacccacggcgcggtagagaacatgacgcaaatactccgccaaatggtggattttcccgaaaccacccttataacccgcgaaactaaaaaagaagacctgctgggcaacattgtactggcaccacccagcgcgcacggcactccgtggatacgaaaaatgacaccttatgttacaggggcggccagcggatggatggcatttcgcggagcaaggcgcaggcgtgccatagaccgggggtttgtgctgagcgaccattgcgactgggcaggactgctggaaagcatacaagccaccggtgccgaaaaaattatatgtacccacggctacagcgatatcttcagtacatatttgcgtgagctgggttatgacgcccgtaccgaacatacccaatatgaaggcgatgagggcgaaagcgataaagaagccgaaaccgtttcggaggaaggggatgtggtatgaagctctttgccgaacttataaaaacgttagacagtagtaacaagacaaacgtaaaggtcgatgcccttacgcaatactttcgcacagcaagcaatagtgataaggtatggactattgccatactgtcgcaccgcaggccaccgcgcccgattaataccaacctattacggctttgggctgccgaactcgcccatattccgttatggctgtttgaagacagttaccacatagtgggcgaccttgccgaaaccattgccctggtcatccctgcgtctaaaaatcattctgataaaacccttaccgagtttgtacaggaaatgattaccctgaagaagaaaaccgatgaggagaaaaaagcctacctgcatactaactggctcaccctgaattattacgaacgttttgtatttaccaagctcattaccggaagtttccgcattggcgtaagccaaaatctaatgacccgcgcactgggcaaagctactggtgtaaatgaagatatactcgcctacaagctcatgggtgaatggaatccctcaaccgttagctttgaagatttggtgctcaatgaaaaagaggaggataatctgagccgcccttacccgttttatcttgcacatgccgttgagggcgaaccgcaggatttaggcaacgttaccgaatggagtgccgaacataaatgggacggtatccgtagtcaaacgattatacgcaacggtgaaatgtttatatggagccgtggcgaagaacttgttacggacaagtatccggaatttaacacttttctaaatgttatcccaaatggtactgtgatggatggagaaatactgccctggattaataatgctataggttcgtttaacgacctgcaaacccgcattggacgtaagaccgtaactcctgcattgctcaaaaaaactccagttataatccgcgcgtatgatttgttggagtgggaggggagagacatccgaaacctgccgtatattgaacgtagggaactgttggaagagctgtaccacagcgtaaaagattatgctttaccattgcaactatctgaaagaatacaacttgataactgggaacacgccttgcacgaaaaagcaaaggcacgcgaactgcgcagcgaggggcttatgtttaaacggaacgattcggtttatggtgtaggccgtaaaaaaggcgactggtggaaatggaaactcgacccttttagtatcgatgccgtgcttacatacgccatgaggggcagcggtcgccgtgctaacctgtttaccgattatacctttgctctttgggaagataaagaagacggcacccgcgagcttgtaactttcgcaaaagcctattccggtttaaccgatgctgagtttcgcatggtagacgattacattaagaaaaatacactggagcgtttcggacccgtgcgcagcgttacccctaagctggtttttgaaatcgggtttgaaggcatagcattttccggaaggcataaaagcggtgtggctactcggtttccacgtatcctccgctggcgccatgacaaaaccattgaagaagcaaacagcatagaggatttgaaagagatgataccgaaataagtcataaagtttgaaagtcgaaagtttataaagttagcttcactcgactgagtttttgcggcctgacaaacctgaaactttcaaacttgaaaccttaaactaaaaaatgaacagggaacaacttttcaacatagcgcaaaattggtttacggcccgtggctggaggcctttcccatttcagcagcaaacgtggacggcttttttgcagggcaaaaatggcctgcttaacgctcctacggggagtggtaaaacctatgcactgtggtttccggtggtgctgaactacattaaaaacaatcccgactataaaaccaaacacaaacccggcctgaaagccatttggattacgccgctgcgcgcattatcggtagaaataaaacaggccgcacaacgtgttgctgatgaacttggcacgcaactcaccgtgggtatccgtacaggcgatacaacggcagc

SEQ ID NO: 2116 - DNA, 24302 bp, synthetic construct
  source 1..24302: mol_type = other DNA
  misc_feature 1..24302: note = Synthetic
ccattgatatttagcagtggcgcccgaattaccattggtgaaaacatagcccagcctgaatatagtaatcggtaatccctgttcaattgctctgaaagccattttttccattacccatttactttgtacgtatcccatatcacggctaaggcatctgaatacactatcgatcgggtcagtttctctcagtattgcgggttttgaaaaatggtgttcccagctaaaaacaccgaccgttgataataaagcgatttttttcagctttttatcagtggccagtttaatcagcatcctgaatccgtctatattggtagctttcatataagcatagggttgtataaagttaaccgcactgcccgcatgataaattatatctaactcactggcaagaaatgcataatcttcggcagataagccaagatccgggatagacagatcaccactcaatacctttattctgtttttatgtatatctggtaagataatcttttgttcgtctaaagttttgtataaccttgaagatgcatgcgaggtattttgcgacctgatcagtacataaatatctgcggcagtgtgatgaagtaattccgttagtaagtgtgccccaacgaatccggtaacacctgtcagtaatattttttctggttgcagaaagtttcctttcggtaacgagctgatagccaggtcacccaaatcgatatttgcatcttccataatttgccggctcaatgcgtcttttcctaattcgggatctttaccggcctgcagcaccttattttctaaaaatgatgccagatccctgatagaactattggtataaagatcgcctaatgatagtttacccggataatactcactgattctgttatacagtttgatcagcaacaatgaatgtccgcctatgttaaaaaagttatcatccagttgcattatttttctgttcaacacttcttcccatattttttttagctgtatttcatgtataccgacaggagtttcttcgtgcacaaaagtatgctgataatgatcagcgagcctgttcagttcatgctgatcgagttttccattatgattgaccggtactatcttgagcggtataaacgttgaaggaatcatataagccggaagtttttgactcagtcgctgacgtaaatcatttactgttatattccctgtaaaaaaagctctgattgatagaggttgcgtgtgattaaccaactgcacaacagcattatttacaccttcaatctgcatcaggtgatgctcaatttcctgcagttctactctttgccctcttattttaacctgctgatcttttcttccaagatattccagtaaaccttcctctgaatattttaccaggtcgccggttttataaagtctgtcaaaaatattatcaccctcccgtgattttataaaatgattcgtaataaacttttcatttgtaagctcgggttgttggtgatagccacgcgccaactgaataccggataaatgtaattcaccttttacaccggccggaacgactctttcgaacttatccagtacataaaatcgcatattagaagttggtacaccaatggtattggatgaatgtagcaggtcaaatacaaaccggttgactgataccgtagtttcagttggcccatataagttcaatagttttactttttgtgaccagtaattgcttaatgcgggcgggcaactttccgcaccagttccaataaccgaaatcttagagaatactgaaatttttggtaaagtagatagtacggaaggcgaaataaaaggaattttagtaatgcctttttcaatgagaaactcagccagcggatctcctaaaagtttattattaggataaagataaagcgtagcaccctgtgttaaaggcatccataagtcaatgatagaaccgtcaaaattgtaaggtgaaaattgaatggttttatctttgctgttgatctctaacaattctgctatttcacggatatagttattagcggcccggtgttcgattaatacgcctttcggatgaccggtggtaccggatgtatgaataacatacatcaaatctttatcgttgtagttatccgcataagagtcttttacttttgtttgctgataattgatcattaattcttccacaaacaaacaatccacttccaggtccttgattttttctttaaagcgggtagaagtaatgagatattttggttttatatcttccagaacagtacggattctttctaaaggatactgaacatccagtggaacataagcagcgccggatttaacaatccctaataaaacactgatacgatcaattcgttgatcgagcatacaggcaataaaatcgcctggtaccgttgccaggtcagataaaatttctgcaatgtgacctgactgttggttgaggccggcataacttatttcatctcctgataaatgaactgcaattttatcagggttattcattacctgtgtttcaaacaattcaataatcttcttattatctggtgcgggtgctggtaattgaagttcggcaggtacaggtgtaatctcaaaactactgatgttggtgtcagggttttctgcaatcgatttcaacagattcatatatcctgtagccaatgattgtatgaaattatctgaaaaaagcggacttttatactctatatttaccaataactctttcccctgtggtaatacttcaaactgcagatcaaattttgctgatccgttaaacagccattcgggctgatagaataccacatctgtcaactgaggtactaccttaaaagaatcctgcaatgcaaataccgtattaaaaaatggattatttccttcattgcggtaattaccggcatggtgaataatcatttctaaaggaatttcctggtgccggaacactttcggcaatatagtgctgatatttttcagaaaatctttgtaaagcggatcattctcgattttaatacgcacaggcaatgtatttacaaaatagccgatcatttcgtcaagtgcaggatgtgtacggttagcgaccggagagccaatgcaaatatcatcctgttgcgtataatgttgcatcagcaggctaaaagctgataacatcaccatataaagtgtaacctgttcgttttctgccagattttttaaatcatcactcaaccgttcatgaataaaaaatcggtattgttttccttttttgatattttttaaatgggccgtactgtatggcagatctaataaagtaacacctttcagataattttcccagaaaagaatactatctccggaaaaagttttttgttgctgccagtgggcataatctctgtattgaagtttttcttcaactgatggatgttctataacgtgacttaaagagtgataataagtgtttaatgattttattaagacgggcatagaccagccatctgttgcaatgtgatgaatcacaataaacagatgcgaaggcgtagcatcggcgtattgtaaataggcgctcagcataaaatcattactaaggtcaaaaggcaattgaatatcttctatgggtatatttccatccaaccggttcagttcaaaatgatcagcttccagtaatgtctgataggcaatgccgttttcgtttttaatgactgttcttaatatctgatgttcattgattaataggcggaatgctttttcaagttttttaaaagatatatcgggctttacttcataccttaccagtatgtgataatctgaactattgctcaactgatcgaggaaccataaactttgttgctgataagagagtaccggcattttttcggtggttgaaataatttccggtacaggggtgttggttgccgaatctgtcagataatctgccagctcctcaagggtaggatataaaaagatatcagcgacctgaacatgatttccgaaacgttttctgataattgatactgttttataggcgagtatggagttgcctccgaaataaaaaaagttatctttcaaaccgattggtgaagtgccgagcatcgacgaccagatagccgataattctttctgtatatcagtaaccggttccacatatgaagctctgttttcatacaaagtggatgtttccatttcgcgcagaacagaccggtcaatttttccgttgtcggttaaaggaaaaacatctatatgcacaaaagaagaaggaatcatatacgcaggaagtaattcgtataagtgttttctgaaggtatcacttgctacttctttttcagcaatgtaataacaaatcagttttttttcttcttctcctttggcaattacggcgcagttatgtaccagtcctgatttcctgagtacttcttcaatttccgatacttctactctgaacccgcgtatttttatttgcaggtctgctcttccggcaaaaacgatatttccgtcttccagttcacgaaataaatctcctgttttataagcccgttgaacagatccgttagctaaagtaatatttacaaaacgttcagccgtcaggtcggggcgtttccagtaacctttagaaagttgcacaccggtaatataaagttcaccggcttctcctttaggaacaggttgcaggttttcatcgagcaaatgataacccacattagtaaaggcacggccaatggtagcgaggggataatgttcattataatgaaatgcgctggtgataaccgtggtttcagtaggtccgtagatgttggtaacttttactttcgttttccagtagtcaataacaacatgcagcggtgcttcacctccgaaacaaagtttttttatgtttcctgttcttccgtctctggggagagtagaaagaattgacaccggaatataaggaagaatgctgattttccggtcaataatgaaatcaagtaaaggttcacctactatacgattatcgggatataaatgaacttttaatccgtaagaaagcggtgcccagaggtcaaggcccaaaccatcaaaattaggactcgaaatttgtaaaacactgtcattgatacccgggtcaattacttttttgaagttctcaataaaatttgctaatccttcatgtgttgccatcactgctttgggaataccggtgcttcctgaagtataagccagataagccagttcgtttggtaactgatccgattggtgagtattgtcatctatttgtagaatagcattcattgtttccggatcatcaattacaattaaatttcccttaaagaaagatgctttgtgccggagtgaggcagttgtaatcaaaaaatcggcattcacatcttctgccataaattctaatcttgcggtgggataagaactgtcaaaagaaacaaaagcagcacctgatttccatatgctcaacatcacgattacacgctcaatagactgatttaacagaaagataactttgtcgttttttttttacttaaaagagcgaggtaattcgagaatttgttcatattttgctctaactgccgataagaaatctccttctcctcatacgataatgcaattttttccgggttatatttcgaccaatagtgaatagaatcgataaccggcattggaatgttcagtttcatatattgtggatttagaattaatacgtatattagtgtacgtttatgtatatacgattatttaaatttcaaaactaaatcaaaaattaaatcagtaatttttaaaataagcgttatgaaacagtattcgattaatcccgcaaatactttaaaattatatgagctgatcagcaggtattggaccgcttgtgcaatgcatgccgtagccagattaaaaattgcagacttactttttgaaaaaccgctttcgattacagaattggcggataaaacaaacagtgacgagcaggcgctttatcgtttgatgcgcgcagtttgcagtgaaggtatttttgaagagaccgctgataaaacttttcagctcaatgagctgggaagtggctttttgagtaatgtttccggttctatcactccctgggcgctagcgaatctcggtgaacattttgctgctttcggaaagttaaccgaaggtattcagtcgggtaaagttcctttcgaagaacattacggaatgcaggtatgggattattataaacaaaaccccgaacgtggcgaaaacctggtgaaagcaatggcgggtgtttcgggcgcggtaattgagggtattacgcaatcttatgactttacaccttataaaacaattgtagacattggcggaggtaacggtgcattgctattcggtgttttgaatgctgcacccgatagtagcggaattgtatttgatgaaccttatgtaattgaggcaactaaaaagaatataccagatcatttgaaatcgagatgcgaagtagaaggtggtagtttctttgaaagtattcctgccggtgccgacttatatatgaccaagtgggtgttacatgactggaatgacgaacaggttgcccaaattctaaaagttgcttatgaagcgatgaagcccggtagcaaactgctcatcatcgaagccgtgattcctgatcaactcaatcaaccccatgcaagtaaattgctggatttgaatatttacgcaatgactaccggtaaagaacgaacagaaacagaatttaaatcactattggctgccgcaggattgaaattcaaacgattaatattaacgaatacggaattgtccggtattattgaatgtgaaaagatttagcatatggtaaaaataacagtcgaatatcctattaatgaatcatcatggtttgatataacctattatgtaaaaaagcatcttcctttatcaaaatccatttttggaagtgtattaaaaggtgttactatagaacagcgtatagatgaaaatgattacggaatctgtaaaatggtgatcggttgtctttttttcaatacagcagatgatttttataatcattacctgcccgcagctgaattattaagtaaagatgcggaaaactatacgaatgttacaccacatgttcatctgagtataatgaatgtgatggaagaattcagaattaattaatcatgaaaagtgatacatctttattattctttaatgaaaggttctgagcaatcagaatggttcgattattattattcgaaattaaatgctcattataagaataagattaaaagtttattaagatggcaagacagacaggtgagtctgcttgccatttttctattaatagagaaagtctgtaatggtgattggacttatttaaatcatattcagtataatacttttggaaaaccattcataaaaggcattccatttttcaatatttcacatacacaagatctggctgtagtactaacatctgaatctgctgaaataggtatagatgttgagctgattcagaacattgatatatctgaatttagaaatgtactcaatgaagaagaatataagaatgtagaatcggatgcattgcttttttttgattactggacaaaaaaggaagccgttttaaaagcgaaaggagtggggatgactattgatctggcaaaggttaatgtaacaagggatagctgtattgtagaaggagtagagttttttatgaaaaatgtttatattagaaaggaatactgttgttggattgcgcaacagttgaagcaaatacaatatattaaagttgaagaaatctttttaagataataattattttactgagtacgttgttgatgtataaaagatagaatcaaataaaagtatctatatatgagttttcagcaggatttttttaaatggattcattctattacagccactagtgtggcgaatgaaaaaattacaggttttaatttcggtttaatagaaactgaagaacagtatttaatgtacttaaccggttcggaacactttgatgcagatgatgatgattgggctacagaggttgattttgaacccgcgaataagtatctcggcttcggaaaaacattttctcagggaaaagaatggaatgaagtgctggagttctcaaaaaaaatattaactgactttatagaatctgaagcatttagcaactcttttctgaaaaatgcggttggtattaccaccgggtttgatgacggggagctgagtattgtttatctaaaagatgctgatgcctgaattactgtgaaaaaaacagcaagccctatctattaagatacaaaaaaaatggcaaatttccaaattggagttatgaattagttttactatcttaatattatgtcattcgcatggatgttgatgatctatagagcaactgccttctaagcagtaggtcattgatttatttttgttacacacattgcttatgttgatatatttcaacccgcttgctacttctcctgataatagtcatcttacctgttctttgacccaaaatagctattcgttttgaaaaaaattacggctaaccgtatgacaatgtcatttctatttctttaattgactgaaatttttatcaattaaagaaggaaaaaaagcataggatcggtacagtaatcagtttatgagatctctttttttgtcatgaatacttttaaactctaagatgaagttagacaataatggtattagctttataaacatttctgttatatttgcttgaaaatattttatataatgaaaatagaagtcttaagagcagacattactaaaataaaagctgatgcaattgtgaatgcagctaatacatctctcttaggcggtgggggtgtagatggtgctattcataaagccggaggtaaagctattctggaggagtgtattgctattcgaaataaacaggggaaatgtgctaccggagaggctgtttataccaccgctggaaatctgagtgcaaaatttgtgattcatacagtaggcccggtatggaacggtgatcaggagaaatgtgaaagattgctggctaactgttatcgtaatagtttattattggctgatcagttgaacgttaaagtaattgcattccctaatatcagtacaggtatatataaatttcctaaagaactggctgctaaaatagctatagatacagtcaaacattttaatactgctggtatagagaaggttttatttgtttgttttgatgaaggaaatgaagaaatttataagagacttctaaatgtatagcaacatgacgcccaaacaacaaaaaacgatcagcaaatttttaagttacgtattgaggcatcatcctgaacaaatacaactgcaactggatgaaaacggttgggcagaggtaggagagttaattataaaatctcaatcggaatatatttcttttgataaagaacaacttgaagaaattgttgcctccaatgataaaaaacgttttgtatttaatgaagatcattcgaagattcgcgccaatcagggtcattctattgaaatagaccttgcacttactacccaacaacctcctgaattactttatcacggaactgctgcaaagaatatagattctataaaaacaaccggtatacaaaaaagaaaccgacaacaggtacacctgagtgcagacaaagaaactgctttaaaagtaggtagccgtcatggtaaacccgttattttagtaattgatgccggtaaaatgtatgccgacggcatcagtttttatatttcagccaatggcgtatggctgacagattatgtagctccggagtatatattataactgctgcacagcgttttattttccactattataactgcagatggatatttgcgataattcttttctgttgataaaaatcaatatttacaaagggggttgtattttttttatttaaatacggaaaaccatactgcaagtgtatgagttttttaatatattgttttaaataaaaatgccccgaaggtagtcgaggcgctaaatgttttcacaacggaaaaatccttattgtgatttgctttcaaagtaaagctaacaaaaagttggaaataaaaaaataaaacttgctaaatgggaaaaaaaattcttggcttagacctgggaactacttctattggctttgcggtggtagatgagggtgaggattatgaaagttcattcatagaattggccggagtgcgtgtaaatcctttgacaacagatgaacaaacaaactttgaaaaaggaaaacctatagctgtaaatgccgaacgtactttgaaaagaggaatgcgacggaatcttgatcgatatcagctccggcgaagtgctctaataaaattattgaaaaataacaacattataaacgacgatactttactaaatgaaagtggtaatgattcaactttctctacctggagaaacagggctttagcagctaccgaaaaaatttctttagctgactttgctaaagtactactggctattaataagaaaagaggatataaaagcagtcgaaaagcgaagtcggcagatgaaggacaggtcattgatagtatgtccgttgccagacaattgtatgatctgaatcttacccccggacagttatcttattccttattaaaagatggcaggaagcgattgccagactattacagatcagatttaaatgctgaatttgataaggtatgggaatatcagaaacaattttatcctgagatatttacggatgactttaaaaagctgctttccggtaaggggcaaaaagctacatcagcaatattttggagccattacggttttaatatcgcagaaaataaaggaaccagagaagaaaagcgattgaaggcatatgaatggcggtcaaaagcgttttcatatcagttaacaaaagaggaagctgcttatgtaatcacagatatcaatggtgaaataaataaatccagcggatatcttggagaaataagcgatcgaagtaaagagttgttttttaataaagaaacagttggtcaatatctatataaaaaactacagaataatcctcatagccgacttaaaggacaggttttttaccgacaggattacctggatgagttcgaagtgatctggcagacccaggccggatattatcctcagctgacaaaccaactaaaacaagagttgagagatatcgttattttctatcaacggaaattgaaatctcagaaaggcctgatcagtttctgtgagtttgaaagtcaggaaaaagagatggtgcagaatggtaaaacaattagaaaaaaaatcggcttacgtgtagcacctcgttcttcacctttgtttcaggagttcaaaatatggcaacaattgaatcacctggagttcaggaataaaaattcccgtgagaaaatagctccatcgcaggaagaaaaagatttattgttcgaagagttaaatgtaaaaggaagattaagtgccggcgatgcttttagaatattaggatataaaccatccgattgggaaatgaattataagtttttggaggggaataaaacctcaaaagagttatacgacgcttttttaaagatattagaatatgaagggtatgaaaatagtttaattaaaagtgataaagatgacaatatcgatgtatcggtaattgaacaaccggcttcagaaatcaaaaaaatggttgaaacggtttttaattcattaggaatcgatactggtatactaaaatttgatgcagagtctgacggtaaagcatttgaaaagcaaccttcgtatgttttgtggcatctgttgtattcggtggaggacgatgttaaaaactatacacaggaagatataattagatatggtaacagtaatgtgggccttaaaaaaaagatatgtgaaaaattcggttttaaaccggaacatgctaagattttatcagaaattgttttcctgggtgattatgccagtcttagtacaaaagcattaagaaagatcgttcctttcatcaaagaattaacttatgataaagcttgtgcggaagcaggatacaggcattcggcagcttctttgacgaaagaagaaatagaaaataaagtactaaaagatcggttaccttctataaagaaaaatgaattgcgtagtcccgtagtagagaaaattctcaatcagactgtcaatgtggtgaatatgctgatagaccgggaaaatgaaaagagaagattaacgggtaatcaacacccttttcattttgatgaaatccggatagagttatccaaagaattaaaaaagaatacagcagaaagaaaagagcttagtactgctattaattcagcagagttaaaccatataaaaatttcaaaaatacttcagactgaatttggagtacctaatccttcaagaaaagatataatacgttataagctgtatgaagaattgaaaaataacggatacaaggatatttatacaaatacttatatcccccgggaaatattattcagtaaacaaattgatgtggatcatattattccgcaaatgacactttttgatgatagtttctctaataaaacattggtgtttagaaaagttaaccaggagaagggcaatcaaacggcattcgattatttgttaaataaaaatggtgaaaaggggatagaagaatatttaaacagaattagattgctgcatgaatttaatttaaaaaataaggaagaaggtattggcaaagcaaaatttctcaaactgcagaaaagagagagcgaaataggagacggctttattgagcgggatttaagagaaagccaatatatcgctaaaaaagcgaaggaaataatgttagatatatcaaggagagtggtttctaccagtggaagtataactgcgcgtttaagagaagactggggactaaacaatatcatgcaggagctgaattatccacgctataaatctgtggggcttattgaatctgttctgcaaaaagatggccagattaaagaaaatattgtcaattggagtaagcgcgatgatcatcggcatcatgcagtagacgctttagtgattgctttaacaaagccagcctatatacagtatctgaatcacctgaatgcacggaagaatgaaagtcatccactccatggacatattattggtatagaaaagaagcacgcggatattgtttatgattctctgggcaaccggaaaagaaaattcaaagaacctgtaaagaatttccgggctgtagtaaaagaacaactcgaacaactgtttgtatcgcacaaagcaaagaataaggtagttactaaaaacaagaataaaatcaggataaagcagtttgaaaaggttacaaccgtactaacgcccagaggacagttacataaagaaactgtttatgggaagtataatttttatcaaagtaaggaagaaaaagttagtgctaagtttgataaagctactattgaaagaataacaaatcctcactataggaaggtattgttgcagcggttgactgaaaatgataatgatcctaaaaaagccttcaccggaaaaaattcattgagtaaaaatccggtttatctggatgctgaaaagacaaaaatcttacctgagttggtcaaattagtttggttggaagaggattactctatccgtaaggagcttactccggataatttcaaagatgataaaagtatagaaaaagtgttggacgaaggagtgaagcgaatattaaaagaaaggctaaacgaatttaacggagatgcgaagaaagctttctctgatcttgaaaaaaatccggtatggctcaataaagaaaagggcataaccattaaaagagttgctatcagtggtgtgaaaaatgctgagcctttaggctttaaaatggaccatttgggaaagtcgttattagacgtaaatggtgaattaattccgaataattatatacaacctggcagtaatcatcatgtatcaatctatgcagatgaaaaaggagtattgcaagacaggatagtttcatttatcgatgcggtgcgattagtaacaaatggagaaacagtgattgataaacaatataatcagggtttgggttggaagtttctgtatacaattaaagtcaatgaaatgtttgtatttcccaatggtttgtcgggtttcaaccctttggaaatagatctgctggatccaaagaataaaagcatgatcagtccgaatctgttcagggtacaatctatttcattactcaagtatgggaataatattatcagagattttaagttcaggcatcatcaggagtcgaagctgaatgatgataaaaatttgcagggggtagcttatcgtcaggtaaaaagtttaaaagatctggctggaattgtaaaagtcagaatagatcatattggtaatatcgtttcgataggagaatattagagtactgaatattgtttacggttgaataaaaaacatttcaacttaagagaatgataaagaaaactttatactttggaaatcctgcttatctgaaaaccagtaatgaacaattaattattgagcttcatgatagcggtgaaagaagaacaatacccattgaagatataggtttactaatattagatcatcgtcagattacgattacgcaggttttgttggcgagattactggcaaataatacggctgttataacctgtgatgaagcgcatcatcccgcagggatgtggtttagtctggatggtaatactttacaaagccagcgttttcaagcgcaggtggaagctacagttccactgaaaaagcaattgtggcaacaaacagtggtttctaaaatacaaaaccaggctgctcttttgaaacaggaaaggcaggaaagtaagctattgtatacctatgccggtgaagtgaaaagcggcgatagtgaaaatcacgaagcaaaggctgcggcatattattggaaaagaattttcccggactttctgatgtttaaaagagatcggttcggtgatcctcctaataatttattgaattacggatacgccatacttagagcaatagtagcaaggagtctgacggggtcaggattgttaccgactttgggaatacatcatagaaaccaatataattcctattgcctggctgatgacatcatggagccttaccgtccttttgtagataaactggtttgtcaaatcattaagggtaatggtaaatttttagagatgacaccttctatgaagcatttattgcttagtataccttcaatggatgtaaccattgaaggaaagaatagtccattaatgaatgctgtgcagcgtacaacagccagtttaagtaaatgttatgaagggaaggccaggaaaataatttatcctgagttgatttaatttgaggatagaaaagctgaaagtaaaatgtttcatcgtataaatgcatatcgtactatgtgggtattggtattctttgaccttccgactgaaacaagaaaggaaagaaagatttatgcaaaattcagaaaagaaattttaacggatggttttaccatgtttcagtttagtatttatttacggcactgctccagtaaggagaatgctgaagtgcatatcaagcgggtgaagagtaaattgccggtaaaagggcatgtaggtattatgtgtgtaacagataaacaatttggcatgatggagattttccgtggcagggaattaagtccggtgccggaagtggttcagcaattggagctgttttaacggggaaagatacctgaataggaataaaaaaacggagctgcagctccgtttttttatttaaaatctcttgtaatctgttaattataaaagatttagatgagttctgttgtgtaatactgaagttacatcaaaaatgaaagcaaatcacaactattttttctttattccaaactatttttctgttgtgtaatactgaagttacatcaaaaatgaaagcaaatcacaactaggtgttttatgttatgaagacttaacaagttgtgtaatactgaagttacatcaaaaatgaaagcaaatcacaacaaaagaggattaataacaataattaatgaagttgtgtaatactgaagttacatcaaaaatgaaagcaaatcacaacgataaggcagaggtaacgcaggattatattgttgtgtaatactgaagttacatcaaaaatgaaagcaaatcacaactagagtataaagtattgatcaaaaaaggaaattgaagttacatcaaaactgaaagcaaatcacaactagcaatagaccttcttaacaataggtcgagttgtgtaatactgaagttacatcaaaactgaaagcaaatcacaactagcaatagaccttcttaacaataggtcgagttgtgtaatactgaagttacatcaaaactgaaagcaaatcacaactagcaatagaccttcttaacaataggtcgagttgtgtaatactgaagttacatcaaaactgaaagcaaatcacaactagcaatagaccttcttaacaataggtcgagttgtgtaatactgaagttacatcaaaactgaaagcaaatcacaactttctctaaggcttatggagtttcaatacagttgtgtaatactgaaattacctcaaaaatgaaaacaaatcacaacggtatcggtaaagcccctgatacctgtttagttgtgtaatattgaagttacctcaaaactgaaagcaaatcacaaccactgtgttggatggaatgggacataatatgttgtgtaatactgaagttacctcaaaactgaaagcaaatcacaaccgggaaaatcaataggttttttcccgtattgttgtgtaatactgaagttacatcaaaaatgaaagcaaatcacaactatcacattaatgtgattgcatatagtacgttgtgtaatactgaggttacctcaaaacagaaagcaaatcacaactaatataattagcgaaatgggcgataaatggttgtgtaatactgaagttacctcaaaactgaaaacaaatcacaacaatagagcggaaccggaacaatagcaggatagttgtgtaatcctgaagttacctcaaaacagaaagcaaatcacaactttaagaaagttacgactgaactttatagtgttgtttaataccgaagttacctcagaaagaaagcaaatcgcaacggtaatgacctgcacaacgattgaataatagtgtaatgctgaaatttcattaagactgaaagcgaatcataaccaatcatttaaagtaaaggttttatgaaaagttgtgtaatactgaaattagagtaaaacagaaagcaaatcacgacggagtaatccgaaaaggctgtaaattcattttgttatattgaatttactaaaatgaaagcaaatcaccgctaacgatttccctatacttctttttgagctccgtaatactgaaattacctcaaaaatgaaagctaatctcaacacatcaataataccccaaaatgtaatccaggctttattcttcaaaaatagtatttaacttattattttcaataatatgtttataaaggttgatgtaagtcaagtttgttattttatagtgcagcttaaactactgcactataaaataaacattgttgtaacttatttctttaccggctttcgtactatcaccattcctgcataactcggcgtagcatagtattgagcatccaggaggctggtggggtcttttaacttgggcacaactaacagtgcaccccctcttttattgttgttctgactatcacggatggtactgccataatcgatagcgatctgactacctgcctcaacctgattgaactccatcgtattgggccttacaaaatcatcttgtccatcccatttaactgttgcatcctgaactgcacaggtcatggaggcttttcctttaaagttgactgaaccttcggccgaaatggttaccgttatcgggttagggttacaggtaggttggagtgctgagccttcccatacacctttcagagatgcaaaagctgccggtggtgttgttccaaaatgttccacgttattgcggaatctgtattgattcgaaaactctatggaagtatagccatcatacaactcaccgttatcattcgcataaattaatatttgttgacgtttgaagtctgttgtattcgcccaggtggtaatggttgtgttagagggggtgccagatacacgaatgaattgcttatagttgctgcctccgttggcattgatatctacgttattctcggccagtatgctgccacttgcgtttaatagtttcatcgtgaaggtagtgccatttcttgaaagaacgagcttgcccttgccgatatcacttcctttgcctgcaggagttgcatatatggcaaccggatgctctcccgcgtagaaatcagctacggcatttgcgtctgtataagtaagcgatgcggccccggaaaaattctttgcaatgcctaccgaaaattctgaagatgtaccaccttcgatcggggtttcttcttgatgatcgtcatcgtcggcagcggtaccgtctttaccgcatgaaataaatacgactatactggccatgagaactgcactcacactaaagtattttgcgaagcgctgagtttttattactaatctgtacgttaagtttatcatatcattgttttataaaatctgaatttttatactgtgcctctattgctattattgtaattagcttcaggcaggtgcttcccggtttttcattttattaattttaacagcataaaattcggaaaacgtttctggcagcacaatacgcaattttgcgtattattttattaaacaaagattgatattgatacaacttaaacgacatacagaaggtatgttcttctgaaaagcaacattcttcggcgaacgatctttatgtaaaaatggttggtttatgttgtatgccgaagcctgcaccataatatacggcgacttcttttcttagaatcagataacggtaaaaaataaaaagaagtaagaatagtttaaaagaatattgagcgtaattttattcgtgtagatattaatgttattattttttattgaactcttcttcgatgaaatgaatacaacagataaaaaaagaacggtaagataaaaattgaacccagcatcagcgcccaggccaatacttctattgttctttcacttccctggtgatcaaccagtgaaagagattgattatttgctaacagaatgagatcgggaaaatgattataggtggccgctacgagaatcataaaagtttgtaacgccacgcatattctcatcgttgtaatttttttgtgcttaaatgcccaaaagagtactatgatcgataaagtagcgagaacgatggcaatctgaccgatcgtttgcccgaatatccaggtgaacaaaggaatctgctcaaaatatgatgttgtgaataccagcatgcctgctatcattactacaaaaaagtatgttctggcttttccggtcaggtattgtacaaattctttattctctgcttctccgatgatataaacagatgcaagataagcactgattgcaacggtaaataaccctacactaataccgaatgggttccaccagctgaaaatataggcacttaaaaaatctgtagcagccggatctatgtgtcgtgaaacggtactggcagcaatcaaacccagaaagaacggggttataatgctgctgacgcggaatatccggttatacacttgttgccagttgtcgttaattgcatcatagtgtctgaatgtaaatgcagtacctctggctataattcctaataacatcagcaccaggggtatatggaggtagatagaaaccgtgctatagatagtcggaaatccgacaaacagcaccacgatggcaataatcagccacatatgattggcttcccaaatcgggcccattgatttgtaagaagtgtttttgactttctcaatattttttttacctgtaaatgtttctaatattcccactccaaagtctgctccgcccaaaatcaggtagagatataacgatacccataaaaaggcgatcactacatataacatggctaatgttttggcttttttgtaataaaatggggatctgtgggatcataaagtttacccaccatcttcatctgtctgtaaagtagaaatattacaatcgcggataatgaaataaacacagctgtaaatatgtaaaatgaataaactatacccggcataggtgttactgcatcttttgtgcgcatgatttcataaatgatccacggttgcctaccgacttccgttactacccaaccggcttccaatgcgatatagcccagcggaatggcaaagacgaacagtttaaggaaccatgctgccgacagccagctttttttcttccagacggcgagcagatatattaatgagataaggcaaagtaacattcccaggctgatcataatttgaaaagcatagtgtgtaatggctaccggtggcagattttctttaggaaattcatttaatcctttcacgggtgttttaaaatctccatgaaccagaaagcttaaaacaccaggtattttaatggcgtaatttacctcttgtttttcttcatcaacaattccacctaatatgaaaggagcagcaggttctgtatgaaaatgagcttccatagctgccagtttgatcggttggcgttttgctacatcttttgctgatatatcaccactcagcggttgtaacagcgctgcgatacaggcgcaggtagctgcaattgaaaatgctttgcggtgaaactcaatgtttttctttttgaggatcatgagtgcatgtactccggccaccgcaaagcctgttgcggtaaaggctgccaataccatatgcaatgcctgtgaaaaccaggcttcattgagcatggcttttatcggatctatattagagaaaacgccgttctgataatcaaacccggaaggactgttcatccatgcattagcagccactaccaatataccagatgccagtccgctgatacccaccagtaaacctgttatccagtgaaaccatttgttgaatttgttccagccatatagaaaaaagcctagagcaatcgcttctataaaaaatgcagtaccttctaaagaaaacggcatgccgaaaatggggccggcatgtttcataaactctggccagagtaagcccagctcaaaagaaagcatggtaccggatactgcaccagtggcaaataaaatggcaacgcctttactccaggccttggttaatcctttataaacttcattaccggttttcagatatttataatgactgatggccatgaagaatggcataaccattccaacgcaggcaaaaataatgtggaaacctaatgacatggccatttgtgaccgggctgcaataaaatcattcatgttattcagaataaagtaatgctaaatgtatggcgcacaaacgagggagaatagagatgatatgtaatacagcagaaaagctttatacaatcgctcaattctaccagtaatattgcaaaggtagctaataagtggagaaggaagagttttttgttacacagtttttcaccattaagaaattaaggttatttagcacttcaacttacgtattaattttttcaatgaatgggtatcgatgggaaacatgaaggtaatgaaggttaggaagcactgttaacccgctcttcatacgcttttttccttcattctcttcctatttaaattacaattaacagctagaatgaaccaaagcgaagcggtatgggtttcttaatttcttaatagtaaatatcatataactgcgctaatttagctgttctaataattttgccaatgccagttgatctggttgacaaacggtaccgaaatcaagaactgccggattggcaaaactcatcggatttacggttgcctttcttaatgaaccgtgaaactccctggcaccggtttctttcatcaactgttcaatgttctcagcagtaattcctgcaccaggcattatgatgattctgtcaccggctttttgtaccagttcggctaataatgaagtggcttcaggggcaccgcttttttgtccggacgtgagaattctttcacaccctgcatcaataatatcttcgagtgctttgaatgggtctggagtagcatcaaaagcacggttacaggtcaccttcatcggataagccagctctacaaactcttttagctggtcaacattgatcgtaccgtctatattttgtacaccgattgaaattccatcgcattgtaattccttacacattgcaatatcatgtttcagaatttcaatctcgttttcatcataatagtaatttccacaacgcggacgaaggatgggataaagcttaatacttattttatctctggtttgtttaattgttccatagccgggggtagtaccaccttctaccggattatcacaaagctctacacggtatacacccattttttcagcgatgatgcaagactgtatattgaatgaacaaagttcgaataatgcttttgccatagttaataaatactttttgcgttaattaatttttcttccgtaccgctttttacagcgaatgtaaaacctttttgaagagcatatgctccgtagttaccatttttatctaatgcaagaaatgcgacctgaattgtttttgatttttcagggttgcgttttatgatgcgttgagttgcttctttacaggctgcttccggagcatatccctgtcgcataagttctataatcagatgtgcacctactatccggataacttcttcacctactcctgttgcagtagccgcacctacttcaggatctacgtataagccggcgccaatgataggagagtcaccaacacgaccatgaattttataagccaggccgctggtagtgcaggcaccgcttaaatttccatttacgtccagcgccagcatgcctattgtatcatgattatccggcccaccgggcataggatcattttctttactgtaggattgattttcgatattcatggatggcgagtagttggaggtttttaaccattctttccatgccttttcactttggggtgtcagaaggttttgttttttgaaaccgttggctaatgcaaaacgtaatgcaccttcgccgcttaatacgatgtgtggtgttttttccattaccagccttgcaacactaattggatgcataatatgttctatgcacatcactgaaccacaattatatttttcatccataatacaggcatctaaggtaacacgcccttcacgatctggcaaaccgccatatcctacactattaccctttggatcagcttccggcacacgaacgccggcttctactgcatccagtgcatgacctttttctgccagtactttccatgccgcttcatttgcctgcacgccgaagttccaggtagaaacaacaattggttttttaatagtagtatcggaggaggatgcactcactacttttgcagataagagtattcctgctgaccccaatactgagttttgaatgaattttcttcggtttgacatatacaattttttacgaaaacttttagtttaccggtttgaaaatattaatgcggacttacaaaggcttcttctatttcttctaatgttttaccactggtttcttttactaatttccagataataatgagattaatggtgctgaatgcagcaaaaatccagaacaaccacgcagcacctgcctgttccaataaccatggaacaaattgtcctaccatccaaaccgctacccataacatcagtgtacaaaatgctacgctctttactcttacatcggtagggaatatttcattgatgattacccacgtaaccggacccagtgaaaaagcaaaacaggcgataaaaaataacatcaatattaataggaggtaaccctgcgtgtaatctgtgtaaaataaccatccgcaacccagtagtgaaactattataccgatcaatccgattatcattagttttcttctaccgtatttatctgtccatttaatagcaataaaggtggataacagattaactgatccgataattacctgaaacaataaagcattctgactgtctattcctgctttttcaaaaatgcttggtccatagtagatgatagcattaattcctgaaaattgttgcagaacggccagaatggtacctatgaataaagtcagccggagaggttttgaaaaaagagacctgctgttttgccggcttttgtccgcagcttcttccatcgctttaaattctctggctgctgtttccggtggaatgattttaaacaagatcgatgctgctttttgtttttcattaatactgatcaaccaacgggggctttcaggaacttttgccagtaacaacataaaaata

SEQ ID NO: 2117 - DNA, 24302 bp, synthetic construct
  misc_feature 1..24302: note = Synthetic
  source 1..24302: mol_type = other DNA
gtggcggacggaggtgaaacccgcttccattcggtaaagaatggattggcttatgttactactccgggattggttggtgttcatgatggggtacgcccgtttgtttcccgggaagtcatagcccgttgttatgaattggctgccgaaaaaaaggcggtgattcccgtgatagatgtggtggagactgtacgccatcttaaaggagaagaaagcgtgaccgtcagccgggatgagtataaattggtacagaccccccaggtgtttgatgccgatttactgaaacaggcctatgaacaaccttatacttctttctttacggacgacgcttcggtagtggaagcgatgggagtatctgtatacctcgcggcaggtaatcgggaaaacattaaaattacgactccctttgatttgaaaatagccgctgctttgttggattcatgtttgatttagcttctcgtgacataaaatacctgtcgggtgtagggccgcaacgtgcctcagtactcaataaggaattgaatatctattcccttcacgacttattgtattatttcccctataaatatgtagaccgtagccgtatctattatatccatgagatagacggtacgatgccttatatccagttgaaaggcgaaatcctgggctttgagacggttggagaaggtaggcaacgccgtctgattgcccatttctcggatggtacggggattgtggatttagtctggtttcagggaattaaatttctcatcggtaagtataaggtacatcaggaatatattgtatttggtaaacccagcgtcttcaacggacggatcaacattgctcatccggatatcgataatgcttcggaactgaagctttcgacaatgggattgcaaccttattataatacaacggagaaaatgaaacggagttccctcaattctcatgcaattgagaagatgatgagcgccgtagtgcagcaactccgcgaaccgctgcccgaaacgctttctcccgctatattgacagaacatcatttaatgccgctgacggaagctttgatgaatattcattttccggcaaatccggaattgcttcgtaaagcgcaatatcgcttgaaatttgaagaacttttttatgtacagctgaatattctccgctatgccaaagataggcaacggaaataccgtggatatgtatttgaaacggtaggagagatatttaatactttctatgccaagaatttgcctttcgaactgacaggtgcccagaagcgtgtactgaaagaaatacgccgggatgtggggagcggtaagcaaatgaaccgtctgttgcaaggggatgtaggtagtggaaaaacgttggtggcactgatgagtatgctgatagcgttggataacggttaccaggcttgtatgatggcgcctaccgagattctggctaaccagcattttgaaacaatccgcgagttgttgtacggaatggatatacgtgtggaattgctaaccggttctgtgaaaggaaaaaagcgggaagtcattctcaccggtctgttgacaggagatgtacgaatactgatcggtacgcatgccgtgatagaagataccgtgaatttctcttcactgggtctggtcgtgatagatgaacaacaccgtttcggtgtggcacaacgcgcacgtttatggactaagaatgcacagcccccccatgtgctagtcatgacagctacccctattccgcgtacgctggccatgacattatatggtgatctcgatgtttccgtcattgatgaactgccgccgggacgtaaacctattgtgaccattcataaatatgatgcgcaccgtgtaagcttgtaccaatccgtccataggcagattgcagaaggcagacaagtatatattgtatatcctttgattaaggaaagtgagaaaatcgacttgaagaacctggaagaaggttaccttcatatttgtgaggaatttccggattgtaaagtctgcaaagtgcatggcaagatgaaagcagctgagaaggatgcgcagatgcagctttttgtttcgggcgaagcacagataatggtagcgactactgtgattgaagtaggcgtaaatgtaccgaatgcttccgtgatgattattgagaatgcagagcgcttcggtttgtcacagctccatcagttgcgtggtcgtgtaggtcgtggagcagaacagtcttattgtattttagtgaccggatacaagttggttgaggaaacccgcaagcgcctggaaattatggtacggacaaatgacggttttgaaatagcggaagccgatctgaagctacgaggtcccggtgatttggaaggcacacagcaaagcggtattgccttcgacctgaaaattgccgatatagcgcgcgacggacagctgctgcaatatgtgcgcaatgttgctgaagaagtggtggatgctgatcctaccggtattcgtccggagaatgaaatcctgtggcgccaactaaaggcacttcggaaaactaacgttaactgggcttccattagttgaataacggttaaacatacactttatttgcatttttatgttgtaaaacatataagtccttatcttgccgatatacagggagttaggaggtgatttgatatgtaccttttagtcccttaccgaaaaaatagttaagaacagccttttcatttagagaagaaatactacctttgggagaattttttaaaagaatgacgaaacggaatgaatttcaattgcattaaaacgatcctaatagctgcgacggcaatggtcagcctgaattctttttctcaggatttgattgcccgacaagcccccatcgacaggaaactaaagagcgttgactcgttggctttacagaaacagatacgtgctgaacaatctgcttatccaggtctaagtctatatccgacttggaacaatgagtatgtacaagcttatggcgatgctatcgttcctgaaagctataaagtggacctgacaggtttctgtatgcctaccacgcatacgaagattaccgatgtatttggctatcgtcccagaagacgcagaatgcactatggtttggatgttaaagtattcatcggtgatacgattcgagctgctttcgatggtaaagtacgcgtagtaaagaatcagggacgccgtggctatggtaagtatatcgttattcgtcatgacaatggactggaaactgtttacggacacttgtccaaacagatcgtagaaattaatcaattggttaaagccggagaacctatcgctttaggtggcaatacgggacgttctaccggttcgcatcttcattttgaaacccgtttcctgggaattcctatcgaccccgctttaatgttcgactttgaaaagcaagacgttgttgctgatcattatactttcactaagaccaagacttcaaaaggaactgctcgcagcatggcttccggtgaaggtttgttctataaagtgaagagtggcgatacattgtctaagattgcatcccgtcagggagtatctattgacaagctctgtcagttgaatcgcattacacggaaaacaatcttacgtccgggacaggtattacgttgttcgtaagatatcaataaacccataaagaagagggcactttaatataatttagagtgccctcttttcttttttctttaattattcctacctttgcaaccaatttgtaaggaaatgaaagataccaaacaacaatttgagcatgtcatcgccatctgtcgtgatttgttctccaagaaactacatgattacggtccggcatggcgtattctccgtccggcttccgtgactgaccagatattcattaaagccaatcgtatcaggagtattgaaaccaaaggagtgacgttggtggacgaaggaatacgttccgagttcattgcgatagtcaactatggtattgtcggattgatacagttggaactgggatatgcggaatcagccgatatcacgaatgaagaagcaatggcgttgtatgacaaatatgctaaaacttcattggatctgatgcttgctaagaatcatgattacgatgaggcatggcgcagcatgcgtgtcagttcatacactgatctgatattgatgaaaatctaccgtacgaaacagattgaaagcctgtcaggacagactttggtttcggaaggagtggatgctaattatatggacatgattaattattccgtattcggtttgattaagattgaatttggagactaaacagaaacatataatctggaagagttgggtgaatgtttgccgttttttattggcggcggtattcatcttttccggctttgtgaaggcagtcgatccgttaggctctttttataagattcaggattatctgacggctttcggaatggccgcgtggtttcctacatatttgcagctactgtttgccatcgtattgtcggcgttggaattctccgtgggagtattcctgttcttcggtatacggcggcggtttgctacgactctggcattgttgctgatgatcgtgatgacaccgctgacactgtatctggcattagcgaatccagtgtccgattgtggttgtttcggtgatgcatgggtgttgacaaactgggaaacgtttggcaagaatgtggtattgtttattgcagccgtatctgtcttcaaaggtggaaaacaaatcatccgctttattacggcaaagatggcatggatggtttctatgtatacattcttttttgtgtttgtgctttcattctattgcctggacaatctgcctattctggatttccgtccttacaagatcggaaagaatatcaaagaaggcatggaaatacccgaaggggcaaaacccagtgtgtttgagagcaagttcattctggagaaagacggaaaaaagcaggaatttacactggataattacccggatagcacatggacgtttgttgaaacacgtacggtgttgaaggaaaaaggatacgagcctccgattcacgacttctctattgtaagtctggaaaccggagaggatctgaccgatagcattttatcagataagggatatacattcctgttagtagctcatcgtattgaaaatgctgacgatagcaatatagaccttattaacgagatctatgattatagtgtggaacatgggtacggcttttatgccctgacttcttcgccggaggaacaaatagagttgtggcgtgacaagaccggtgcagaatatcctttctgccagatggacgacatcactttgaagaccattattcgttccaatcccggactgatgctgataaaggatggtgtcattctgaataagtggagtgataacagcttgccggatgaatacgtgctgacggatagtctggataaactggaactcggtcagcagaaacaagaaagtgatttgcgcacgattggttacgttcttttgtggtttattattccgttgctgatggttatcggcgtggatattctggttgtgaagcgcagggaaaggaagagagcgaaaaataaagtgattagcgatggagtgatgagtgataagcaagagcttcctcagccatagaccacaaattataaattaaaaatacattaacccttttaataaataaaaaacaaaatgagaaaaaacattgttgcaggaaactggaaaatgaacaaaacccttcaggagggtattgctcttgcaaaagaactgaatgaagtattggctaacgaaaagcctaactgtgatgtaatcatctgtactccttttatccacctggcatcggttactccgttggtagaccctgctaagattggcgtaggtgctgaaaactgtgctgataaagaatcaggtgcttacactggtgaagtttcagctgctatggttgcttctacaggtgctaaatatgtaatcctgggtcactcagaacgtcgtgcttactatggcgaaacagttaccatcctggaagaaaaagtaaaattggctttggctaacggcctgactccgatcttctgtatcggtgaagtactggaagaacgcgaagctaataagcagaatgaagtagttgctgctcagttggcttctgtattctctctgtctgctgaagatttctctaagatcgtattggcttacgaaccggtttgggctatcggtacaggtaaaactgctactcccgaccaagctcaggaaatccatgctttcatccgttcattagttgctgacaagtacggtaaagaagttgctgacaactgttctatcctttacggtggtagcgctaaaccgtctaacgctaaggaattgttcgctaatcctgacgttgatggcggcttgatcggtggtgcagctctgaaggtagcagacttcaaaggtatcattgatgcttttaattaatagataatggaagattgataattgataaccggtgaagtgccggttgtcggttatcagtctctataatcatattatcaatcgtctattattatattattcattatgaagaagcttggtttacttttaattgcatgctttgctttcgccgcttttgcttcggcgcagaataacattgtgaggagtttggaacgcaatgtgccgggacagggtaaggtaaccatccatcaggatgcccgcatcgaggccttgataggtcaggaatatatccccaacggaacggagaacagagtgcttaaaagtcagggtttccgtgtacaggtgtatgccggaaacaataccagtagagccaagaacgaagctcacgctgtgggctcacgaatcaaagaatatttcccggaactttctgtttatacctctttcaactctccccgctggctgtgccgtgtaggagacttccgcagtattgaagaagcagatgccatgatgcgccagttgcgtgctacaggcgtattcaaagaagtttctattgtgaaagagcagataaacatccccttataaaaacttactcatgttaggaaaagaagaaatcgtatctcctgcactggatgaactgaaagaacactatcagcgtattataactttattgggcgaagatgccgaacgcgaaggactactgaaaacccccgaacgtgtagcaaaggctatgctgagtttgacaaaaggctatttcatggacccgcacgaagtgctccgctctgccaagtttaaggaagaatacagtcagatggtgattgtgaaagacattgatttcttctcactttgcgaacaccacatgcttccgttctacggaaaagcacacgtggcttatatccccaacggttacattacagggctgagcaagattgcccgtgtagtggatatcttttcccatcgccttcaggtgcaggaacgcatgacgctccagattaaagaatgcatccaggaaacactgaatcctctgggtgtaatggtggttgtggaagccaagcacatgtgtatgcagatgcgtggggttgaaaagcaaaattccataacgaccacttccgattttacaggtgctttcaatcaggcaaagactcgtgaagagtttatgaacctcattcgccagaattcatttacataacagtcccgtacgtttcatgaaaggaaactacagttccatgaaggaaaactgttgttcccattaaaggaaacgcgcgttccctttaggagagaccgtcgttcccattaggggaagctgtcgtttctgtatgagggagctatcgttctcattaggagtaaggtgatttaaccgagtacaactctgtctcccaaccgtttggccataatacttttgatctcacgcagttctgagtagcgtttcatgatagaggtgcattgttcttcatcattggctacggcagggtcttgtaaggcatacatcatgtgtttcatttcttcactgatgatggcgaacttgaaattaatcatgagcgtaggcaccaattcgaataggcgttcctcgtcggttactaacctttgggctttggagtgatacttactcagttggtagcggtcggcaatcaactctgtacttagcttactgataattgggtcgggatgtgccaggaaataccgttctgcggtgaatccttcattatgtatatgctctgccgcttctgtcaacatctgcctgtgcagcgggttgtggaaagccagttcatcctccttcaagtcattgactatgtattccgttaccgtaatgggaatttctttcccttcctcatcgggaacgttgcacaatattttctctccgtagcgtactaccatttgcaggataaggcgctcgtatttgtagaattcctgtccttcttttccctcctgtgggatataagatacgtattcggcagcttccggtggaagcggtgtaccaccgtcaggcatttctccatccatgggataaggaggcatgtcttcagggtagggtggttgcattccgtcgggaagcggtgcttgtgcagcgtcgcgggctgcattattctttcttgtttcccggtttctttgttccgcctgcttctcagcctgcgtttcgcgtcgtttggcaacttccgaaaccagcagtttgtcttctatacgaagcagttggctgcattctttaatatatacatcacggacaattgcttcaggaataatagatatactttgtacaagattaccgattaattcagcacgcttgataggatcttttcctgcatcttccagtagaagattggttttgaaacgtataaagtcagtttcattatcttgtatgaatttctggaattccgtagcgttgtgcttgcgtgcgaaggagtccgggtcttccccgtcgggaagcaggcaaactttgatattcattccttcttccagcagcatgtcgataccacggagagaagccttgatacctgctacgtcaccgtcatagagtaccgtaatgttattggtgaagcggtgaatgagcttaatttgtcccggagtcagtgccgtacccgaagaagctaccacattctccacacctgactggtgcatggaaataacgtccgtgtatccttccaccaggaagcaacggtcttgtttcacaatcgcttgtttggcaaaataaatgccatacagctcactactcttatgatagatttccgattcgggagaattgacatatttaactttgactcccttcgtcgcactgctaagcacgcgcccgccgaaagcgaccaccttaccggaaagtgtgtgcactggaaaaataacacgtccccaaaagcggtcacgcaagcggtgatcgtccgtttcgtaacaaagccctgtcttgacaaggtattctttcttgaatcccttctttatggcttcctgagccatggcatcgtgactctcggtgcaatagcctaactggaacttttcgatgatatcatcccggaaaccacgattgcgaaagtatgccataccaatgctacgtccgtccacatggtttttaagtatattttggaagtaatcacgtgcaaagttattcacgatgaacagactttcacgttcgctctgcatcaacttctcttcgctggacagttcgcgctccttgatttcgataccgtatttctttgccagatatttcagagcttcggggtaactcatctgctcgtgctccataatgaagtgcaccgcattgccacccttaccgcaggaaaagcatttgcacaaccctttggaaggcgatacataaaaagatggcgtcttgtcatcatggaacggacacaagcctacataattcacacctcgcttgcgcaacgtaacgaagtccgatacaatgtctacaatctgtgcggcatccagaattctgtctatggtaggttggtctatcattggataattgtttttgcgaatgcaaagataaaaaaaatcccccgttgaggacgagggaacctaatgttttcacaacggaataatccttattgtgatttgcttcattttagtctgacaaatatatgaaataaattgggaaaagcaatagaatatagaaagttttttactatatttgacaaaacatcaaaataatatcatgaaaaaaatattaggattagatttaggttgcaatagcattggttgggcattggtcaatgaggctgaaaatactgaggaaatatcgtctattatcaaacttggtgtaagagtgaatcctttgactgtggatgaaatgcagaattttgaaaaaggaaaaagtattaccacgaatgctgacagaactcttaaaagaagtatgcgtcgtaatttgcaacgttataaattgcgtcgtgacactctcattgaagtgttaaaagagcacggtttcataacagatagcactttactttctgaacatggtaataaaacaacatttgaaacatatcgtctaagagcgaaagctgcagttgaagaaatttcattagagaagtttgctcgagtgttactgatgattaacaagaaacgtggttataaaagtagccgaaaagccaaaggaagtgaagatggtgtattgattgatggtatggatgtagctagaaaactttatgaagagggcttgaccccaggggaactctgcctacaaatacttgaagctggaaaaaaaaatctaccggatttttatcgttctgatttacagaatgagtttgacaggatttggaacttccaaaagcagtttaatccggaattattttgtgatgcagtgaaagaagaagttagaggtaaaaatcgtagtcagacttgggccattctagcaaagttctttgtttggtcagaaaaagaatctgtttggaatgagaaagaggcaaggacagaagaaagagtaaaggagtataagcttgtcggtcttaaacgagataccaaagggaatgaattaaaattggaaaattatcgttggcgtgtacaagctctttctgaacaactaaatccggaaatagttgctattgtactacaagaaatcaatggtcagataagtgcttctagtggttatctgggggcaatcagcgatcgtagtaagcagctttacttcaatcgtcagacggttggacagtatttgatgtctgagttggaaaaagaccctaatgtaagtttacgcaaccgagtgttctatcggcaagattatttggatgaatttgacaggatatgggagaagcaggctgagtttcatgaggagttgactgtggaactgaagaaagaaattcgtgacatcattattttttatcaacgtcgtctgaaaagtcaaaaaggattaataagtttctgcgaatttgagaagcgagaagttgtagtagaagaggatggcagaaaaaaaaataagacagtgggttgccgagtgattccccgttcgcatccgttattccaagagttcaaaatatggcagaccttgaatgatattgaagtttttgcgtgggataaacagagtaaatgcaagaaagcggataaatcttctatattgtttgataactcggaagatgctttgctcgtagaaggaaaacggtttttgtatcaggaagagaaagagttgctagctaaggaactttttgtaaaagagagtatgaaaaaggctgaggttctgaaactgttgttcgaaaattaccaggaactggatctgaattttaagcagattgatggtaatcatacaggattcgctcttttctcagcatatagcaagatgattgagaagtatggttatgaacctgtggattttaagaaatctgcagatgagattatagaaaagctggaaaccatattcactaatttaggatggaatacagaactactttctattgatttgagtaaagaggataaagaacttgagaggcagtcttatttcagactttggcatttattgtattcttttgagggggataatacaccgactgggaatggtaaactgcttgagaaaattatgcaactttgtgacgtggaaaaagagtatgctgtagaacttgctaatgtgtcatttcaagaagattacggaagtctgagtgcaaaggctattaaaaagatactaccttatttgaaagaaggtaatcaatatgacgttgcatgtgactatgcggggtatcgtcattccagatcctcattgaccaaagatgaaatagaaaataagatattgaaggacaaattggaaattcttcccaagaatagcctgcgtaaccctgtggttgaaaagattttgaaccaaatggttaatctgattaatacactcattgatacctatggtaaacctgatgaaattcgtgtggaactagcccgtgaactaaagaaaaatgctaaagaacgagaagaattaacaaaatccatagcacgaaatactcgtgaacatgatgaaatccgtcagttactgcgaacagaatttggcatgatgaatgttagccgtaatgatattatacgttataaactctatgaagaattaaaagataacgggtataagactttgtattctaatgagtatattccgagagaaaaaatattcagtaaagagattgatattgaacatgtcattccgcaagctcgccttttcgatgattcactgtctaataaaactttggaatacagggctatcaatatagaaaaaggtaataagacggcttatgattttgtaaaagagaaatatggaaatgatggtttagagaagtttctcaatcgttgcgagaccttattcaaggataaaaggacaaagcttaggaaattaaaaatggaagagaaagatattccggaaggatttatcgatcgggatttgcggaatacgcagtatatctccaagaaagcttttgctatgttgaatgaaattagtcgcagagtggtggctactactggttccataactgataaattgcgtgaggattggcaacttgtggatcttatgaaagaattgaatctgcctaaatatgaaaagcttggtatggtagagatgtttgaggacaaagatgggagaaagatcaaaaaaataacggactggactaagagaaatgaccatcggcatcatgcggtggatgctctgacggtagctttcacaaaagatgtatttattcaattctataataataagaatgctgcctggatgcccgcctccaaggaacatgctaatattacaggtataaaggctcgttactttgaaaatggaaaggctcttgctcccatgcctttggcgcaatttcgcgccgaggcgaaacgccatttggaaaacttgttggtatctatcaaggctaaaaataaggtaattacttctaatgtaaaccgtacaaagaacaaaaatggtgaaaacaggaaactgcaacaaacaccgcgaggacagctacatttagaaactgtttatggaagtcatcggcaatatgccacgaaaatagaaaaggtgaatgctgcttttgatgctgctaagattgctactgtaagtaagcttgcttatcggaatgctttactaaaacgtttggaggcttttggaaatgatccaaagaaagcatttactggtaaaaatacattggaaaagaatccgctctatcttgatgagaatcaaacagaaatggttccggaaaaagtacagacggtagagtttgaaactgtttatactatacgaaagccgattgatcccaatttaagtatagataaggtggtagatgtgaaaattcgtagtgttttggagaaaaggctaaaagagtatggtggagatgccaaaaaggcattcgtcaacttggatgaaaatccaatatggttgaatgaagctaaaggaatatctattaaacgtgtgagtattcgaggaattagtaatgctcaatcgctgcatgagaagaaagataaagacggtaacttgattttggacaaagaaggaaggaaaatccctgtggattttgtgaatactggtaacaaccatcatgtggctgtctataaaaagcctgtcttggacaaagtgggacagatggtacttgatgaagaaggtaatcctaagtatgaacttgatgaagtagtggtttctttctttgatgcggtgacacgggtaaatcttgatcaacctattatagataaggattatagaagaagtgaaggatggcagtttctgtttagtatgaagcaaaatgaatattttgtatttcccaatgagaagacaggattcaatcccaaagaggtagatttattgaatccggagaattatgcgatgataagtcctaatttgtttagggtgcaaaagtttacctataaaaactatgtttttagacatcatttggaaactactattaaagatacaagttcaactctaaaaggtataacatggactgattttcgtagttcaaaggggttagataaaatagtgaaagtcagagttgatcatattgggcaaatagtatcgataggtgagtattaaaatagggtaatgaataatattaggttgtttcaagataagaaaatccattttgcgtggaatgaagaagagcaacaatggtaattttcaattgtcgatgtggcggaggcgttgactgatagtgttaatcttaaacagtatataaagcgaatgtgttcacgggacgaggtttatcattgaaccaaggtacactttatacctcggttcaaatgagagtataggatgttaaaaagagcaaaattcaagcagtatatataaaggattatttcgtattatacagtctatttcttctaaaatagtacactttaaactttgactagctcaggtgagggatgaacgtgtgcaagagatagagaagtcagagcttacccaagagtatatgaaagaactctatgagcagaaggttatcctaagggttggattgtcagacgtgtggtatagttatccgtcttcacaatgtttggcgaacatgttacagtggaaatcctctcaaaagagtagtcgaatacatctaaaaaagtaagcaagttgtaaatcgtggaggtaatgtaactagagtagttcatgagcaagcagagaaggagttaggaagaagcaatatatcttttcgaaacttcttagcaaatttaggaaaaggagaaaaaccgccccaattgtcttttgaagcggatagtgagtagtagataatttaaaaagtagaatactatgattaaaaaaacgctttatttcggtaatcctgtttatttatctttgaggaatgcacagttggtaatcaaattgccggaggttgtgaaaaatgacaccttacctgatggcttcaaacaacaatcagaggtaactaaaccaatagaggatcttggtgtagtagtactggataataagcagataactattacttcaggagtattagaagcgttacttgaaaacaattgtgctatcataacttgcgacagtaagagtatgccggttggattaatgcttcctttatatggaaacacgacacaaaatgaacggtttcgtcaacagttggatgcctctcttcctctgataaaacagttgtggcaacagactgtaagaatgaagattgaaaatcaagcagctgtattgaaaaaatgcgcaggtgaagaagtaaagtgtatgactatatgggctgctgatgtgaaaagtggggactctgataatctggaagctcgtgcagctgcctattattggaaaaatttgtttaaaataaaagggtttacaagagacagggaagggattccacctaataatctgttaaattatggatatgcgattctaagagctgtagttgcacgtggattagttgccagtggacttttacctacattaggaatacatcatcataatagatataatgcttattgtctggctgatgatattatggagccatatcgaccctatgttgatgagttggtctataaaatattgcaggaggggatgaattgtaatgaactgacgaaagggttaaaagctcagttacttactattcctacactagaagttattatctctggtaaacgtagtcctttaatggttgcggtggggcaaactactgcatctttgtataaatgctttagtggtgaattgcgtagaatattatatccggaaatgtgagatgaaccgatttagtgaatatcgtattatgtgggtacttgtattatttgatttgcctactgaaacaaagagggataagaaagcatatgtagattttaagaagaatctgcagaaagatggctttactatgtttcagttttctatttatgttcgtcattgtgctagtagtgagaatgcagaagttcatataaaaagagttaaatctttcttgccggagcatgggcaggttggaattatgtgtattacagataagcaatttggaaatatagagttgttttatgggaaaaaatctttggatataaatactcccggtcagcaattagagcttttctagaaaaagaaatcccacttaaatgcgggattcttaattgaaaacagcatcgtttttgtatttcaaaaatggtttataactaattgaaaatcaatttgtaatgtaggttgtactgtttcctatggttcaaagatactaaaatgaaagcaaatcacaacaaatcggacgtttcaaccattgaaagaaaactgtttcctatggttcaaagatactaaaatgaaagcaaatcacaacgttccttctcttctttccgttcttgcttgtactgtttcctatggttcaaagatactaaaatgaaagcaaatcacaacgtattcaacgctttcttctctgaagtttccactgtttcctatggttcaaagatactaaaatgaaagcaaatcacaacgtcaagtattcttctcacttttgtttcgaactgtttcctatggttcaaagatactaaaatgaaagcaaatcacaacgaaacgaaaggtacaaagaaaacggctgatactgtttcctatggttcaaagatactaaaatgaaagcaaatcacaacaaagaagtagatgctgataattacgtttctactgtttcctatggttcaaagatactaaaatgaaagcaaatcacaacagatatttcttccgcctcaaaagaacttctactgtttcctatggttcaaagatactaaaatgaaagcaaatcacaacgcatgtctatgagagtggcaaggggtatttactgtttcctatggttcaaagatactaaaatgaaagcaaatcacaacagtctccagcttctgcatttcctcacggacactgtttcctatggttcaaagatactaaaatgaaagcaaatcacaacatggtaaccaacaaccataaattgtcttatactgtttcctatggttcaaagatactaaaatgaaagcaaatcacaacaagatgcatcagatatatatctgagaggtactgtttcctatggttcaaagatactaaaatgaaagcaaatcacaacacctctggaaaggttacgctttcacctctgactgtttcctatggttcaaagatactaaaatgaaagcaaatcacaaccctccttctggtaatccggattatgtctttactgtttcctatggttcaaagatactaaaatgaaagcaaatcacaacttttatgtagtctgacgtagcagcaattcaactgtttcctatggttcaaagatactaaaatgaaagcaaatcacaacaagatgtacaggctgaatatcaacagttccactgtttcctatggttcaaagatactaaaatgaaagcaaatcacaaccataagttgtttctcataacattaaaatgactgtttcctatggttcaaagatactaaaatgaaagcaaatcacaacggcacgacggacatctattttaccaccttcactgtttcctatggttcaaagatactaaaatgaaagcaaatcacaactttcctgccatggctgcaagatacctttgcactgtttcctatggttcaaagatactaaaatgaaagcaaatcacaaccggtcgtggcggcaaggcggggggagcgggcactgtttcctatggttcaaagatactaaaatgaaaataaatcacaacaatcgagcatattcgtatctacgccaacaggctgtttctaatggttcaaaaatacaaagatgagaaacaaattacaacagaattttatttcattcctgcctatatttgactatttttaataattttagaaataagtatgctccccaatcctaaatatcatcccctctctttattaacaaattgaagagagaagccccacttccttttccgtaccctcttctctctccaatcccttaatcccacctatctattttatcttctccctaatcttcgtcagatactgcttcatcccttccgcatccttcgtactgataatttccagtaaattcttcagctccagacgaatattttccacttgcgagggagtgcgcggattaaagagaatttcctgaagtaagtaatcatcttcactcagcaaacccttggcaatagccatgtgcttcttgaatgtagtacccggagcctcctggtgcttcatcaccgctgcaaaaacaaacgtagagacgaaaggaatagacagagaataagctaccgtctcatcatgctcgtcgaaagtatattcgaagatattgaggcggagcgtctggtaaaggtccttgaagaaaatttttcccaggtggtcaccttcactgatgatgatagcattctcgctgctcagattgctgaggctggcaaacgtagggccaaacatcggatgcgacgatacataacgaaagccactttcctcatagaatttctttaatcccgtcttcaccgaggcgatatcactgatgatacaatccttgggcagtacaggtagcaccttgcggaatgcgtccagcgtatatctcaccgtggcggcattgattaccaactccggctcgaagtcctttatctcttccaacgtggtgaaacgatacgtgttatagacaaaacgcaactggtgcggattcacgtcgaacactgccgtttcatgttggaaacttagaatatctgtaaagaaagagcccatcttgccggctccgagtattaaaatacgcataaatttagtgtttaggtattaatgattagtgataagtgaaagatagcgtagccattaatcacttatcaccagtcgctaatcacttgtttataatttccatttgttgcctcacactctcctcgtgtatcagctcgaataccttcttgatgaagtccgaatccacgcccagaagcacaccttgtgagccgcgtttatccagaatttcattgtaacgtcccgtttgcagaatcgtcatatcgtgttctttcttgaacgtaccgatttcacgtgccacacgcatacgcttggcaagttcctgcatcaggttgttgtcgcactcatcaatctgcttgcgcagttcgctgaggttttccgtggtctgtgtctctttacggatgacgagtagattcaggatgtaatccagtacgtccggagtcacttgctgcgaagcatcactccatgcacagtcggggttgcagtggctttcgataatcagaccgttgaaaccgaggtccatagcctgctggcaaagcggtgcgatgagttcgcgcttaccaccgatgtggctgggatcgcagatgatcggcaagttcgggatgcggcgacgcaactcgatggggatatgccattgcggcagattgcggtacaacttcttgtcgtaactgctgaaaccacggtggatggctgccagacgtttcagaccggcattgttgatacgttccagggcaccgatccaaagttccagatctgggtttaccgggttctttacaaacacaggaatatccacacccttcagtgcatcggcaatttcctgcatggcaaacgggttggcagtggtgcgtgcgccaatccaaaggatatcgatacctgctttcagacactcgtatacatgcttcgaagtggctacttcggtagaaacgtacattccggtttctttcttcacctctttcagccatgccagaccgtctacgcctacaccttcgaaaccacccggtttggtacgcggtttccagattccggcacggaatatcttcattcccttttcggccagttgcttggcggtgcacattacttgttcttctgtttcggcgctgcaaggacctgcaattaccatgggacgtttgtcctcaacgcccggcagcaaaatcgattctaattcaagttccatattcttttatttttgttcaattatatttttattgtatagatatttctcagtgtcttctgaaccctctgcaactcccgtcgataaagcctttcgaacgtgttaataaatacaggcctcgttttttaaaaacgttgcccttattctttaaaaacgtcgggcacgttttttaaaacggtgagtggcttgtgttacaggagctcttttttgtaaatatattacttcatctccctgatgcgcttcaatgcctcttccaatttatggtctttgcagcaaagcgagatgcggatataccgttttccgttacttccgaagataaatccaggtgtgataaatacgcgtgcgttatgcaacaccttttcagtcagttcttccacgtcggcgcagctatcgggaatttttccccagaggaacatacctacctgtttttcatcgtatgtacatcccagtgcgtgcatgatttcccctgccagatggcggcggttgcggtagttcttgttatttccgtcgtaccattcctgttcggcttccaaggcgttggcggctgccagttgcatggcgcggaacataccgctgtcgatgttgctcttcactttcaggatccattgcacaaagtcggcgttgcttgccagcataccgatacgccaacccggcatattgtggctcttgctcatggagttgaactcgatgcaacactctttggcgcccggcacactgaggatgctgagggggtggtcgttcaggatgaagctgtacgggttatcgtttacaatcacgatgtccttgcggcgtgcaaagtccaccagttttgcataaagttccggggtggcgttagctccggtcggcatgttcggatagttggtccacatcagctttacgcggctcatgtccatcttttccagttcgtcgaagtcgggcatccagccgttttcctctttcaggttgtagttgatgacttccgcgcccagtatcttgctcaatgaggtataagtggggtagcccggattgggaaccaatacctgttcgcccggattgacgaaggccagtgtgacgtgcaggataccttctttcgagccgatgagcggctgtatctcagtattaggattcagctccacgccgtaccatttcttataccaggcggcaaagctgcggcgaagttcggggatgccgacataaggcatataaccgtgtccgtcaggattttgtgcttcgcggcacagggtctgtatggttgcttccgagggaggcatgtcgggactgccgattccgaggctgattacgtcttttccttcggcattcatttgtgccacctctttcaacttcttggagaagtagtattcgctcacgctggccaaccggtcggcgggcttgatcttagatgtttgattttccgtctgcatattcgcctaatattttaagttctttggttagcggtgtgatggccgcgatggattgtttatatctcagtaggttgtcgaaaacaacgtctacgtaaaattggtattcccattcccgcccgatgatgggcagtgactgtattttggtcaggttgatgctgtagaacgaaagaatggacagtacttgcgagaggctcccttccgtgtggggcagtgtgaataccatgcttgccttgttggtttccgggtgtggatggcggcgtatttcgtctacttgccagggatcggcaaccaccagaaaacgggtgaagttgtgcttgtttgtttcgatgccttcctgcaacaccttcatgccgtaacgctcggcagcagccttggagcagatggcggcgtgtcctttcaggttctcccgcttgatgatttcggcgctgagggcggtgtcttccgcttccactactttcatcttcgggtgctgggcaaggaactcgcggcattgcatcagtgcgatggggtgggagttgacttccgtcagatcgttccagtcctcatcgggcaggcagacaaagctgtgtgaaatgcgtagtttgtattcgcctatgatttgtgttccgctctgccgcagcaactcgttgttgtgcaataggctacctgcaatggtattctctattgccaacattcctatggtcttgctgtccttcttcacggctgcaaacacgtcctcaaaagtagcgcaacagattaactctatttcttctccttcgaagtacttgtgtgcggcaatgtcgtgatacgaccctaatgttccttgaatggctattcttttcatactgtttctttaaaaaaaaatcccgcttccatacaatggagcgggattaagtatattactttagttctctattcagttcttaagcatcactgtcacttgacacatacaaactcccgctctactttctggctaaagtaaaagtaaaaaaagaagtaatatgtataagtaaacaaattcatactttcgttttctttttgtttttaatttcgtggcaaaagtaatacttttctcttatatgcaagcaaaaaatgatattttttttatttcttcttcaaaattagctttcagacgagtgcttccggttgtccttttttgccggaaatccgtcaatcgtcgtgcatgattcccttgatttgctcccatttgttcacggcatcgttggactgtgcttttcccggagtgctccggccttcgcggatgtacttttgcaacaggtctttcagttcgctgactatttcgggatgttcttgatagacatttttgctttcggtgggatcgtctttcatattatagagttgaatcggtgggagctgggcaatggcttccttgtccacacccggtttggggtagctccaaccgccggaactgggggaacacaacagtttccagtctcctttacggatggcaaactctccgcggatggagtggtgcacggttgcttcacggatggttggcatgtggtgcggattccggatgaggggaagaatgttgtagctgtcttccgcttcgttatctttcaggggataatggttgagggcggcaaaagaagcgtagaagtcgttgaggcagacagtttgcgcacaggtgcctcgacctgcaccgttgacccattccacgatggtgggtacgcggtgaccgccgtcgaagaggtcggctttcatgcctcgccagatgtagttggcatgatgccccttagctgccatttcggggatacctccggcgggagagcaaccgttgtcggtggtgaaaactacgatggtattggaatctatgccgttgcgccgcagggcttcgcgcacttgtcccactacatcgtccaccatcaggacgaagtcgccgtaatcacccagtccggtttttcctttgaaggcttcggcgggcaggatgggggtatgaggggcgggcaggggcagatagaggaagaaggggcgttcgtcttgcgcgtgacggttgatgtagtctactgcgcggtgggtcaggttgggcagacagtcttggtggttgaagtcgttgcctatggcgcctgcacgccagaagcccggtttctttcctgcgggtacggtgcctatttgggtggtggtgggctggcggttttctatgtatacataaggagccatgtcgagggagccgcagaagccgtagaaatagtcgaagcctaagtcggcaggaccgttggtgatgggtttggagtagtccacgtcttcgtcgttgagggcgttggcgtcgggtttctcatgtcccggttttgtgccccagttccagcctaaatgccatttgccaatgcaggcggtggtatatccgtttgctttcagcatggatgccatggtgctgcgggtggtggggatgatggggcgggagtagccgtagagtacaccgcttttgaggctggaacgccagttgtagcgccctgtgaggatgccgtagcgggtgggggtgctgacggctgaacaggaatgagcatcggtgaacattacgccgttggcggccatctggtcgatgtggcgggtttggatatgtgagtctttgttgtaggcggagacatctccatagcccatatcgtcggcgaggatgaaaatgatgttcggcttttgctggggttgtgtgtcggggtgaggggatgactgtgcatgggcatgttgtccaaggcagaagggaacggataataatccgagataggtgaggtttttcatgatatgatgttttgggttgatttcacttggttattatgtacaaaattagctgttagatggaaagggctttattagttctgtctcaaaagtttgagatattgttgcaaatgcagagtggtta

SEQ ID NO: 2118 - DNA, 24302 bp, synthetic construct
  misc_feature 1..24302: note = Synthetic
  source 1..24302: mol_type = other DNA
  variation 15741..16510: note = n is a, c, g, or t
gggcattgtggtgagtccgcggttctttggatatggagattataaaacgctggaaggtgataaatcgctgccatccgtaaaacagccggactgggccgagctatgcgctaccattgccgacccgggatggggttataccagggcccccctgaagtcagcggcatatgtattgaatcagctggctgtttgccgttccaataataccaatttcttattgaatttcggccccacaaaggagggcgtattttcagcgggtatgatcagccgcctgcatgagatcgccgcctggatgaaggtaaatcatgcggctgttaccggtacgcacgcgcttggcgatcaggagcaggcttcggtaccggctgctgcccgtggcaggcaccggtacctgtttgtaatgccggccgttccggataaactaaaagcaccggccctgccgttagcgcccgagaccgttacgttcaaaacgacgggggcggtggcagcaataaaactgctgggaaaaaatgttccggtcgcatatacggcaaaagacggaatcgttaccatccggatccctgccgggataagatcacggaacggggatgtagtggatctactgctgaaatagctatcgcagctcccgtgatcaataatgtgcggcaccgggggccggctgaaaaataggtgcttaaaaagatatcgggcatattgtagtatatttcagatccggcagttgctggatctgcatgcgcctacccgttaatatactccgatggtgtttggccaaagaactttttaaattccttactgaagtatttacggtcattgaaacccacttcccaggctacttcggcgatattgaatttatcattgcgtagcagctgggcggcttttttaagccggagcgatttaatgaattcgccgatgggtgtttgcgtgagggcattgaatttcttatacagaacagcggtgctcattcctacttcccgggctagggtagatacatggaactccgggttgttcaggtttatttcaatgacctccataagccggtccataaatttcttatcgacggttcctatttctgtctgtgttggctccaggaatattttctgactgaaatgctgccgctgcgactctttcaagcgcagcaggttcttgacgtatgactggagcactttaacgctgaatggcttcgtaagataaacgtcagccccgctttccaggccttccagctgctgatcaatgctggtttgcgccgtaagcatgatcaccgggatgtggctggtgcgcgcatcgttcttgagttgccggcaaaattcgttgccattcatttcaggcatcattacatctgtaacgatcagcccggggagctcttcaacagccgtattccagccggctctgccatcagctgcttccaaaataacatagtctgtattcaggcagatacgaaggaaatcccttacttctgtattgtcttctataatgaggatcgttgtgttcaatagtttgctggttttgaaaaatggtcctggcctcctttcaaagatacaaaaaagcaggttttattttcccggccggccttgccgcgggtgctggtaaaacggatgctgccaccatgcagggaaacgaggatctttgataacgccagcccgatgccggttccggtttttttattacccgcggcatctacctgaaagaactgggtaaagatcttctcgctgctttcgggcgggatgcctgctccattatcgcagatgctgatcccggcgccttcgttttcctgttttttgagctgcatgcaaacccatccgcccgagggtgtgaatttaagggcatttgataacagattgtaaaagacgatctccatatagtgcggatcaaaataaaggtcgatggatggctcttcagccaggaatcggtaccggatgcctttttcggaggccataacggcaaatttttcgaagacatccctgcaaaaggaaacgagatcgttctttaccgggtgcaaccgggtgtaccctgaatcggctttcataaaatccagcaggttgttggataattttaacatgcggtcggcgttggacttgatggatgacagcagtttcttttccgaggcagggtcaagatcattttcaagcagcatttctgccggccccatgatcatggtaagcggcgttctgatctcgtgcgaaacatgcgtaaagaaatcggttttcatttgctgcagttccctttgtttgatattcaatgcgtgctcgtattccagttttcttttcagcgctgcccgggattgcaggaaccagaataccattcctgttgccgccagaaatacaagtatgtacagggtgtaagcccaccaggtcttccacagtggcggctgaatagtgaaccgcgccattttttgaaccttgttccatacgccatcattattggctgctttgatcagcagcgtgtagttgcccggcggaaggttggtgtaagctgcggtatgggtataagtatcgttccagtgctgatcgaacccttccagtttataggccgaccggtttttttggggtttgataaaattaagcactgcgtagtggagcacaaggttgttttgatcgaaggggagggtcaggtgcgccggtacctgttttaaggagttgaacgccttcgacggagcaccgttaatgataatatcaataagcgctaccggagggggcaccgggttctcctcaattttccgcgggtcaaaggacaccagtccgttgtatcccccgaagaaaaccgtattgcttttgtcgatataacaggagttgtaattaaatgcctgtccgggaagtccgtcctgcgtattataggctttgaattctttccgggaaacgtccagcctgcagatgccgttgttggtgctgatccataaattgtttgcttcatcggcaacaatacccactaccttgcttccggataagccgtcccgggtggtaaaggtttgcagttggccgttggccgggttgaaaaaagagagccccgaatagcttccgaaccagatgatatgatcccggtcttctgtgatgtagtagatatagtccgaatacagcagggaattggtattggcttttgtgtaatgaataagcctgccggatgtggcatccagcacattcaatccttttttggtgccgatccacatattgcctttcgcatccctgtaaagatgggtaatggcattgctggtgagtttccgtccgggataggcctgttcaaaggtttgaaaagtgcgggttgcggggttgtaaatattcacacccgcctcttcattgccgatccagatccggccttcccggtcctgctcaagtgtgatgatgtcatcggcatccggaggtgcatggatattggtttgacggatgcgggtagccgttttgagcaccgggtcaagaatattgagctccccgttaaaaaaaccaacccatatcctgtttctttgatccagcaacatggccttgatcaggttggaactgatggaaaacctggatgcgtcattcttaagatgggtgaaccgttgtgccgaccggttgaaataattaatgccttccgcctctgttccgatccacaggttgccggaggcgtcgctgagaatggagctgatgatgttgctgctgacactgttttcattccggttgttttgataaatattaaacggggtctgataccggttcgtcttattgaggcccccaaaaaaagtaccgatccaaatgttttcctgctgatcctggaaaatgtcgtggatcgagttgaagttaaggctttgcgggtcatccgggtcattgacgcaggagtgcatggtttctgaagcgggattgtagatgctcaatcccttaagcgtaccgatccatatacggccatcttttccgcaacggatcctgcgtatggtattggacacgatacgctgtctccgctcgttgttctcagcagtgtaatgccggagcaggtttttttgagcggcgaagagatagatgccatcgtcctgtgtgcccacccatagttgctgatgccggtcgcaggcgatggtgcttacattgatatgcccttgaatcgatacggggcggatcttttgaccctggtccagttccctgctgggaaacaggtaaaggcccgacgccgttccaagtaaaatattgcccgatgaatcgcagccgatgctttggatggttttcaggagattgttggtgatcaccgagctcgtcccgatctgctccgttttaaaatgttgcgcaggagtgatcatgttgagccccccggtagtggcgatcagcacccggtcgggatcaaaagggaaaatggctttgatggtattgccggcaagttttgtgtgcgcggtgaggaacgaccggaagaaatcggttccggggagatgcgcgtagagcccgttattggtgccgatccacaggtactttgatccggagaccagtgaagtgatcttgatattggggttcatcgggttcgattcgtaaaaagaccggtatatccggatgtttttgccgtcatagcggttgaggccgtccatggtgcccgcccaaagaaagcccagggcatcctgggcaaccgacaatacggatctgctggatagcccttcttctaccgtaagatgatcaaaacggatctgttcctgcgcccggagcatgaggctgcagacggatatcaggaaaataaagcagggcttattcaaagcaaccagcgggaagcggcagaaacgcgtcattcggggaaaaaccatctctccaaatataatccatatttgaggatagtggtatcaaaacagggcaaatacacttcaaaatctttcaaccggttcggggtcttcccggagcctataccagcaggaaatttgcggccacctgatccgtagggatggtgtcgttaaaaaagccggtgatcttttcgatcacctgctctaccagtgcgtccgggcaggaagcgccgctggtcatcaggatcctgacaggggtatgatccggaaggaagtcccgggtcagcagttcctgccggctgtgaaaattatagtgcaggatcttgtcccggctcaggatcttttcagcgctgctgacaaaataagtaggaagcttttcttcacagagctccaccaggtgcgatgtgttggaagaattataccctcccactacaatggcaaaatcggccgcggtatgcagcatctggcttaccgaggtctggttgtcgttggtagcgtagcacagggtatcccgggtatcggcgaagtggtccgccagggtttcttttgtaagcccgtatttttcgatcatgacctgcttcagatagtcggcgatcgcctgtgtatcgctggccagcatggtggtctggttgaccacacccaggcggtccaggtctttggcaatatcaaagtttgcgctgtattgacctttgaattcttcatagaagtcctccgcaggcttctcaccggtgatgtattttgccagctcgatggtctgtgccatgttctttaccactacggaaggggcattaaaagcagcatgtgaaaaagtggcccgggtctcttcatgggtcggtttgccatgtataacgatggcatattctttccgggcaatgacctcactccggttccacactttttccacaaaggggcaggtggtattgtatttttccgtgtgaatgccaatggtgtttaattttttttcgatctccagggtcgtgccaaaggcagggatcagcacaatgtcgtcgggggtcaggtcggcaaagggaatgatctgccggccatgcgtatcttgcaggaaatggacgccgcgcgagagcaggtctttgttgacctgcggattgtggatcatttcgcttaataaatagatccgtttgccggggttctgatcgatggtcctgaaggcgatctcaatggcgttttccacaccatagcaaaacccgaagtgccgggccaggtagatctgcaccgggccgaagtccaggaaagtgggcgaaaaatcctttttcagcttgtctttttccttacgttttctttttattgcggatatcaacgggctcctgtaaaaaacaggcacatcaaactgcttcatgcggcaaaattactccatatcttctaaagcgccgcatccggggaaaatacgatctgagaccgggcaggcagtgtttcagttataccgtttgacgtttcacgtttaaagttcaatgtttcaggccccaggttccaggttggtttctgttcgctgctcgatgggcatttctcaattccatgaatacgtttcaattggttgaatatggttgaagatgtgcgctgatcgatgaacatttcgtagttccgggctcagaaagctgaaagctgaccagatctttcatcctgttgtctcgtctaatgtctattatctatcgtctattgtccggcgttctatgtttaaagttttatgtggatcccgtttggtacctggtgcgtatttctccgttcccggttcttagctgatggctgaagattgaaagctcaattcaatcctaaaagctaaaacctgatcgcggaaatctcaaaaaaacatttatcttcagacaaaagaaaataacatgagcaaatggtatgtactcacaactttgcttttgataacagcggcctgtaagctgatgcccagggaggacaaacaagaatcaggagaaggatcaaaaacaacaacaatgacgaccacagactggaaacatacaacaagtatttatgaagtgaacctgcggcagtacacccccgaaggcagttttgctgcttttgcggcggcgctgccccggttaaaggatatgggagttggtaccctttggctgatgcccattacgccgatttcgaaagaaaagatgaaaggcaccctgggcagctactacgcctgcgccgattatacggccattaacccggagtttggcactttgcaggattttaaggacctggtaaagcaggcacatgggatgggctttaaggtcatcatcgactgggtagccaaccacaccggttgggatcatgtgtggacccactcgcacccggattattatttaaaagacagcgccaccggtaccttcaaaacggccagcggcatggatgatattatcgaactggattacagcaaccctgcgctgcggaaggcgatgatcgatgccatgaagttttgggtaaccggggcagatatcgacgggtttcgctgcgacctggcttcctgggtggaacttgacttttggaaagaagcccgcccgcaactggatgcggtgaagcccctgttctggctgggtgaatttgatgagctggaaaacccgggttatggccaggtatttgacgccagctactcctggaagtggatgcatcagaccgaagatttttttaaaaagaaacacccgctttcggggttgtatgacctgctgctgcaatacaatgccattggcgattccagtatgcgtgcctggtttacttcgaaccacgatgaaaacagctggaacggaacggaatatgaaaagtacggcgacctggccaaaccgctggctgtgttcagctgcacctggaacgggatcccgttggtatacagtggccaggagcttccgctgaaagaaaaacgcctgcagttttttgataaagacccgatcccgtggccggcaaaggatccaggacaaacagaggggctggaattgcataacttttataaagtgctgctgcagctgcatgccacccatcctgcgctgcgggggggcgatccggccgttaccaccttcaagctgaccaccacggccgacgaccgggtatttgcttacctgcgtaagaacggtgctcatgaagtgctggtggtactgaatttttccggcactccggacctgcaggttgatatcacggatccgcatttgaacggttccttcaaaaatgttttctccggtgccgtcagtgatttttctgctgcaaagagtgtcacattgccgccttacgggttcctggtctgtacaaaataggccgctgcaacagatgttttgtcgttactgttcctgcagccctgaggtatgtcacattttatatgatcaccccggtatccgatcaggatgcattttcggggcgggtatcggacaggaacctgttgagattcttgcagcgcagtgttcatttattccctgcgcttcataaaaaaggtttataatcctgacccggcaccgggcaattggatgcaaatccttatattgcaagtattgttcccggaaataaaaaccagataagatgaaatgtcccaattgcaatgaaacgttattgatgaccgagcgtcaccgtgttgaaattgattattgtcccggctgccggggtgtatggctggacaaaggggaactggacaagctgttgcagtttgctggcgacgaaaaaagcgtaccggcttccaaaacgcaatacgatgatgagcaggcggggcgttataccggtcatcgcgatgatcaaaaacatcagcagtatccgcgcaaaaagaaatcctttttgtcggatttttttgactttgattagaagggattccccggattacctgcggttgcagaggtcccggatggacatgccagggggctttatggtaccggcggaatattagtgttccggccgcaaaaaatatctttatagaaggaagcaattgatgttcccttatttcaacagatctctgtttaaatcagaataactccctggatagcatccggggaattaacgctccgggaatggggcgtttcgcatttttgaggggtgacataaaaatgccccgcaggtaggcgaggcgctgaatgtttccttgatcaattttggtctttgacagaattatttcttatctttgtaataagaaatttggatcggggtgtccccaatcggaatgaagccggagtgatccggctttgtttttttaaggaaatatttttaatccataacgtttcccgcctttgccataaaatttacttttaaatacttcaaaggaaggatttaatctatcgggttccaagacatacctggctatggggtaagcaataaggtcggccaactgcaaaccattgatattttgtgtttttgctttaaactgaatattcaggttgtatgcttttaatcttgcagacgaaatataagcagtgcccctggataaaatacgctgaaaatgctcttgtaattttctgtcttccttttttcctcttttttcaatgatgatgttaactctttcaatcttatccattaaggtatccaggtagaacacagttctttcgataataaatgacaagcttatttcatatacatcgtccgaaattttgccataacgtacaatatacgcctccttcttgatggcggaagaaataattgtataattggtattggaaatgacatgatccagtttttcgtaaaactgcttttttaattccaggtcaaacaggtacttgaactctttttcacatttacgtatatctcgggaatgaaagataacatgggagttatgccaaatgtcctctttaattttattaaaacttttgcgaagtgtttcatagtcggcagaagaaataacaattccacaaagtaaaaacacgggaaagctgaggttaagattacttaatccatggtcgccactttcatctataaataaattgtagatcataaataacctgattcgctatgatttttgcattccaatataaagatagcatgaaaataaataaaataaaaaacccccataaagaaatatatactaaatttgaagatccataaagttaaaacagtatatattgactttatggattgcgaattgcttttagattcaataagagaggtttgaagcctctcttgcttgtattatgggcataaaaaaacctcctgattgtggacaagaggcgacccaaatgttttcacaacggaatcatccttattgtgaattgctttcaggtacaaatatagaatatatcttattgagtaaaatacggaaaaccgtaaaatattttgaattgactatttaattttacaaagatcaattataagtatatgagaaggaatattttaggcctcgatcttggtactacttctatcggctttgccaaagttattgaagatgatgattaccaaaactcttctgttgagttgattggtgttcgggtaaacccgctaactactgatgagcaaactaattttgagaaaggcaagcctgtttcagtaaatgccgacagaacccttaaaagaggcatgcgccgtaatcttgaccgttatcagctccggaggaataatttaattgagatattgaaagcgaataatattattacagcagatacaaaacttgccgaagatggaaagaatacaacgcactccacttatgcactaagagctttggctactacaaatgaggctcccctcgatgcttttgcaagagtgcttttagctatcaataaaaagcgtggttataaaagcagccgcaaagctaaaaatgaagatgaagggcaactgattgatggtatggccatagccaaaagattatatgaagaaaaccttaccccgggtcagctttcttatcagttattaaaaggaggaaaaaaatacctgcccgatttttaccgttctgatttgaataccgaactcgacaaggtatgggatttccaaaagcaattttatcctgaaatattaacagatgagtttaaaaaacacctggaaggaaaaggacagagagctacatcggcagcattttggggacaatacggtttcaatacggcagaaaataaaggtagcagggaggaaaaaaaactgaaagcctatcaatggcgcagcgaagctgttgctaagcaattagcaaaagatgaagtagcttatgtaattacagagatcaataacgactttaataaatccagcggctacctgggagctatttccgacaggagcaaagaattgttttttaataaacaaactgttggtcagtatttattccaacaactgaaacagaacccgcacacccgccttaagggacaggttttttatcgtcaggattacctggatgaatttgaaacgatttgggaaacacaggcaaagtttcatccacaactaacacgcgaactaaaggaagaaatcagggacgttgttattttttatcaacgtaaactaaaatcacaaaaggggttagttagtttttgtgaatttgaaagcagggaaattgaggtagaaaagaatggccgtatcacaaagaagcgaataggcctgcgtgtcgcacccaaatcatcgccgttgttccaggagtttaaaatatggcaggtattaaataacctggaattcagaaataaaagcacgaaagaagtttttgtaccagatatggatgctaagcagcagctgtttgacgagcttaatattaagggaaatttgttagcaagcgatgccataaaaattttagggtacaaatccaaagaatgggaagcgaactatcacacactggaaggtaatcgcactaataaggcgttatacgatgcctatcttaaaattttggagctggaagggtatgacgaagacttgctgaaattaagtggcagtgatgatattgatgtttccaaaattgaaaagcctgcgtcggaaatcaagcaaatggtgcagtctgtttttgacgttttgggcattaatagcgctgtcttagaatttgacgctgaaatggatggtaaagaatttgagcagcaacctttatatcaattatggcatttattgtattccgcagaggatgataacaagaaatatttacaggaagatattttcacatttggtaacaatgatattagtttgaaaaagaagctaagcggaaaattcggtttcaagccggagcatacaaaaatcttagtgaacgtagccttaggcgatgattatggtagtttgagcagcaaggctatgcgtaaaatttatccgtttatcaaagaacttacttatgacaaagcctgtatagaggctggttacaggcactcggcttcttcgctaactaaagaagagatagacgcccgtcctttgcaaaagcgtttggatttattgaagaagaatgaattacgtagccctgtggtggagaaaattctcaatcaaatggttaatgtagtcaataccttgattgatgatgaaaatactcggcgaaaaaccctgggagtatcggaagatttttattttgatgagataagaatagagctggcccgtgaattgaaaaagaacgctaaggagcgggcggagatgacaactaatattaatgcagcaaagcaattacatgaaaaaattgtcagaatactgcaaacagaatttggagttcccaatccctcccgaaacgatattatccgttataaactgtacgaagaactgaagaataacggctacaaagatctatatactaacacctacattcctcgtgaaattttgtttagcaagcagattgatatagatcacattatccctcaaatgagtttatttgatgatagcttttctaacaaaacggttgtatttaggaaagataaccaggataaaggcaacaaaacagcctatgattacattcttggcaagtacggagaacaggcattggaagaatatatgctgcgcataaccggtctttttgaatcaggtaagaaaagtaaggaagagggaatcagcaaagctaaattccagaaattacaaaaacgtcttattgatattggcgatggctttatagaaagagatttacgggagagccagtatattgccaagaaagctaaaaacatacttcactctatttgcaggcgtgttgtgtcaacaagtggcgaaattacagcaagattgcgcgaagactggggcctggtaaatgtgatgcaggagattaatcttccaaaattccgtgcattaggcttaacagaaatgattgagaaaagggacggcggtcagaaagaacgtattacagattggactaagcgtaatgatcaccgccaccatgctatggatgctttaactattgcttttacccgtcatagtcacatacagtatctgaatcacctgaatgcacgtaaagatgaggctaataaatggcatccggttgtaagcaagattgaggagaaagaaacggaactggtttatgatgacctcggaaaccggaaaagaaaattcaaagagccaattcccgatttccgcgaagtggtaaaagagcacctggaaaatgtgctgatttcgcataaggctaagaataaagtagttactaaaaacaagaataagataaagacagccaaaggggagaaaataaaaacggaacttactccgcgtggacaactgcacaaagaaaccatttatggcaggtatcgctattatgaaagcaaagaagaaaaagtaggaccaaagtttgataaggccacaattcaaatggtagctaatcctctgtataaaaagctgctgctggaccgacttgcagaaaatgaggacgaccctaaaaaggcgtttggtggcaagaatacgttaagcagaaatccaatttttcttgatgaagtcagacaagaagttttacctgaaaaagtgctgctgcgttggctggaagatgattattccattcgcaaagatgtaacacctgaaagcctgaaagacgtaaaagccatcgacaaggttttggacgaaggggtaaaaaaaatactgctaaaacgtcttgcagactttgacagtgatccaaagaaggctttttccgatttggataaaaaccccatttggttaaatgaggtcaaaggtatttccataaagcgtgttactatcagtggtgttaaaaatgctgaggccttgcatcacaaaaaaaaccacctcggcaatgatattttggatgaaaatggaaaacaaataccaagctctttcgtgagcactggtaataatcatcatgtagccatctaccgagatgcagaggggaacttgcaggatagagttgtgtcgttgtttgatgcggtacaattagtcaatgcaggagaagctgtcatcgacaaggcatttaatcagggaataggttggcagttcctgtttacaatgaagcaaaacgaaatgtttgtattcccgaatgaccagataggatttaatcctaaagaagtggatttgcttaatcttcaaaatagaaagctgattagtccgaatttatttagagttcaaacaatctcagttgttaaatatggtaataatacaataagagattttaaattccgacaccatttagaagcgcagcttatagataagaaagagttacagggaatagcttttcagcaatataagagtttactgcctttggagcatattgtgaaagttcgcttaaatcatttaggtcatgttgtcggtgtaggagaatactaaaatgttttgccatggtcaaacgcaccctatacttcggtaaccctgcctatctaaaaaccaaaaacgaacagcttgttgtagaactagctgataccggcgaggtaaaaacggccgccattgaagatataggaatgctgatcctggatcaccagcagatcaccattacacacagtgtgattgccaagctgctggcgaacaatgtggcgctgatcacctgcgatgatatccacctgcctacgggtctgatgctgagcctggatgggcataccctgcaaagccagcgctttcagctgcagattgatgcttctgtgccgttaaagaaacagttgtggcagcagacggtaacagctaaaatacagaaccaggccaacctgctggcaaaatatcgcattccccataaaacattattgaccctggcggccagggtaaaaagcggcgacagtgataattgcgaagcgcaggcagctaactattactggaaaaatgtgtttcccctgtttcctgggtttaagcggttccgggaaggggagccgcccaataatttattaaactatgggtacgcggtgctacgcgccatcgtggcaagaaatctggtgggcagcggcctgttgcctacgctgggcatttttcaccggaaccagtacaatgcctattgcctggccgatgatatcatggagccttaccggccttatgtggaccagctggtgtatgacattgtacggggtaatggaaagttcctgaatatgaccccttccatgaagcagcaattgttaagcattcctgcaatggacgtcattattgatcatgaaaagagcccgttgatgaacgcggtacagcgaacgacggcgagccttgctaaatgctttgaagggaacagccgtaggctgctgtatcctgtattgtctccttcattcgtttaaaatgaattttgaacggttaaatgcttatcggattatgtgggtgattgtgatgttcgacatgcctacggaaaccaagattgaccggaagcgttatgcaaaattccggaagcagatccttgacgatgggtttaatatgttccagttcagcatgtacatccgccattgcatgagccgggaaaatgcagaagtgcatgtgcaaagagtaaagaagatactgccgcaaaaaggccatattggcataatgtgcattaccgacaagcaattcgggcagatggagatatttaacgggaaagaagcggcagaggcgctggttcctgcgcagcaattagaactgttttagggactggtagaatagcacaaaatgagggtatagaaattaaaaaacgggcaaaaagcccgttttttaatcctgttgacaacctgaaatcctttgctgttacaggttttgacaaaacgcgttgtcaaagaccaaaggtaatttgaaattgaaagcaattcacaaccaacagttgtttgcannnnnnnnnnnnnnnnnnnnnnnnnnnnnnnnnnnnnnnnnnnnnnnnnnnnnnnnnnnnnnnnnnnnnnnnnnnnnnnnnnnnnnnnnnnnnnnnnnnnnnnnnnnnnnnnnnnnnnnnnnnnnnnnnnnnnnnnnnnnnnnnnnnnnnnnnnnnnnnnnnnnnnnnnnnnnnnnnnnnnnnnnnnnnnnnnnnnnnnnnnnnnnnnnnnnnnnnnnnnnnnnnnnnnnnnnnnnnnnnnnnnnnnnnnnnnnnnnnnnnnnnnnnnnnnnnnnnnnnnnnnnnnnnnnnnnnnnnnnnnnnnnnnnnnnnnnnnnnnnnnnnnnnnnnnnnnnnnnnnnnnnnnnnnnnnnnnnnnnnnnnnnnnnnnnnnnnnnnnnnnnnnnnnnnnnnnnnnnnnnnnnnnnnnnnnnnnnnnnnnnnnnnnnnnnnnnnnnnnnnnnnnnnnnnnnnnnnnnnnnnnnnnnnnnnnnnnnnnnnnnnnnnnnnnnnnnnnnnnnnnnnnnnnnnnnnnnnnnnnnnnnnnnnnnnnnnnnnnnnnnnnnnnnnnnnnnnnnnnnnnnnnnnnnnnnnnnnnnnnnnnnnnnnnnnnnnnnnnnnnnnnnnnnnnnnnnnnnnnnnnnnnnnnnnnnnnnnnnnnnnnnnnnnnnnnnnnnnnnnnnnnnnnnnnnnnnnnnnnnnnnnnnnnnnnnnnnnnnnnnnnnnnnnnnnnnnnnnnnnnnnnnnnnnnnnnnnnnnnnnnnnnnnnnnnnnnnnnnnnnnnnnnnnnngtcaaagtattgctgcattgtcataattgatggatttgtttcctgaatttacccattatctcaaaatattaccgcgaaaatctgaaatgcaccccatgatgacagccgtgaagttttaaaaaataaaagttgtaattttgtactgtactcagcaaataaaggccccaggctttacctggcaagcgtttcttgttgagtatttttttatagctgcctgcgctgagttgccgtgcgcccgtttttgattaagatccggccggtaactatctttattctcaaaagatcaactgtatgctggagcattttccattttacctggcactgatcgtactgatcgttctgctgatcatgctgggcaaccggataaaagtggcctatcctatattgctggtggtagccgggttattgatcagctttgtaccgggtgttccggcgctgaagatagacccggaactgatctttattatttttctgcccccattgctgtatgaagcggcctgggccatctcctggaaggagctttggcgctggcgccgggtgatcagcagttttgcctttgtagtggtctttcttaccgctatgtcggtagcttttgtggccaatcattttattcccggtttctcgctggccctgggattcctgctgggaggcatcgtttcgccgccggatgccgtaagtgccggtgcgattgtaaaatttgtaaaagtgccccggaggatctcctcgatactggaaggcgagagtttgctgaacgacgcctcatcccttattattttgcgctttgccttggtggccgttggcacggggcagttcatctggcacgatgcggccctgagctttgtatggatgatcattggcggcgcgggcatcgggttgctggtgggctttgtttttatgaagatgcaccagcgtctgcctaccgatgtaaacatggacatcatccttaccctggttgctccttacgtaatgtatatggctgcagaggaagtgcacggttccggggtattggcggtagtgagcggcgggctttttctttcggcacagcggcaccggtttttaagcgtttcctcccgcttgcggggcgaaaatgtgtggcagagctttgtatttctcctgaacggattggtgtttatgctcatcgggctggatctgccggagatcatggccggactgcggaaggaggggatcggtttttacgaagcctccggctatggcctgctcattaccggggtgctgatgatcggtcggatgctggcggcttttggggccgtggtggttacgaagatcgccagccggttcattaccgtggccgataagaacccgggaatgaaagcgccattgctgttgggctggacgggtatgcggggtgtggtttccctggctgcggccctgtcggtacctgccgtcctggacgatggatctccttttccgcaacggaacctgatcctgttcatcacttttgtggtgatcctggtaacgctggtgctgcagggcctcacactgccggggatcataaaaaaactgaagcttcccgattaccgggaccacctgccggaggaggagatggaaggctgtttccgggcggcacttgcccgggaggcgctgaatcatatacaggaacattaccccggtgagctgaaaaacagcccggtgctgcggctgctggcagatcaatggcggatcgatgttgaaacggagggggctgtgcattactccgggccggtacgcaggatctgccgcgaagtgctggagcggcagcgcaggtggctgctggacaagaacaggagggagcagcggctggatgaggaaaccgtccggaaattcctgcactatatcgatatggaagaagagaaattaaaagcaacatagtatgcaggcaaaaccgggtaccgtggtttggccgcaatctttatgaaccggtatttacaaacagcgataagaaatgtacgatggaactgatcagacaattggggcaataccccggccgcgaacggaaagggttgttttacccgctttccaattataagaacgggcggtttcaaaacctgctgcccacaccggcattggccgaaggagaaagcatgatgcggatcttctggaaattctttcaaaagatgccggatactgtgccccggtatccccttccttttgtacaaacggatctgcagcatttgaggccggaggaaaatgtactggtgtggtttggacatagttcctattttatacagctggatggcatgcgttttcttgtagatccggtattcagcaacagtgcttcgccgctgcccggttcggtaaaagcatttgccggtaccaatcattaccaggccgcagatatgccggatatcgatgtgctgttcatctcgcacgatcattgggaccacctcgattacaaaacggtgcgccggctggaacctaaagtgaagaccgtggtctgcggattgggcgtggcgcagcattttgaatactggggctgggacagggagcggatcattgaaaagaactggttcgaccatgcagatctcggaaacggatgtacggttacccttacgccggcaaggcatttttccggccgccgcctgttttcaaggaacaattccctctggacctcttttgtactgcagacgccctcaaggcggatattcctcggcggcgatagcggctatggcccgcatttcagtgatattggcgaccggtttggcccttttagcctggcgatactggaatgcggacaatacaatgaaaaatggccctatatccattccctgccccaggagatcttaacagaggcccgggcgctgaaagcgcagcgggtgctgccggtgcaccactccagattccggctggcacaacatccctggtacgaaccgctggagcaggtaacggcatttggtgaagccgaaaactatccggtcctcactccgaagatcggtgaaaaagtgaacctggaccatccggaccagacatgggagaaatggtgggaggaagatgggctgcggaattgaagcggtgcccttctatccgttcccgtgtatataatctttcaaatgattgatggtttccttttgttgtaagatggtttctttgaccacatcgctgatggagataatgcctgccagctgtgcattgatgaacacgggcaggtaccggatgtttttatcgctcatcagctccatacagtgctctacggagtcttccggggaaatatggggcagctcggtagacatgatctcttccactgtcgtatcggaggaatgttttcctttcaggatcactttccgggagtaatcgcgttcggtaatgatccccaggtaatgctccccgtttttgacaacgagcgctccaatatttttatcggccatcaattccagcgcctggtaaacagacgtcgagggcacaatgctgatcgtatcatgccctttacgggcaagaatgttggagaccttagccatgatagcgatgatttagatcagcaatatattaaaaaaagcggagaatacctaatcgggcataagcgatgaaacatcctgttcgctgctcgatgaacatttcgtaattcagggttcaatgctgaatactgatagcaagtagttccatgtttccacctcattgcccggtctaatgtctattatctatcgtctatcgtctatcgtctattgtccaaagtcccaggttccaggttggtttccgttcgtcgatcgatgaacatttcgcaattcagggttcaatgctgaatactgatagcaagtggttccatgtttccacctcattgcccggtctaatgtctattatctatcgtctatcgtctatcgtccaaagtcccaggttccaggttggtttccgttcgtcgatcgatgaacattttcgcaattccatgaatgtgtttcaattggttgaaaaggtctaaaagctaaatactaaacaccaggtttacgtaaaaagcatctcgattctcaattctcaaacctcgcttcccaactcctcccggctgtaatctttgaccacattataaagcgtgccccgctccaccggcttgcgtttggcctggcggatcagcactacgaggtcctgtgtagacatggaaggggtctgttcctcggagccggccatggaatagatcttcgtggtatcatcaatggtgccgtcgagatcgttaacaccaaaagcaagtgacagttgcgcattctgccggccaagcatgggccagtaggctttcatgtgcggaaaattatccaggtagatgcgggcgatggcataaagacgcatatcctccaccagcgtcgactccggcacgtggctcatatcgttgtccttattgcggaatttgagtggaataaaagtattgaacccgccggttttgtcctgcagttcccgcaggcggtgcatatgatccacccggtcggcaaaactttcaatatgtccgtaaagcatggtggcattggtatgcatgcccagacggtgtgccgtttcgtgtatctgcagccatccgtcagcatccactttgtccgggcagatctgcttgcggactgcgtcagcaaagatctccgcaccgccaccgggcaggctttcgagtcctgcttcctttaggtatgataacccttcttccacggttttcttcgccttgcggaacatataatccagctccaccgcggtaaagcctttgatatgcagctccgggcggtgcgctttgatcttccggaggagctctgcaaaaaattccaggttcattttcgggtgaacgccccccacgatatgtacttcggtaaccggctcggcatcgtattttttcacgatatccatcatctggtccagccccagctcccacgcttcatcccggtgtgcatacagcctgctgtaactgcagaaattacaggtgtagatacaggcattggtaggctcgatatggaaattccggttaaagtaagtgcgatccccatgtaatttttcacgcacaaaattggccagggaccccacaaagcccaggctgcctttttcgaacaggagcagcgcttcttcattggtgatgcgttggtcagtgtaaactttttgagcgatatgtttcagatcggtgtcttcaggtaaaattgaggtctctatcacttccgtcatgctgctgatttttttgcaaatttagcattttatggccactgagccacggaatcactctgtattgaacgggaaccgcaacctgcgccagggacgggcaacgatcgcaatggagggggaagctgctgttgaacatcttcgcgaacctgccgggatcccggtttcaacctgacaaatttgcccgccggattagcgaaacttcggggtaaataattatcttcaattgctgtacgatgtataaagcaactaaagttcgtctatgagcataaaactaagattgaccatcatcaattttttacagttttttatctggggcgcctatcttacgtctattggagggtatatgtactccaccctccacttcaaaggagagcagatcgggaccgtgttcttaacattggggatcgcgtctatctttatgcccccggtactgggcattatcagcgaccggtgggtgaatgcggaacggctcctgggcctgtcgcatatcgcaggggccggggcgctgtactacactgctaccttaacggaaccggccggaatgttttggggaatgttgctcgtctgcatggcctatatgccaacaatatcattaaataatgccgtggcctatcatgttttaaagaataacgggctggaaccgcaaaaggattttcctcctataagagtgtgggggaccatcgggtttattgcagcgatgtggctgaccgatctgtttcactggacgcttaccaacgggcagctgatctttgcggcagggagcgcgctggtaaccggcttttattgttttaccctgcctccctgtaaaccggagagccagggaccccggtcgcttgcggcggcatttggcatagatgcattccgcctgtttaagatacccaagatggcgatcttttttattttctcaatgttcctgggagcagcgttgcagatcaccaatcaatggggtgtgccttttattgatcattttaaatttgacccggcgtttgcagatacgatcggggtaaagtatcccaatatcctcatttcgatctcccagatatcagaaaccgcatttatcgtaaccatcccttttttcttaagaaaatacgggatcaaaacggtgatgttgatgagcatgtttgcctggttcctgcgttttggtttgtttggggtgggcgatccgggcggaggactggtatttctgatcctatcgatgatcgtatatgggatggcctttgatttttttaacatttccggttcgctttttattgaaaaagaggctccttcaaaaatacgggggagcgcccaggggttgttcatgatgatgaccaacggcatcggggccatgatggggagctttggaagcgggtggctgatacagcactatacccggaatgagttaacggactggagaacggtctggtttatctttgcgttttatgccctggtgatcgggatgctttttgcgctggtattccggtaccggcacaaccccgaagtagtggcaaaagagggagtgaacagccgttagcggtcttttgtcaggcattttacctgaattgacattttctgcacaactttttgtcaatattgcctgttatctaaatgggaactaaatttgttatttgtttcaaacaattaatcaactaaaatatttggaaatggcaaaagaatttaatgattccaactttcaggcagaggttctggactccgataaattaacggtggtggatttttgggcggaatggtgtggcccctgccgcgcgatcggtccggtaattgaagaattatcaaaagaatatgaaggaaaggtgaatatcggaaaagtgaatgtggatgtaaatccccaggtttccatgaattacgggatcacttccattccggctattttgtttattaagaacggccaggtggtagacaagctggtgggcgcacaacccaagggcaattttgtaaagaaaattgaatcgcatctgaattgatcccagcggctggtacataactaaagctccgtgatggttttcacggagcttttttattaattttacagggcaatgccaaaacaactcgcaaaacaggaatacggcagtttacaaaaataaacaccggggagaacgcggccccggagcaggcatgtcgaggctgttcaatgctgcattatcaatgctgatggcaaggcgtacggggtggcccatagcatttgcttcatacagggtagctacctttccttttttaaaggaaacagcaggcccgttgtagaccctgtcttttaattttgccgttggcaatacccgcggccgctttggcggaagctttttaagtgtaaaggtgatcctatttacccgctaaccagggtggatttgctgtatgaactgctcaattggccgtctgaactgtaattttggtgtagggggcttgtatatatacgctaaagaatgaggccctgcaacaggggaatacgcattaaaaattataaacggtgtgacagtaaagggtaaaaacaactaattttatctattatgggacccttgtgcgtatttcagaacatcgatttttttgatcatcaatagtgaaacatttatccatcaaagatattgcacggcttgcgggtgtagcgccttctaccgtttcatttgttgttaacggaaagcaccaggaaatgcgcatcagcgaagaaatggtccggcatatccagtctattatc

SEQ ID NO: 2119 - DNA, 24302 bp, synthetic construct
  source 1..24302: mol_type = other DNA
  misc_feature 1..24302: note = Synthetic
gcccccaaaaggaatgtcgagcagcacgatttcttttttggtatcgcacgtaacttgaaggaactggttccttccattcgctctttttggccagaagcaggtaatagtattcatttagatggctggcgcgagataacgatggtagatggctatcaggttaaggttgttttaaaagaggaagcccctttaccgtcatcgcctttactttcaccgaaaaagctcttctttattaaccttggcgggtatcagcctgatattctggaagaacagcattatacggttttgagtgtgcacgaagaacgtacacaggccattcaggaggcaaagaaaactgtattttttaaaaataataaagttaaaggtgcggggtcccatattgatgaaaaatacgggatagatgtagatgatatttatagaatcgaggatatccttgctgatgaatttaaagaccattatcatttattgattaccccttcatcaggacaggaaaaagatatcatcaatttaggttatctgaaacttgataagatcaaatgatagccgatgaaaaattagcggattgggtagcatcaaagcatgccggacaacttataaaacgtaccggaaaaccatactttgatcatttgctggctgttgctgaaatggcagcaccagtcgttgcccttggctatgaaactggtctttgtcatgatttgctggaagatacaaatacgaatgaagaagagctgatagcggctttgattagctttggttatacggtttccaacgctaataaaatcgcatttaatgtgactgaacttaccgatgtttttacaaaaactgcttatccaaggttgactaagctggaacgaaaagcacgggaagccgaacgtttgatgaaaattagtccaattgcccagaccgttaaatattgcgatctgatttataatattgattgggttttaaagtttgatcaaaagcatgcgcaagcgtatttaatcaaaaagaagttattattgactgctatggttaaaggagatgaggggttgcgacagcttgcgctgcacgcaattgacaatggcttaaaggcatatttgttttttaaaccggaaaaataaagctgatttactcctgtatattttgaaatatctatggtatgtttggatattgatttacctgataataatccaatccagttaatgaaaaagtattttactgtattttttgcctttattttatttcaagcccaagctcaatccgtaagtaattatctggaaaaaatcaggaataatccatcaaagcttactgctttcttttcgcaaatgcctaagggaggcgatcttcatcaccattatagtggctctgtttatgcagaaagttttatcgattatattgttaaaaataattacttcatcaacagggaaacactggcaatagccgaaaagaaaccagcagaagataaagaatggagcaagctaggttccctgaaaaaagaaggccagctggatgactataaattcaggctattaaagaaatggtctgttaaagattataataatgttagcattccttctgataagcaattctttgaaacctttcctagttttgatgttgcaagtgaaaaaaatatcgattctggattactggaaataaaaaacagagcagtcaaagaacatgtaagctatatagaaaccatgcttggctctattaaatgtgcccctatcaatgacctgagcttacaatttgatccgaaatttcatactgtactgcagcaaaaagatgagcagtattgccaggcgttactcgatacactttatggtaagctcatggaaaaaaacatcttttcctgtgcagataacttcagtgaaaataccattaacaaattacatcatgcgatgcatttggatgatgattcatttattatgcgttaccagacttatacggtaagaactttagaagccagcgaggttttcaaaaggttgctcttagcttttgatgcagccagtaaaaacccgcttatagttggtgtaaacatcctttctccagaaaataatgaggtagctatgcgtgattattggttgcatatgcaaatgttcaggtactgccataaaaaatatccttcggttaaatatacaatgcatgcgggtgaacttacgcttggactggtaaaacctgaagaattaacctggcacattagttcagctgtttatgatgcaggcgcttcgcgtattggacatggtgtagatattccttatgaagcaaatagctatgcattgatgaattatatgaaagagaaggggatcgcggtagaaataaacctgttcagtaatgaatttattttgaaagtgaagggtgaccgtcatccggtaacactttataaagaatttaatgtacccattgtgattagctcagatgatgcgggagtgctgaggaccaatctgactgaacaatatgttttactggccagcagatatcctgaatttacttataatgatattaaaaagatcatttataacagtataaattattcttttattaaggagccagcagtcaagacgaaattgcttgcgaagctcgaccgtgatttcacagcgtttgaaaaactcattataaatactccgcagaagaaaaattaaacaaaatttcaatgatggtcaagatattaaaggcagggcttcttctgttttgtgcagtagctgcaggatgtagtaaaaataatagttcattaccagacagtccggttaatcctgttgtagttaccggtaaaaagggtgctgatttcaatgtgaataatcagaatggcacatggtatggaaatgtgattaacctgcaaagccattggtattatacctggggtacagatcttccactgcagtccgcaccgcaaaattgtgaatttgtaccaatgttctggggcagatcaaacgtgagtgattcgaatattgcctatgctaaacagcttggagtacaagggaaagcaaaatttatccttggatttaatgagcctgatttaggcgatcagtcaaatatgaccgtacaggaggcacttgctgcgtggcccaaacttgagtccataggcttgcccttaggtagccctgcaacggcctggccaaccagacagtggatgtacgatttcctggatcaggcaattgcgcaaaatagacgtgttgattttatctgtgtacatatgtatgtagggacagatgatgttgcctttgtcaaagttttacaggagctgcatgataagtataaaaagccgatctggatcactgaatttgcaactgttgcaaataatgcaacgactatggcacagaatccatatacgccggaaatggtgctgggctttatgcaaagattattgcccaaacttgaagcgcttgattttgtacagcggtatagctggttttctggttcaccgaccagtgcaaggctatggtcttctgcccttgtagatgggaatggtaatttgacggagctcggaaaatggtatgctgcttataagccgaatacagggattaaaaagtagtttatcccgatctgttaagaccaggataaactactttgccagagtaaactacttcgcattaattaatgctaaattttaatgccagaacctgcttgaagtattgtgacgtctgtattttttgatagccgcaaaattagcttttaatagtttgtttttcgatgatgggtttgcggattcataattgccaactgctttcatggccatgaccatatcataatccatagcgacctgccccttatcaaaaggcacattgccagcgttatttctgaaccataatttccatttagcacttcctggtgtataaacgtaagtggcagtgtcagtacttttagggaagggcccaggcaatacgaatgatacaaaattatcctgtgcagggctgtgacagctcatacaagaagataaagccaggtttttatacactttgccagtcgttaaatcaactgccttttgtgcaaccgcaccgtcattcggaccactaagcctgcctccccagcctaaggtctctttactgtagaatggtgctttaggattgattatcgtttcggccaacttaggataaggacgaacaacaggactatttacatcagggtcatcgccccacatggcgcctaatggtaccatcttttcccagaatgatcctttagcatctttgtcatatacaaaagtggaataaacccaacccgtttttggagatgtcttactatctttaacaatcacatccatttgaaaaaagctaaccttacggatctgatatcctttttttggattttcacttgttggaatagtatcataaacactaaaggtttgcgcatctttcatcacaggccattgcggataattgacatttgaaaaagcgaactttacaattacactgccttctttaaattgagcagcatcattcagtaaattaactttttgcccggtcttaccccagatttgaccgactgtataagcagcagtagcatcatataagaccagtgcatatccggcttcatcttctttcagtgtggtgaacatgttttttgggtttccatttccgaggtagacgcctaatatggcctccctgtctatcccaagccagggttcgttgaaccaaccgtatttagctgaggtccactttttattgtccgtaaaaaatgggatgatgttaggtgcaatatggctttttaacgagtccatataagcaaatacattggtatcggagattggctgcccgtgtaaagcctgttgccaggaaggattgatcacgggcttaactgtcgttggataatcgtgactgagcacaaatagggggccatcgtattgctgtttagaaggtattgaatctctatagtttaaaaaggcgccatttgttgctaaagctgctggatcagatttaagtttgccgtctttggaattgccctggttattacagctgtaagcaatcaaggcgattgcgggcagtaaaatcagggtggtgcagcggttaatttttcttttcatatggtttgaaatttaggtttgattatttagtttaaggggcgattttcttctggtaactggtcatgtatttttttgatttagcaagtggctgtagtattggccggatcgtcttattaataaagtaaaataaactcttttatctgaaaatctcagggaggtatctagctagatgttaagggtgttttaacccttgttgtaggtatttatacttttaattggttagggaagaggttggattaatttatgaatgcgtatggccgaaattagaaatcattgtatatgaaacattatcaggtttagcgatgtttccttcggtagatatgaacgacaagcagtgcaaatcgcaaacaagtcctaaaattatcaggtgtctccagtcacttaatttttttatggcagatatgcaggccggtattggccctttccttggaatattccttttggcacatggctggaaaagtgggatgattggttctgtaatgaccattggagggatggctggtatgctcatgaccgcaccagcaggtgcattgattgatgcgacaaaacgaaaacgcatgtacgtggttatccccgggatatttactgtgacagcgtcggccgttattctgttttcgcaaaatttctggatagtcagtatctcacaggtggcaacggctattgcgggctcggcaatagggccggcagtgatcggtatgacccttggaatagtcaagcaagcagggtttaatcgccagaatggttataatcaggcctataatcatgccggtaatgtagttggtgcagcgttgtcaggttatttaggctataaatttgggatgcatgctatcttttatctggctgcattttttggtttgctctctatcatatctgtattaatgattcctggtaaagctattgatgacagtgctgcacgcggattaaatgaaaatgaaactgatactaaagcaagcggcttaagtgtgttgatccaatgtaaacccctgttgatactggctgccgcacttgcctgtttccatttgggaaatggtgcgatgctgccattatatggattggctgctgcaactaaaaatcaaggtgatccaactatttttgtcgctatgactatcattatcgcacagctggtcatgatcggcgtatctattcttgcgatgcgaatggcagaaaaaagaggctattggttagtcatgctcatttcttttattgcattaccagtgcgtggcctgattgctgctcatctaattagccacattggattatatcctgtacaaatattggatggtatcggcgccggcctgcaaagtgtggctgttccgggattggttgcacatattttaaatggaaccggtagggtgaatatcggtcagggagctgtgatgacagtccagggattaggagcttctttaagtcctgctattggtggatggatcgcacaaggaattggctatagttctacatttctgattttgggctgtttcgctaccatttccatattattgtggttggtattttcttccacgctaaaaaccgcctgcgaaaccacagccaaagtggaataataaaatcaaattaaaccccttaattactatatggcacatatttttatttggatcatttccttcttaactattgcaggtgttattatccggccttttaaaatatcagaagctatctgggcagtaggtggggcagtgctattgcttattgcaaggctaattttaccaactgaaggatggtcggggatcattaaaggcacagacgtttatctgtttttaactggtatgatgttattagcagaaaccgcacgtgaagaaaaactgtttgactggctggctgcccatgcaactaaaatggccaaaggatcagctaaccgtctatttttattgatttacctggtaggtataattgttactgcatttttatccaatgatgcaacggctgtagtattgacacctgcagttgcagctgcggttaaagccgcgaaggtaaataagcctttgccatatttgctgatctgtgcatttattgccaatgctgcctcatttgtgttgcctatatctaatccagctaacctggtgatctatggagcacatatgcctccattattgcaatggctgccgcaatacattttaccatcgttctttgccatcgtatcgacctattttatgttacgtttcacacagcgcgatgccttaaaggagcgtatcgaaactaacattgttatacctgcactttcacagggtggaaagacagcaatcattggtattgctgcgacagcgatgattctgcttatatcctctgcaatcgatattcagctaggtttacctactgctattgctggaattttaacctcggcaattgtcatcatccgggcaagaaaaaatccatggatagttatcaaaggtgtttcatgggaagttattcccctggttgccgggctttttgtcattgtggaggcgcttaataaaaccggagtaactcaatcacttacaaatatccttgtgaatgctaatgtagctcatggaattaccagcaccgcctggtacagtggtgttatcgttgctttttcttgtaacctgctgaataacctgcctgcaggccttattgctggtcatgttattcaagccgctaatgccccagaattggtgaaaagtgcagtcctgataggtgttgatttaggacccaatctttccattacaggctccctggcaactatactttggcttgttgccttacggcgtgaaggacaacatgttagtgcctggacgtttttaaaacttggtgcattgatcatgacagtagcccttttattttccttggcggctctttggatataactcatttcttaagtatgtaaaaaaaatagatttcaaactagaccttaaatatagccctggcttttgaaacttaaccaagttggcagattaccggatggaaactctctgtcaggatattaattaatatatgtgataaattttcaggacatagttttaagaatttcttgtaaacttgctatatcttgatatttagcccataattctcatgcttattataaaatacacaccggttttcagagcggactgtatcgaaatctttaagagtaatttacctaaattctttgctccggatgaactgcaattatttgaaacctttttagatcatgatgcagaagataactattatgttatacaggaggatggacatgtatacggctgtggtggcatctttttagatgaaaaaactgatgaggcgggcttatcatgggggatggtacatgcctggcatcacctaaaaggaattggtaaattatttacacaatataggatagacctcttaaagaaattatacccggcaaaaatctataaaattgatacttcacaacataccgcggcattttatgaaaaaaatggttttcacacggtggatattataccagatggtttcggtaagggaatcgataaatatatcatgaaaatggaaaataggttaatgtaaggaggctagctattgatgaactaagtattatacttttaatttgatagggaagaagttcgtgtgaagaagtattggtttgctaagtaatgcggatatttgataagtggaaatataatactaatagcatattttgttgtaattttagtaaattatttttcaacaaaagtctttgtttatgggaaggttaccgctggaattcaaaattttaagacgtattaaggagaagttggataaactgatgtctgatagaggaaccccggttgaaatcagatcaaactttttatatgattatataatcagagatgaagaacttaaaagggtgttcactaatcgaagggtgtttaatcaatttttaagagcacagcatgatggtggtaatttaaagcaaataattcccaattatagggttgatacttcaaatcatagtcattatcaatggcacttttataaagacaccagtataaatgcagggcagggaaaaggaattgaaactgttggtagtcaattgacttttaaagatgatgagttgattgtttctgcttcagacggaacattattgaggactcatcaagaaagaggaatttatgagaagcttttaaaatgtaattacctgacgattgaatatgagtttcctgtttcaatcgacggtcataagaagtatgttgattttagaattttgaacagaatgactcagaaaatatatttttgggaacattttggtatgacaaattctgatggttatctgaaaaaaatggaagaaaagcttttatggtacaagaataatggctttaaaaccgttgaggatggtggaaatttaatttataccatttattcagaccagaataagcttcagcgggatactgataattatataaatattattatcaagtaggggtaaggggttggtaattgaagtagatttcgtttagagattttatcaaaatcatatattataataatctgaatcagggtttattcagttacggaaaaccgtaatttattcaaagtgatctcctccctgaaaacgggacttttgtaaagagattttcggtctcaaaatataaaattgagataataattgtttactcattacaatattttcaggatacggtactatatccgatatgaaaaataggtactggtaatacgatttcaataatgggtgaaaaaggaattttagaaaatcaaccgccttgtaggcttttcctttggatagatgatcctgattcaggaagaagatatgaattatataaagaataggaattggttttcaaattggaatccgacattgtcgccacgtcctttgtgggaacgaatacttgagtagctaatcgtagattttaaataaaaaagccccgtattgtaagacgaggcacttaatgttttcacaacggaataatccttattgtgatttgctttcattcaaatatagtgattatttataacttggtatacgggaaaccgtattttattaaaattttagtttttagttttaaaaaatgttaattcaagattatgaagaaaattttaggacttgatttaggcacaacttctattggatatgcacaggttaatgaaagtgaggacttcaaagattcgtcgattgaacgaattggtgtacgtgtcaatccattaagtgttgatgaacaaaccaattttgagaagggtaagccaatttctataaatgctgacagaactttaaaatctggcgcaagaagaacacttgatcgttatcaggatagacgctctaatctgattgatgctttagttaagtcagttatcattacagaagatacagttcttgctgaagatggtaaaaataccactcattccacttttgccttacgtgcaaaatcggctagcgaaaaggtagaaaaagcggagtttgctagaatactattggctatcaataaaaaaagagggtataaaagtagtcgtaaaactaataataatgatgatgaagggcaggcaatagatggcatggccattgccaaaaaattatatgatgagaacttgacaccaggtcaactggcctatcaattattaaaagaaggtaaaaaatacttgcccgatttttatcgttcagatttacaggcagaatttgataaaatatggacttttcaaaaacagttttatccggagattttaactgatgaacttcaaaaagaattggcagggaaaggacaaagggctacatcagctattttttggaagaaatatgattttaatactgcagagaataaaggtacccgagaggaaaagaaactgaaagcatatgaatggcgaagtacttcggttgacaaaaaattgcagaaagaggaagtcgcctatgtgattacggaaatcaacaataatctaactaattccagtggttatctgggggccatcagtgacaggagcaaagaattgtactttaacaagcaaactgttggtcagtatctatttaagcaaattcagaaaaacccacatactaaattaaaaaatcaggttttttatcgtcaggattactttgacgagtttgaaataatttgggaaacacaggctaaatttcatcccgaattaacagaagaattgaaaaataaaatacgggatattattattttctaccagcggaaattgaagtcgcaaaaaggattaataagcttttgtgagtttgaacgtaaggaggttgagatagaaaaaggtggacgccgaatgaaaaagactataggtttaaaagtggcgccaaaatcatcacctttgtttcaggaatttaagatttggcaagttttaaacaatgttttgatcagaaaaaagggtagtaaaaagcgtagagtaaaagagcctgatcaacttaatttagttgaacaagagcaggaagtgatgttttttgatatgcaaacgaaacaaaccttgtttgatgaactcaacgttaaaggaaacttaaaggctaaaagaattattgaattgataggtcaagatgcaaatgattgggaaattaattattcggaaatcgaaggaaatcgaactaataaagctctatatgatgcatatctgaagattctggatttagagggatatgatacgaaagcgttgttggatgtgaaaacaagtaaagatgaggtggagcttgatgatataaatatttccggaccggaagtcaaagatctggttaaacgtatttttgaatctttagaaatagatactcaaattttagagttcgatgcagagctagatggagaagtttttgaaaagcaatcatcttatttgttatggcatttactatattcttatgagggcgatgattcgccaagtggaaacgaaaaattgtataaacttttaaaacagaaattcggttttaaaaaagagcatgcacaaattttagcgagtattaccttatctgatgattatggaagtttgagtgcaaaagcaatgcgtaaaatctatccatatattagagagcagacttttgataaagcagcttcacttgccggatacaggcattctgcctcatcattaaccaaagaagaaattgccaatagaccgttaaaggacaaattagagcttataaagaaaaatagcctgcgcaaccctgttgtagaaaaaattcttaatcaggttgtgaacattgttaatagtttaattgaagcaaacagtgaaaaagattctgatggaaatattatcagttattttaagttcgatgaaatcaggattgagcttgctcgtgacttaaagaaaaatgcaaaagagcgggccgaaatgaccctgaatatcaatgcggcaaaaatcgtccatgaaaaaatattcaaactcctgcaagctgaatttggagtaaagaatccaacccgaaatgatattatccgttataagctttacgaagagttaaagaacaacggctataaggatctatatacaaatatatatattcccagggagattttgtttagcaaacagatagatattgagcatattataccgcaatcaaaaatgtttgacgatagtttctcaaacaagactatcgtattcagaaaggataacctggataaaggtaatagtacagctttcgactatatagatagcaggtttgggaaagataagttaaccgattttgaacagagaattgaatttctttttgaacaaggaaagaaaaataaagaagaaggtatctctaaagctaaatatcaaaaactactgaagagagaagctgatatcggtgatggatttatagaacgtgacttaagggacacccaatacattgctaaaaaagcgagaaacttgctttatgaaatctgtaggatagttacaccaacgacaggaagcataactgataggctacgtgaagattgggatctggtcaatattatgcaggagcttaatctcgataagtttaagaaattgggtctaaccgaaatggttgagaaaaaagatggtagttttaaagaacgtattgtagattggagtaaacgaaacgaccaccgtcatcacgcaatggacgctttaactattgctttcactaagcatagtcatattcagtatttaaattacctgaatgcccgtaagaatgaaaatcataaacagcatcataatattattggtattgaaagaaaagaaactgagtttgttattgatgatttaggcaacaaaaaacgtaaatttcatttaccgcttccaaactttagagaagaagctaaaaagcatttggagaatgttcttgtttcatttaaagcgaaaaacaaagtagttactaaaaataagaataaaactgcatcatcaaagggcgaaaaaatcaaagtagagcttacaccaagaggtcaattgcataaggaaactgtttatggtaaatataaattttacgtaagcaaggaagaaaggatagggggcaaatttgatcaaaggacaattgaaagagtcgcaaattctactcataaaaggcttttattacagcgcctgttggaaaatgacaatgatgccaagaaagcctttaccgggaaaaatgcgttggctaaaaatccaatttatttagatgatacaaagactttaactttaccggaaatagtaaagttaacctggttggaagaagattattctatcagaaaagatattacacctgaaaatttcaaagacattaaagtaattgataaaattttagatgaaggggtgaagcgaattttgaaagaaagattagctaagcacaataacaatcccaaggaggccttttctgatctagaaaagaatcccatttggcttaatgaaaaaaaaagcatctcaattaaaaaggttaagatcagtggcatcaataacgcagaagctttacattataaaaagaatcatttgggaatagaaatccttgatgatgaaaaaaaacgtattcctgtcgattttgtaagtactggcaataatcatcatgtggctatttatagagatgaaaaaggcaatttacaagaagatgtcgtttcattttttgaggcagttgcaagggtaaatcagaacttgccaattattgataaaacactaaaagcatatttgggctggacatttttatttacaatgaagcagaatgaatatttcatattcccaaataagcaaactggttttaatcctactgaaattgatctactagattcaatgaataataaattgattagtcctaatttgtttagagtgcaaaaattcacagttaaggactatttctttagacatcatttagaaactaatgtagaagatgattcaaaattaaagaatactacatggaaaagggaaggattaggtggaataggtaatattgtaaaagtccgtattaatcatataggacaaattgtgaaaattggagaatattgaggatgaaaaagcattagataagaccaaagtataaggacgtaaataattatcctctcatgattaaaagaactctccactttagtaatcctgcatatcttagtttacaacagaatcaactttccattgatttgccccatttaaaatctctaggggaaaaggaatcgagaaagcttgttccaatagaagatattggaataattatactagataatcaacaaataactataacacatggttgtattgcagcattattatctaataatgctgcaatcatcacctgtaacaaaagtcgccatcctactggtatgatgcttccaattgatggacataatacacagagtgaaagatttcgatatcaaatagatgcctcgcagcctttaaaaaagcagctctggcaacagacagttcaggctaaaatcttaaatcaagctgcaatactctttaaccgggatattccttgtaaaaacatgatccattgggcaaaatcagtacgttcaggtgatcctgataattatgaaggcagagcagctgtttattactggaaaaatgtctttcctgaaaaaatagatttctttagaggccgtgatggtgatcccccaaataacttactgaactatggctatgccatactacgtgccattgtcgctcgtggtttggtctgttctggtttgttgccgacattaggcattcatcatcggaataaatataatgcttattgtctggctgatgatattatggaaccctatcgtccttatgtagatgaaattgtgttaggaataatagatcggggtgaaaatttcctggagttgggtaaagacattaaaacacaacttttaggtatcgcaacagttgatgttcagtttgaaaaaaatagaagtcctttgttggttggtttacaaaccacaacttcttcattagctaaatgttatgaaggtacgatcagaaggattaactatccaataatgaaaaacttcgagactaagaggggatcgggcttcgatgaaagcgaggactgaaattcgatttctgttgaacaatagagtaagaaagaagattctaataaattatgattttaattgatgcgtttaaatgaatatcgaattttgtgggtattagtttttttcgatctgccaaccgaaactaaaaaagaacgaagtattgcgtctaaatttcgcaaagagattttacgggatggttttgcaatgtttcagttttccatttatttgaggcatagcagcagtagagaaaatgcagatgtacatattaatagggttaaaagactgttaccagaaaaagggcatattggaattatgacagtaacagataaacaatttggtatgatggagttattttatggaaagaaagaaaaagtgttaccggatactcctcaacaactcgaattattttaaatgtcaactttacgaaagtaaaaacacatagaataaaaatccggaagcttttttgtccggatttttttaattctatttattaatgtaactatctgatatataaacgtttgttgtagttcgtgttgttgtaaatatcagtagttcaaaggatgaaagcaaatcacaaccgcttgcttgcttgcctttatcaccgtttagttgttgtaaatatcagtagttcaaaggatgaaagcaaatcacaacatgaatttacagaatacctgaaagatcaaagttgttgtaaatatcagtagttcaaaggatgaaagcaaatcacaaccggccagttctttagcgaagatggcaggttgttgttgtaaatatcagtagttcaaaggatgaaagcaaatcacaacttccaaattatctttcgttaattcctgagcgttgttgtaaatatcagtagttcaaaggatgaaagcaaatcacaaccagttgccccttttctacccaaatttgtttgttgttgtaaatatcagtagttcaaaggatgaaagcaaatcacaacaatacattcgcctttacaaccgacgaatcagttgttgtaaatatcagtagttcaaaggatgaaagcaaatcacaacgggcaactgcaacggaggataaggaaaattgttgttgtaaatatcagtagttcaaaggatgaaagcaaatcacaacttcttttttatatttatttattttactgtgttgttgtaaatatcagtagttcaaaggatgaaagcaaatcacaacaaggtttacgtcccatttattcccttgtgagttgttgtaaatatcagtagttcaaaggatgaaagcaaatcacaacgccaaaacgcatgaacagctaaaggcgactgttgttgtaaatatcagtagttcaaaggatgaaagcaaatcacaactattttcttatcgaacggtatttgagtgccgttgttgtaaatatcagtagttcaaaggatgaaagcaaatcacaacgaagacggcgaaggtgacgcagcggtggaagttgttgtaaatatcagtagttcaaaggatgaaagcaaatcacaaccagtgcgtgctgattatactcaacgtaggcgttgttgtaaatatcagtagttcaaaggatgaaagcaaatcacaacagtcctgatctcgtgagtagggccttctttgttgttgtaaatatcagtagttcaaaggatgaaagcaaatcacaacggaattgaactgcttggatttatttgtaggttgttgtaaatatcagtagttcaaaggatgaaagcaaatcacaaccaacaccctgtaaccatcacttacattccagttgttgtaaatatcagtagttcaaaggatgaaagcaaatcacaactaagttggaaaaggttaaagaaaacctccggttgttgtaaatatcagtagttcaaaggatgaaagcaaatcacaaccattttggaaacttaggaaactattttatgttgttgtaaatatcagtagttcaaaggatgaaagcaaatcacaacacataactttgaacagtatttgtatccttggttgttgtaaatatcagtagttcaaaggatgaaagcaaatcacaacgatgcaggtgctatcctttacgatgatatgttgttgtaaatatcagtagttcaaaggatgaaagcaaatcacaactaattgcctcttaatgtgccttcgattctgttgttgtaaatatcagtagttcaaaggatgaaagcaaatcacaaccccaaccgtgatatttatctatttgctttggttgttgtaaatatcagtagttcaaaggatgaaagcaaatcacaacttgtgctctaaaaaacggtgccgaaatcaagttgttgcaaatatcagtagttcaaaggatgaaagcaaatcacaacgtagcactacgagtactttccggcaaaccgttgttgtaaatatcagtagttcaaaggatgaaagcaaatcacaactgacagaccaagtgtcgttggttgcgcttcgttgttgtaaatatcagtagttcaaaggatgaaagcaaatcacaactttatctcttttatcgatcaggaccattgtgttgttgtaaatatcagtagttcaaaggatgaaagcaaatcacaacccgccaaacagtttttacgatacttagaaagttgttgtaaatatcagtagttcaaaggatgaaagcaaatcacaactataccattaaacttgcatttgtgtgttgtgttgttgtaaatatcagtagttcaaaggatgaaagcaaatcacaactcattcgagttttggaactggttgaaatagttgttgtaaatatcagtagttcaaaggatgaaagcaaatcacaacatatcattgcctttgcagctacgctaacatgttgttgtaaatatcagtagttcaaaggatgaaagcaaatcacaacacgaaaagtcaaattgatagtattagtaaagttgttgtaaatatcagtagttcaaaggatgaaagcaaatcacaactgcaggatagtcgcgcattgctttttctaagttgttgtaaatatcagtagttcaaaggatgaaagcaaatcacaaccacggattgaaggttattaccatatctggggttgttgtaaatatcagtagttcaaaggatgaaagcaaatcacaacatgttctgatgaaaatgaaaggtcatcatggttgttgtaaatatcagtagttcaaaggatgaaagcaaatcacaaccgcgcccgcaattcttttttcatgacaacggttgttgtaaatatcagtagttcaaaggatgaaagcaaatcacaacaaagaatcagcgaattgcttaatactaggagttgttgtaaatatcagtagttcaaaggatgaaagcaaatcacaacacgtaatagtcgataaacttacgctccgtagttgttgtaaatatcagtagttcaaaggatgaaagcaaatcacaactaaaaatgaatctagattattggtcattttgttgttgtaaatatcagtagttcaaaggatgaaagcaaatcacaactaagattagtactctcagaatctgacattggttgttgtaaatatcagtagttcaaaggatgaaagcaaatcacaacaaacttcttcctaagaaaaataattcaatagttgttgtaaatatcagtagttcaaaggatgaaagcaaatcacaacacgtgacatgaaggccattccggatgaatagttgttgtaaatatcagtagttcaaaggatgaaagcaaatcacaacccaagagcagcaacagctaaaataatcgcagttgttgtaaatatcagtagttcaaaggatgaaagcaaatcacaacattgcgcctgcagttctcttatacgtttatgttgttgtaaatatcagtagttcaaaggatgaaagcaaatcacaaccatggtattgaaagaatgatctcctttaacgttgttgtaaatatcagtagttcaaaggatgaaagcaaatcacaacctttcagcccccatttgacacctcctttacgttgttgtaaatatcagtagttcaaaggatgaaagcaaatcacaacgttttttatggtactatcagggaacttaatgttgttgtaaatatcagtagttcaaaggatgaaagcaaatcacaacttgtcaagaaacctctgttttactgcatttgttgttgtaaatatcagtagttcaaaggatgaaagcaaatcacaacaacgccatccacatacattttgaatcctatgttgttgtaaatatcagtagttcaaaggatgaaagcaaatcacaaccaaagcggttacagcctctcaatggctttgttgttgtaaatatcagtagttcaaaggatgaaagcaaatcacaactggtggaattgaaggctctgcgctttccctgttgttgtaaatatcagtagttcaaaggatgaaagcaaatcacaacttacagttaaagacggagttatcgcaagcggttgttgtaaatatcagtagttcaaaggatgaaagcaaatcacaactagtgggtttagtggcaatgtttattgcggttgttgtaaatatcagtagttcaaaggatgaaagcaaatcacaacgcattaacaaattattttaaattatccacagttgttgtaaatatcagtagttcaaaggatgaaagcaaatcacaactaatgggaccgcaactatcagagcgtcacagttgttgtaaatatcagtagttcaaaggatgaaagcaaatcacaacctcttaatactcgtttactttatctctaatgttgttgtaaatatcagtagttcaaaggatgaaagcaaatcacaacattgcgcctgcagttctcttatacgtttatgttgttgtaaatatcagtagttcaaaggatgaaagcaaatcacaaccgttgaaccagttcataaaataattataaagttgttgtaaatatcagtagttcaaaggatgaaagcaaatcacaaccaactgtcccttttctacccatatttgtttgttgttgtaaatatcagtagttcaaaggatgaaagcaaatcacaacagcatatccttaatgaattgcgaacaatatgttgttgtaaatatcagtagttcaaaggatgaaagcaaatcacaacatgtaaaccgataaggcctggaattttaaggttgttgtaaatatcagtagttcaaaggatgaaagcaaatcacaacgataacgggataacacggtatctgcttttagttgttgtaaatatcagtagtttaaaggatgaaagcaaatcacaactcggtggtggccattgttgaaaacttgcaggttgttgtaaatatcagtagttcaaaggatgaaagcaaatcacaacggatcgagttgcaagaaggaagatcagccggttgttgtaaatatcagtagttcaaaggatgaaagcaaatcacaactcctgccggaaaagcccaattgcccacttggttgttgcaaatatcagtagttcgaagaatgaaagcaaatcacaactttcagtgatcgtggtgtcatcgcaaaagtgttgttgtaaatatcagtaagagtatttaccggatggcttattgggtgagaaatggtagaaggttgtggtgaaaggtttttcatttctcttatagaagttaaataattttttactatagattatttaacttcatttttaagtggcaaaatttttgctgataagttttatttataaacatgctcataatttatatacatgattttcaagagaagtgatactgtagtcgtaaacattttcaattatgagtaaaggaaacattattaaaatatccaatggtgtttttaatgagatgtcaaagaatgactatactatttttgcggagacaatacataaaaatgccgcaggaaaaattgtggagaactcaaatgatggtattgtttttggagagccaattataccatcaaagcaaatagatgctaaaataattgttcattttaggcctaaagttggctggaagggcgatggttatggttttgattggttaaggcttgcagatgtaagcccaactatggttggtgatgtaaagtatgaaactattatagggaaataatatagcagaacacctcatactccggcaaatatctataaggatatcaattctgccggtccggattttagtgttaataatggtcaaaatgtattgaattccggtccatttttggctttaaaatctgagtatgataagcacacggttccatggcgaaataagaaaaatagttctggtgtggaaattaaagatgccaataacaatcctattaaagaagaatactttgtttcgtggttgagtttatttcctaaaatgattagtactcctgaacgtccaactacttattctaatacacaggcagttttaagtctgattgtagatattgaagaagatgcagattcattagaatttgatgataatccaaattttgtaattacaccaaaacaagtgattgcaagagggaaaggggttaagagattaaatgatgcagtaactattgagtgcaagaaagaatcgcagttgaccaggtgataacgatacgtagtattaaaactattgttaatgggacaaaaacgagcgttgttgccggaagattaaaagtttgggctaatgttcagcgaaaaaagaaaaaaattgtacttgttgctgttaaaacaagtatttctaatgcctacattgcaactacaggtcaggaatatctttttaggaatttttgaatcaggcattaattaatccagaagtggcaactgatatgctggatgtgagttcgcttcctgattttgatagtaaatatatcaatagcggacaaattgcatcctattatgcagatgattattcgactactccggttacagcaaattcacatcgacccagtaattttcaggctatggaagtgtttctgagcagccttcttcctcctaaatataatgggtattttaaagcattttatctcaatgatggtggtggatatgttgatacttctaatactgtgcaggggttgaatggatattcatcaggggataatgttgttctttttccaacgaaaaatgatgagacggcagcgcatgagtttttacattccctggatctgcctcatacgtttgtcaatgaagaggctgcaccagaggcaaaattcaccttcaagattcagaaaacagataatgtaatggattatagtcatcaggttaatatacaaagaactaacttatggcattggcaatggaaaattgcacatgctgcagcagaaaatgaataacaggcgattattacaattaaccgtcatgaagaaaataaataagcagttccgtattaaaactttagttgttgctattcttttagctggaacgacattatcttgcagtggtcaaaaacatcaaccgaatactactacaaattctaaaaatatgcaactaccaaaggtctcaggtgattttgaaaaacttgatttaaacgagttgaaggcaaaagccaataaaagccatgggattaaagtactgcctgatcggaagacgattgagatggaagtttatgattatcgatttcaggcagaaaacggtgacaatatcaggttctctggtgatgattatggagagtacagattggagcagcgaatcagcaatgcgtattttaatctgataaagatttattatcagaatgggaatgtaaaaagtaaaggtctggagtttaatgtattttatggaacctttaaaaagggcacctggtacagttttaatccagaagggaagttaacttcaaccattaattatgatacacctttcaaatttacctttgaacaacttgttcaatatttagaacaagaaaatattccattaaaaaaaggacctatagcacagaaccccggatatttgacttcaattaagagggctgttcctgataatcaatctccagtttggcaagttagctggttaaaggctccggacaaaattgaagatatagtaattagtggtataactggaaaagtgatatcaaaaaggattcggaattatatcaataattagagattattagtacaggatcaattcaaattagagatatattgttaactattgattgtatttacttgcaattatatttatgatttcttttctaaaaactaaaatatgtaagattatttctaaatttttcctgttgtctggtttgagcggttaattaaatttacttatatttacgaagagaacggatggtgtctccttatttttctgccattcttcattatatctgattttctaaattcaagccctccggttattccattaccgataacatgacaacaaacgcagacgaaccccgatattcagttgctgatccttacccatggtataaatgggttcagcagaaaaaacccatttacagaacgcccgaaggtatgtggatgatcacaggctatgaggatgcaatgatgttattaagcgatccacgttgttcgcattgggggcaggacagcaaaacttttcagtatttgagtccggttgaaaaagccattgcgcaaacattacatgcgctggcacctggtaatacacccgcatttcgtaagcagatcatgcatcagcttgctgccagaacgctccagatcgatgaagatgacatgaagcggcaagcagatgaaattcttgatgggctgcgttcttcctctggtatggaattcatgaatgattatgcccatccatttacattcggaacgatttgcagtgtgatgggagtgccgcaagaagaggtgggtgcgttctccaaaatagtgggtcgcttgcaaggggggtacctcagttttattgatgaaaaatcatggtcaaatggtgaggacgaacaaaaaaaaatattcatcgatacactgcgaaggctgatcggattgaaacggcaaacacctggtaaggatttatgcagtgctatcctggcagttgtgccagctgatgaacaggatgattcttatctgatttcactcatggtgctgcttttttatgccggccatcagaatatgatgaattttatgggaaatgctttggtggcactacaagacagagtcgaagaccagtc

SEQ ID NO: 2120 - DNA, 24302 bp, synthetic construct
  misc_feature 1..24302: note = Synthetic
  source 1..24302: mol_type = other DNA
tacccgtgatgagacaacagaatttcgggcaaataattaatatttccagtatcggatcggaaatgggactgccattccgaggattctattctgcatcaaaatcagccttagacaaggtaaccgaagcgataagatacgaagttgaacaatggaatatccaaatttgctcattgcacttgggagatatcaaaaccaatatcgctgaccatagaataagaacagccgtatcctcaccttacgaaaagatttttaaaaatgtttattcactaatgaataaaggagtaaataatggctttgaacctcaaaaagttgcaaaatatatagagcacctcattctgaaaaaatattggaaacctcactattattttggtaaatttggacaaaaaattggtgtacccctaaaatggattttacctcaaaaattttatgaatttctgatgaaaaaatacaatggattatagatttttgcaaattttatttctctttttctgtttgctcggaaaggctcaaattaagcatttcatattgattgacagtcacactggacaaaagtttcttagaaaagactccctctctgcagtggcatttttagattctttggcaacaaataatttttatttcacgaaaataaaagatataaaaaaagagagttcccaaataaaaattatttttgacaagggaaataattttaatcaagcagtagttcatttttcagaagaaatcacaaacgatttcaatataaacagtacattaaaaataaacaatttagactctttaaaacagaaaataaatcaattctatgcggaaagaggattttctttcaatagagtaaaaaccaaatacctaggtacgagagacaacataccagaggtggaaatatccattctaaaaggagcaccaagaacgattaatggattcgtactaaaaaatcaaataaaagtccccaaacaatttattaaaaatttagaaaaaaaacacataggaaaaacttataacgataagattatcaataagatatatcaatatttaaaaaataatcattttatccaattagaaaaacctcctcaaacacttttcacaaaagattctacacaaatttttctttttttacaaaagaaaaagagccacatttttgatggaataataggcttcggcaatgacaaaagtgataaaataaacttcaatgggacgctaaatattgcatttcagaatatattaaacagctttgagagtattggcatttattggcaacgaactcctgataaattccaaacatttgaactaaaaacacaaattccttacattgcgaaagatttgggcgtggattttcagttaaatatacataggcaagattctacttttgctaatgtgaaagcactaccgagtattttttatagcatttctgacaaacataaagtgggtattcgtggaaattttgagatttcttccgttttggatgcatcttacacttctgcgaaagatttctcacgaagtggagtgggattttggtatgattggagagatgcttcagatgtagatttatttattgacgacactaaactacgagtggagcttgatttattgaaaacaaattatattaacgataaaattgataattctaaaaaattatttctccttagtgagaaaaatttcaacattattaaaaatcactttcttaatctaaaaatagaaactgcaatactagataccaaaactgagctttccacaaatgagcttttacgaatcggtggttggagctctctacgaggcttcaatgagaagagtattcttgcatcttcatatgcctatggcggcatagaatacagatatttagccaacgaacaatctttttttgatggtttcattcaatatggatttatccataacaagcgattccctacaaacactcgtttgtatagttttggcttaggatttaatatgctactacctattggattgatgagtttccaaatatccaacggctcacagattggtgaggcattccaatttaaggagacaaaaattcactgggggattgttgctaaattttagaaactaaagtttcagtattctatccattctttcagtgctactctctctatgagtaatgagtatgatggttttatttttgatttcttcattaatattattaatgatattactctctgtttgactatccaaagcagaaagagagtcatcaaaaataagaattgtcggttgttttatcaaggctctagcaatgcaaattctttgtttttgcccacccgaaagcattacaccacgctctcccaccattgtatgatattggtctttgaactcaataatatttttatcaacatcggcaattttagcatattttatgatggtatctatatttggtgtatctattgcaaaaccaatattattttctatcgtatctgaaaataggtaagactcttgaggaacatagccaatatgctgacggtaaaggtacaggttatgttcttttaaatttttaccatcaactaagatttcaccttccgttgggtctatcaatcgacatagaaggagagcaatagttgttttcccacaccctgttttccccattatagcaagactttcgcctgattttatgctaaaactaacattttcaagagcctttatccctgtatttggatagatgtaggacacattccgaaattctatatctccctttatctcataattttcaaaattagtattgataatttcggacttcatatctaagaactcatttactctctgcattgatgcctctgctctttgatttacagaagtaatccatccaacaagtgaaaatggccatatcaaagtattcacatatagaaaaaaattagcaatcgtaccaatggatatctctccatcaatatatttctggccacctatgtaaagaatccctgcattaagaatccctattacgaacagaatacttgtaaaaaaggaagcttctatccttgccaaattaatcgccttttccttataatctgatatttttttatcataattatccaaaaaataaaattctttcgcaaaaaatttaaccaccctaatccctgatattgtatccgttacaaatgtagaaactgccgattggctggcttgcattatcttagattttttgctaataacaccgctcactttataaattatcaaagataatataggagctgggagtagcgaccaaagtgtcatttcccaatcggtttgtaacattttagcactagttatcacaagtaagacaaagagattaacaatatacatcacccctgggccaagatacatacgaattgctactacatcctcgctaaggcgattcatcaggtcgccaattgtagtttttttatagtcagtaagagacatttcttggtagtgagtatagattttatttttcagttcaaactctattttccttgacgaaacaataatcgtctgcctcatcatataggtgaaaaatcctgtgagtagagacgaacctatgaatatcaaaacatttttaataattttaaaattcaccccaaatttacttgtctttgcgagttcatctacggcctgtcctataaactgtaccttataaattataaaaaaattactcgcaatgatgaaaaggaaacctaagaaaagtaaattcctatgcttccaaaaatacggattaagggtttttaaagctttcattgtgcaaagttagatatttttacggacagaaattcttttattttgtgtaaattttgatatactgaaaaatattttaaaatggaaactaaaaaatttgagtaaatttgccacaaaatttaattaatgcaaaatttcacaaaaaaaattcggcctttcacttatatcacggccttatatttgactatttctcttatttcaagggttgtctttatgtttcatccaatcactacatcggatttttccatttttgaggtattgaaaatcatcttcattggagctttggccgatagttttacgattattttagcaagttcattgatggcaatttacttattattcatctcaaataacaagtatcataagccctacggatatattattttcggtgtgttagtcatcttaatgctctatacgaaatttgtacctaataatatttttgctcaatatggtggctctgttcaggagatagccttaacttttttggggataaagactctctgctttgggataatgcttttcttgcagaaacaaagaagaaatattcgtaatatattgtatttcactactatatttatttactcactatccattattttcaactctgtgagtgaatatttcttctggaacgagtttggcataagatacaatttcatcgcggtagattacttaatttatacaaatgaagtaatcggtaacattattgaaagttaccccgtaattcccttattttcaattattttatcagttacaattttggtaagtattttcatattcatcaaaacaaaatctgccattgaggagattcctacaatacgagaaaaagggattttattggctatatatctatttttatcgggtatctctttggcgataattcctcaatttgacaaaataaaatcatctaatatcttttcgcaagagatacaggctaatggtctttataagttttattatgcattcacacattcggaactagatttttttcaattttatcctacaattgctcaaaaagaggctgaaaagactattttacggcaatttaatagtactgaattagaaagaaaaatcgttggtcgtggcgaggaaatccacaaaaatgtagtacttatatccattgaaagtctctcagctgaatttatgaaattctatggaaatcaagaaaatataacaccttttttggattctttggctcagaaatctatatttttcactaatttctacgctacgggaaacagaaccgttcgagggttagaggctctgactctatgtctacctcctactgctggagaaagtatcgtaaaaagggccgataacaagaataaattctcaacaggaagtgtcttcaaggaaaagggataccaagtaaaatatctctacggcggatattcttattttgataatatgaaagatttcttcggagggaatggttatgatattgtggatagagatagcttttccccagaagaaattaccttctcaaatgtgtggggagtttgcgatgaagatatggcaaaaaaagcaatccaaacaatgaatagtgagtataaaaaaggaaaaccattcttcaatcattggatgacggtaagtaaccaccgaccttttacctatcctaataataaaatcgatattccaagtgatgcaaaatctcgctcaggaggagtgaaatatacagactattcattaaaacaattctttaaaatggcagaaaaagaggagtggttcaagaatactattttcgtaatcgtggctgaccattgtgcctcatcagcagggaaaacagaactccctatggataaatacagaatccctgctatgatatatactcctgatattcatcctcaaaaaatagataaattggtatctcaaatagacttaatgcctactgttttagggttattaaactttaattatcaatccaaatttttgggagaagatgtattctctcctcattatcaagaaagagcctatattgccacttatcaagacttaggatatatcagaaataataccttgacgataatctcacctatgagaaaagtaaaacaataccttttagaaactagtgctgaacaaccatcaaaggagaatcctatcttcttcaatgaaaaacaaaaaaaagatattgataaaaaccttgaaaaagaaactatcagtgcctatcaatcggcttcatattggattcagaaaaaaatgctcaaccgatgataaaaataaaaagagacttgtttttaagtctctttttattttttacaactctatatgaaaaatacttcgcaccgatatcacaatatattgtattcctattgacaaaacgaaaaagcctatgatttttgacaaagtggccattcctgaatctcccaagtattttgaaatagcattcccactacgaaagataatgtaaatactcacacatattgctactacggccaatattatcaatcctttgtctgcataatcgctataatcattattcttagcaatcagtaaagacatcgtgcctggccctgccatcaaaggaatagcaaggggcgtcattgctacatttgccttagtattggttgtctcggaagagtcatttgatgtagaaatcttatctgctagtaggctaaaacctgccaagcaaataagaattcccccagcaatacggagaacatctatttcaagacctaaaaactttaagacatactcacctacaaaaaaggcaatgataagtataataaatacattaattgccgaccatagagctactttgtttttctcctctgggctatcatttttcgtaagtccaaggaatacaggaagatttcctatcggatttaataccgaaaataatgttacaaatgttgaaagaaataaatccatattttttaatattaattttgggcaaaaataatattttatttctaaaattcatttagatttcttacctttgtacaaagtaaaaacatataaaacatgataggacaattagttgcacatgcaacagataccgaaagagggattttttataaaaagacctacacacatttagcattagccttgttggcctttattgcagtagagtgttttcttcaaatagctattcctgatgatattgcactatcatttttaggtggaaaattcacttggatgctaatattggggggattttggttatgctctgttttagcagaaaaatgggctttatcatttaataagagtactcaatatatgggcttaggtctatatgtactattggaagctattatcttcttaccgatgattaagattgccttactctatgctcctaatattattggtcaagcgggaattatcactttggcactttttggtgggctcacaggagtagttttcaccacaaaaaaagatttttcatttttgagaagtttgataatcatcggtggttttgcatcattggggctaatcgttgcaggagcaatatttggttttgacttaggagtttggttttctatttttatgatattattagcctctggcagtattctttatgagacctctcaactgaaaaacacttatagtacagagcaatatgtcggagcatctctacgattgttcgcctctataatgctattattttggtatattttaagatttttgatgagttcaagagactaaaaaataactaatttaaaaaggagatacttattatatatctcctttttttatttatattgtatccaatatttcactcagagatgaatagcctcctccgtttatcccattttctaaaccttcattttgcagaaattccaatgccttggcacttcggtgtcctcctcgacaaaatacaacaacatctcctttaagagacagaatctcatctttcctcatttctacctcaccaagaggaatattgatagcaccttctatactaccatctacatctagctccataggttctcgaacatctatgagggtataatttcctttttttaaaacttcaattaatgacatgcgtatattatttaaattaatgctgtaaatataaaattattctccaaaaaaaacaaaataataattttattacctttgcaaaaattcaatttaaatacagattaaaaaaaattatacatctatcacctatgcactcacaactcagtaaaaagatttgaaataatactcaaaaatccctctactcttagtaaatgggattaataacccttaataagaaaaattatttttacttcaaagtttagcttaatggattacaataaacttaaatacgaagttttacggcaattttggggatataaaaatttccgaaacctacaagaaaacataattgatagcatttcttttaagaatgatacgctatgtctattgcctacggggggcggaaaatcaatatgctaccaattaccagccctcatcacagaaggtgtttgcatcgtaatatcaccacttttagcacttatgaaagaccaggtagaacgcctacaatctatcggtatagaggctgaattcatttcatcagaattagacgacaccgaaatagataccatctattcacgttgtagaagcggtattaccaaacttttatatgtatcccccgagagactcaccaacacaaaattcatcaatgaagccaacgaaatacctttctctttcattgctgtagatgaggctcattgcatctctgaatggggacaagatttccgcccaagttataaaaacatcaaggattttaaggaaatgtttcaactgccgtgtattgcactgacagcaactgccacacctaccgttgaaaaagaaatcattgaaaaattaggactaaaaaactgcgaaatatttaaaaaagggttcaaaagagacaatatcaacattaatatactaaaaatatccgataaatttgataaaatttataactacctaaatcttaacaaaacttcagggcttatctatgttaatacccgccaagaggcagtcaatttatctcaatttctccgctccaaagggttaaataatgtagattattaccacgctggactatcaaaaaatgaaaaagaaaagaaacaaaagtggtggcaagagagcaatctaaacacgctaatttccacaaatgcttttggtatggggattgataaagaaaatgtatcttttgtaatccacttaaacccaccctactccattgaaaattattatcaagaaattgggagagcaggaagaaatgggcaacccagctatgcttttttgctatggaatgaacaagatttgactaaatccaatgatatactgaaatctcaattcccaaaccaaaaggaatataaaaaaattatcaccagtctctactctatgtatcaaattgctgattatgaatatattgataaagaattccaatttgatgtaaaaatgctacaacgcagaacaaattgtacttcgggaaaaataaaatctgtattagaatttcttcatttacaagaaattatatacctacgaaacagaaattctccctcctcaatagagttacttattccttacaatgagatagaaaacctaccgccatctgatgcttatttcttggaactactcctacgaaacataataggattaacaactcaaaaaactcattttcaagaagataaacttgctaataaactaaatattgataaatccctcatcaaggaacgaatcattgaaatgatgaataaaaactatatagaatacatagatggcgatatttctagcatacgatttctacacccaagggatgaaagacgattactcaattcttattggtctgattttaaaaccattcagttcaataaaataaaaaaatgggaagagtttaaatatttcattactaacgaagatttctgtaaaatgaaacttatcctccattattttggagaaaagacgagtagtaattgtaataattgtaatatctgcaacagcaaaaaaccaatcaaccattgctctgaaaaagaagaaattataaaaatcctacgaacaaaaccagctacaaaggtcgaaattggtattttgctcccacactgctcctccgaaaaaatagaagaacacttgattgacttattaaatgatggaaaaattacgataaaagatttccgaacttatatgataaaataacaaaaaagactatctaatggatagtcgtttataataaaaaaatctccctgttgttggtcaaggagaaaaccaaatgttttcacaacggaataatccttattgtgagtaactcaaattctatgggacaaatatataacttatttttcaattaaacaattttttttgattttttttattaccttagcaacatctaaatctaacaaaaatgaataatacagaaaattacattctaggccttgatttaggcacaaatagtattggatgggctgtaataaatgacgctcaaaatcctggcgaaactcctgaaattatcgatttaggggtaagaataaatccactaaccactgatgaaaaaaacgaatttacacaagggaaagctatctctacaaatgctggcagaacaattagtagaggtataagacgaaacaatcagcgatataaacttcgtagattgaatctcatcaatatcctcaaaaacaataacatcatcaataatgaaactattttgggtgaaaatgggcaaaatacgacttttgaactattaaaactaagagcaaaagcagccaaagagcaagtatctctaaaagatttaggtcatatattgttaaaaatcaataaaaaaagaggatataaaagtaatagaaaagcccaagataacgacgaagggcaattaattgacggaatggcaattgcaaaaatattgcataatgaaaatcttacaccagggcaactctcattgaggttagcaaatgaaggtagaaaggtattacctacctactatcgctctgatttacaagcagaatttgataaaatatgggaatttcagaagcaattccatccagatattctgacagatgaactttatactgaactaattggtaaaacgaaaaaaacaacaatagattattttcaaaaatataatatcaatcccgcggaatacaaatattctaatcaatccgaaaaaataaaagtacctcttcagttaagagttgatgctatttctaaagaaataagccttgaaaatttggctcttgtgattattgaaatcaatggtaatataagtagttcaagtggacttcttggttctatctcggacagaagtaaagaattatatttcagtgaacaaactattggggaatacctctatgctcaattggaaaacaatccacatgcaagtctaaaaaatcaggtattttatagacaagattatatccgtgagtttgaaacaatttgggaaacacaggctaacttttacccagaattaactattgaactaaaaaaagaaattggcgatgaaatattctatcaaagaaaattaaaatcccaaaaaggtcttgtttccttttgtgaatttgagagtaaagaaatagaaacagataacgatggtaaaaaatctacaaaaataattggtgcaagagtagctccaaagtcgtcgcctttatttcaagagtttaaaatttggcaaattcttaataatatcttgattcgcagaaagggagtcaaaaaaagaacagcagaaaaagtctctcaacaaaatctgtttaatgaggaagtatccatttttgaactcaacttagagcaaaaagaattattattcgaggaacttaatttaaaagattgcctaacctctgataattgccttaaaatattaggatactctaacaaagaatgggagatgaactattccaaagatgcaaaaatagaaggcaatgccaccaataaagcattttatgatgcttatttacagatattagaaatagaaggttacgaatcagattttataaaaaataacgatgcgccaaaaattaaaaaaagactctttactatattcaatgaattaggaattgataccagaatccttgattttgacgcagagttgtcaggaaaagattttgaaaaacaacctgcttatcaactatggcacctcctctactcttatgaaagtgataattctccaagtggaaatgagcgattatatagcctattagaacaaaaatttgggttcaaaagggagcattctgagattttagcaaatgtaaaattattagccgattacggtagtctctctacaaaggctataagaaaaatatatccttatattagggaaaataaattcagtgaggcttgcgaattggcgggatatcgccactctaaacactctataaccaaagaagagatagacaacaaagcattaaaagaaaccttaactatcttgaaaaagaatagcttacgacaacctgtggtagagaaaattcttaatcaaatgattaatgtggtaaatgaattaatctataaatatagcgaaaaagatgatgaagggaatattgtaaaatatcataaattccgcgaaattcatatagaattagctcgtgaacttaaaaaaagtgctaaggagcgaagtgaaatgcaaacacaaatcaacaaatcaacaaaagaaaacgaaaagataacaaaaatcctacaagatgatttcagtattatgtatcctaccaaaaaggatattatcaaataccgcctttggttagaactatcacctataggatatagagacctatacaccaatcaggaaataaaaaaagaatcattattttctaaaaataacactattgagatagaacatattataccaaaagcaaggttatttgatgatagtttttcaaacaaaacattagcatttagtaatataaacaaattaaaaggtgataacactgctattgatttcatctctaatacctataatagtgacttggataactatattgaaagagtagaaactctatataaagcaaaaacaataagcaaggctaaatatctaaaactcctaaaaaagacatccgaaataggtgatggatttatagaaagagacttacgcgaaacccagtatatcgctaaaaaagccaaagatatattatcccaaatcaccaaaaatatagtatctacctctggaagcattaccgataaattaagagaagattggggactaataaatataatgaaagaactaaatctcccaaaatacagagcattaggacttactgaaatgcaagaaagaaaacatggacataaggtagaaacaatcatagattggacaaaacgaaacgaccatcgccaccacgcaatggacgcactcactgtcgctttcactaagctttcttatatccaataccttaaccatcttaatgcaaggaaagacgaatctgataaaaaacatgcctccgttatgaagacccaaaataatgaaatgacgaaagtgatagaccataatggacaggagaaaagagtattcaaagaacctataccaaaattccgaaaaatagcaaaagaatatttagaaaatatcttaatctctcataaggctaaaaataaagttattactatcaatatcaacaaagccaaaaataaggtaacttccgaaataattgataaaaacggaaataaaaaaacaataaaaggacaaataacaaagacacctcgtgggcaactccataaagaaaccatttatggcacatatcaatattacgaaaccaaagaagtaaaaataagttctagactaaacaaagaaactattaacaaagttgctaaccccctatacaaatcgctactattaaaacgattagaagaaaataacaacgaccctaaaaaggcttttagtggtaaaaatagtatcaataaaaatcctattttcttagataaaaataaaactaaaactatgccagattcagtaaaattggcatggttagagactggctactccatccgaaaggatgtaaatccatcaaactttgatagcgaaaaatcaatagaaaaagttttagataaaaatatcagaaatatcctaatacaacgattagacgagtataatggcgaccctacaaaggcattctcaaatttagataaaaatcctatttggcttaataaagaaaaagggatatctataaagagagttacaataaccggtgtgagtaatgcagaacctatacattataaaaaagaccatttaggtaattttatacttaatgataaaggtgataaaattcctgtagattatatacaaactggtaacaaccaccatattgctatatataaagatgataaaggagttttacaagagcaagtaatatccttctatgaagcagtagaacgagcaaatcaaggcgaacctatcattaataaaacctataaacaagaagaaggctggaagttcctattcacaatgaagcaaaatgaaatgttcgtattcccaagtgatgattttaacccaaatgatatagaccttcttgaccgtaaaaacaaaaaagaaataagcaaacatctttttagagtacaaaaattgtcgtttacaggttataaatatgtatttagacatcatttggaaacaacagtagatacaaaaaaacaacttaatgatattgcttataaacaattttcaaatttagattttgctaacaacatcatcaaagttcgtataaaccacttaggagatatagtaagtgtaggagaatactaatccacataaagtttagcaagaatttttcttgctaaactttattttattttaaccatataaaaaaacttaacactatgctgtatcgctcaatttatatcggaaatccagcttatctaaaactaaaagataaccaactgaaaataatctgtccggaaacaaaaaatgaaaaaggctccattgccgtagaagacttggggctactaatgctcgaccactaccaaataaccatatcgcatcaacttatacaaaaaatgatggaaaacaatgtcgtaatcatcagttgtgatgcccaacatctaccacaaggcttaatgctacccaccagcggacacacactattctcagaaagaataaaataccaaatagaagccagcgaaccgctgaaaaaacaactctggaaacaaaccatagaagctaaaatccaaaatcaatccaaaatattagaacatctcggaaaattctacgagccaatgtacgagtacctaaaaaatgtaaagtctggtgatacctctaatatggaaggcatcgctgcacaacactattggaaatacctcatcagccacgattttatacgagaccgcaacggaaattaccccaatctattcttcaatttcggatatcaagtactccacagcatagtcgccagagccatcatagatacagggctactccccgtcttgggtatcttccaccgaaataaatacaacccctactgcctagcaagcgatattatggaaccctatcgcccctatgtggatttcctcgtgataaattggataaaaaacaacccaaactgcgaagaactcaccaaagaggccaaatcccacctcctaaatatcgcttctactgatattcggattgagaatctcactcggcctttgttggtcgccgtgaaaatgacctgcacctccctctataaatgctatacgggagaaaaaagacaaatatcatatcccgaaattgttttttaattaatatgaaatgatagactacgaacgcctaaatgcttatagaattatgtgggtaatggttttatacgacttgccaaccgatggtagagagtgcctaaaagatgcaaacaccttccgaaaaagattaatagacgatggcttcaccctattccaattttctatgtatatacggcactgtccaagcaaagaaaatgcagaagtacatatcaatagagttaaaaattggctaccaaaatatggtaaagtcgcaataatgtgcatcacagacaagcaatttgagaaaatggaaatattctattctagaaaacaagaatccctcccctccacttggcaacaattggaattattctaatttcccaatcctatttaacacaaaaaccctctgaaaatcagagggtttaatctttgaggttgtgattcatccgcaaagataaagaatttgaaagttactcacaacccattttcgtaattattaagcgtttttcgagttgtgattcatccgcaaagataaagaatttgaaagttactcacaactacccctgaatattcctttttagcatcaaagttgtgattcatccgcaaagataaagaatttgaaagttactcacaacttatttcgttacattgtcccccgttctcctgttgtgattcatccgcaaagataaagaatttgaaagttactcacaacatgattttatcgcttgccttatttgttttcgttgtgattcatccgcaaagataaagaatttgaaagttactcacaacctacatgatttgggttgtaatcgttagcttgttgtgattcatccgcaaagataaagaatttgaaagttactcacaacaaataagatataatttcttctgatgattttgttgtgattcatccgcaaagataaagaatttgaaagttactcacaactgacaaagtaaccttagtcatcgagaagaagttgtgattcatccgcaaagataaagaatttgaaagttactcacaactgtgttgtgagtagtcccattgtgcgaatggttgtgattcatccgcaaagataaagaatttgaaagttactcacaacaattttaattgttaaactattttttattatgttgtgattcatccgcaaagataaagaatttgaaagttactcacaactttatagcttttattggtatcggttgctgtgttgtgattcatccgcaaagataaagaatttgaaagttactcacaacttaaaacagaaaatccattggtgagcttctgttgtgattcatccgcaaagataaagaatttgaaagttactcacaactatgttttaaatcttttgaaattagggatagttgtgattcatccgcaaagataaagaatttgaaagttactcacaactcgtatatcggcaaaatgtattcttaaactgttgtgattcatccgcaaagataaagaatttgaaagttactcacaacgggagttccttaatggaatataccagatttgttgtgattcatccgcaaagataaagaatttgaaagttactcacaacaccaagagtaatattctcaatttctttgatgttgtgattcatccgcaaagataaagaatttgaaagttactcacaacttatttttgtacagaaaacaaacttgtactgttgtgattcatccgcaaagataaagaatttgaaagttactcacaacaacacttaggtataaaagccaatgttttatgttgtgattcatccgcaaagataaagaatttgaaagttactcacaactttgattggtgagtatgtttatgagtgcgagttgtgattcatccgcaaagataaagaatttgaaagttactcacaactataatttcaagtattatatcgatgatagagttgtgattcatccgcaaagataaagaatttgaaagttactcacaacgccttggtatcgtgttgttatcaacgggtggttgtgattcatccgcaaagataaagaatttgaaagttactcacaacctgctatacttcattgaggatttcggatatgttgtgattcatccgcaaagataaagaatttgaaagttactcacaactggtgtaatactcagtgagtaaattgattagttgtgattcatccgcaaagataaagaatttgaaagttactcacaactccatatatcaactatcggtagtctttccagttgtgattcatccgcaaagataaagaatttgaaagttactcacaacctgggaagtgaatatcaactaatattgcttgttgtgattcatccgcaaagataaagaatttgaaagttactcacaactaatcttctatttcttctacaatatctggagttgtgattcatccgcaaagataaagaatttgaaagttactcacaacgagtctaaacgaatacacgaacagcgagcagttgtgattcatccgcaaagataaagaatttgaaagttactcacaacatcctacatcgccgaccaatcgcaagtatcgttgtgattcatccgcaaagataaagaatttgaaagttactcacaaccgataaagcaaaacagattagattgagagcgttgtgattcatccgcaaagataaagaatttgaaagttactcacaactaattatttttacaatcacttttttaaacagttgtgattcatccgcaaagataaagaatttgaaagttactcacaactctgtgatgaatcttcaaaatgaagaaattgttgtgattcatccgcaaagataaagaatttgaaagttactcacaactctaataaagctgtatatttatcattattagttgtgattcatccgcaaagataaagaatttgaaagttactcacaacatttgcttcatcatctccaacgctttcaatgttgtgattcatccgcaaagataaagaatttgaaagttactcacaactactatcgttattggcttcaatagtctctggttgtgattcatccgcaaagataaagaatttgaaagttactcacaaccagaccactatatttaacacctgaaacattgttgtgattcatccgcaaagataaagaatttgaaagttactcacaacacacactcaaagaacaaaattctcaatatcgttgtgattcatccgcaaagataaagaatttgaaagttactcacaactatcctgaataaacaaaagttaaaaagtctgttgtgattcatccgcaaagataaagaatttgaaagttactcacaactaaccctcgcagttacagcatataccgcttgttgtgattcatccgcaaagataaagaatttgaaagttactcacaacttaacatccttaatttcctcattcttagccgttgtgattcatccgcaaagataaagaatttgaaagttactcacaactttacagaatatggatttgataatagatttgttgtgattcatccgcaaagataaagaatttgaaagttactcacaacttctcttaaatcgctaatcaatttatcatagttgtgattcatccgcaaagataaagaatttgaaagttactcacaaccatcataaaaacaaacaataggcatcgtgtgttgtgattcatccgcaaagataaagaatttgaaagttactcacaacttgttgtctgctatcaagaatatcagcggagttgtgattcatccgcaaagataaagaatttgaaagttactcacaactagtttcgtgtagctgattgagcaattttggttgtgattcatccgcaaagataaagaatttgaaagttactcacaacgtagtctctacgatttcattttttggaaacgttgtgattcatccgcaaagataaagaatttgaaagttactcacaactggtgaatgttttcgcttcctctggtaagtgttgtgattcatccgcaaagataaagaatttgaaagttactcacaacccttgcagtatgatttctttataaatgcgtgttgtgattcatccgcaaagataaagaatttgaaagttactcacaactatcactccgttttttggtttttggaaacggttgtgattcatccgcaaagataaagaatttgaaagttactcacaacaactcgctccattatttttttctgctctaagttgtgattcatccgcaaagataaagaatttgaaagttactcacaacatatcttcaatgatagtttctgtgtctaatgttgtgattcatccgcaaagataaagaatttgaaagttactcacaactattaaaaaaaatgagagcggttaggctctgttgtgattcatccgcaaagataaagaatttgaaagttactcacaaccaagagagatagagatacaatttgcgaatagttgtgattcatccgcaaagataaagaatttgaaagttactcacaacttatgatttcttcgttaatacctatgttttgttgtgattcatccgcaaagataaagaatttgaaagttactcacaactgtgtgagagttgcaaatgtagtgtattttgttgtgattcatccgcaaagataaagaatttgaaagttactcacaactaatctatcaggattaattatttctgcggtgttgtgattcatccgcaaagataaagaatttgaaagttactcacaacacctgctgagattcagaattgagccagatagttgtgattcatccgcaaagataaagaatttgaaagttactcacaacatcctccccatcgtcgtctttttctattgtgttgtgattcatccgcaaagataaagaatttgaaagttactcacaacatggcagcacattaactatcaccaccaagagttgtgattcatccgcaaagataaagaatttgaaagttactcacaacttagattagcaagaaatctattgcgataatgttgtgattcatccgcaaagataaagaatttgaaagttactcacaacaaaatcaattgattaataaattaattgagggttgtgattcatccgcaaagataaagaatttgaaagttactcacaactagagaattgcacaacaaacaaacttcctagttgtgattcatccgcaaagataaagaatttgaaagttactcacaactcttcaattgtttgccttttgttgatattagttgtgattcatccgcaaagataaagaatttgaaagttactcacaaccactgatgaatttgaggattctatgtattagttgtgattcatccgcaaagataaagaatttgaaagttactcacaacaatacgagttgagaccacgacccgagttaggttgtgattcatccgcaaagataaagaatttgaaagttactcacaacagcttggcaatatcttcattaatttttttggttgtgattcatccgcaaagataaagaatttgaaagttactcacaacttagttagcagaatacccatctattatcgtgttgtgattcatccgcaaagataaagaatttgaaagttactcacaacactgcttttaaaagttcctctttatttgtggttgtgattcatccgcaaagataaagaatttgaaagttactcacaacaggtattaaaagcctttaaataactttgaagttgtgattcatccgcaaagataaagaatttgaaagttactcacaacgagttcgaggcagatttagacgatgaaatagttgtgattcatccgcaaagataaagaatttgaaagttactcacaacttgggttaggtaattgctcgttattttaaagttgtgattcatccgcaaagataaagaatttgaaagttactcacaactctgtggcgtaacggatatttctcccccattgttgtgaatatcggcatagggcatagacgatgaaaagacgatactactgccccttagctcactacggatagagtttcgtaggttgcctgttcggagcattagggagcctcgcgagttgggagatttggtgtttttccatttttcattaaaaaaggctttacgagtgaaattttccttaaactcagcctctaattttaccttgatgtcggttagtgcttgttgtaaaaatttattgaatgacattgtttattagttttttatttgtaaatttgcgtaaagttttataccaaatgacacttgaagaatattataaagccaaagaaaatataaagatacctgaagggctatcttgggaggatgaagacaagttttatttccaagaaatagagaaattgcgttctcaactttcccaaaaagatttagaaaaagtgttagaagatattagaagatttcagaaaaaaatgcaatctccttacaactaaatttcttccatttcaattctattaaagccttgttcatcaacatatacctttaatatcttaaattgtgttccttccttaaataacacttccttttcatgagagaagtaggacaattcttctatctgttttccatttttagataatattttatactttgtgtttctatcaaatgatttttctctatcttttgaggtagataaataataattttcggtatagggttctcctgtttctgccgcctttttgtatttattaatcacttctagggataaatcagaaccacgataaaccgttcctttataagattctaatttatccaaggcactattcattacttttctgtatttttcaaaaaattcttctttgggttctcctccatttcttaaataatagtttatatcaacaaagaaatctccagtatatttatctacacaaaaagtttctgctggtcgtatcttattattaatttgaagagctttttgatgagtttcagactgggcatattcttttgcatcttgtctaaagcttttgaaaatggcatcatcatattttgaagtatcttctgtgtttttattttgactttctttatttaatatttccgtaacttttttagctcctactactttgttgtaagcattattaggtgggaatattttttgttctttacctggattaaagcggaacatttgtagtttgttttttccatttggagcgatgtgtgtagttgctttttctcctaattcctgtgcttttttactatcggataagtttttttctcttgcgaggacttctacggcaatacaacggcaacgccagccattgggtggataatactctgtccagaagtcatcatcttttggcagacagattccatttaatgcttgatgttgtgctctgaccttttcatcccctgcggtgcggtattccagccaatatctgctggtgtcttcttggagatttgcccagttggcagcggattgtgcggaatgcacggcaaactgatattctgcctccaagtaatgctgattatatctttcattgagttttaatattttttgttcaaataagtgataaggcacgatgtgtccgttatcatctttgaggtagcttcgtgcttcggtgagctgagcgtgggtttttagtcccgagaagataaaagcatctttttcaaggtaggctttcatctcggagggagtttcgtgagggatagccgatgaaaatacttgtgctgtttcttctactacctttttaaattcgggcacttttaataaatcttcgggtttgtagccttttctttcgaagagggttttaaaggctgtttcaaagttttttaaaagttttttaaaatcgttattttcttcttttttagttagctttaatctttccttttggcaactttcacaattgcattgggagtattggtattccaaactttggtgtaatgcctcaaaataagtcctcgccccagtcctcagagaggtggcattgtgctgtgggagggttaatcgaaaaaatagtctgcggagaggttttgctgtgggtggttttttctatcctgcacctcgatgccgaatttttcttttatccattcgttaggcacttctttgtagggtagtatatctttggttcgtgcccatagttcgcttaggtcttctactttatcatattcaaagagtaggttatccattgggaggataccgattttgaataatgcagggaggactttgctattcatatactgctctacaagggtttggtcggcatctatgaggttttgtaagatgtcttgtgaggattgttccttgctacggcttccgtattgggtatcttgccctatgatagccccagagatgagtagagagatattatctcggcatagttttatcagtccattatacacttcgcctgtggcgggtgttcctgtggttgcccattcgagtttttctgtttcgtcgataataaaccaagcggcagcccccatatcagtcatcattttttcggcacggcgtagggcaccagaatctcgggtgtttgttttcatcactcgtggggggatgccgtatatttcacagagttcggaccagcaagattgtgcaaatcttgagaataagatatgaggaatggctttattgataagtcctaaatctcctgtggtaccgaagtctatgagccacgagccgtattcgggggcgttgagatagtcaatacctttatcatcttgataatcattgaggataattccttttttgggaagtacattttggcgaggtatgaggtctattttcacctttttgggctctgtttcagtgcgattaaactctattaatgtataaccgaagaagatgctatctaatatgtggctaatgatttcattgaaccatacggatttttgcagtaggtcggtgaactgggtatttgtttctccggcgtggtttttaatgataaaattggaggaaattgtttttagttttctgttttggatttgcgaggtggtatgggcatcgagcatcatatcctccaagaggttgtaataaggaagcggcggcgaaattcttggaagctgtagaccaatttgagcggattatcaatgatatggaacaaataaagattacccgcttgacggaaaagaagaccaaattttattcaccaccattatagttaaactctactctgctttgcaatattatttcatctaaaatcttcgaaagatctcctctttctattaccttagataaacaagcaagta

SEQ ID NO: 2121 - DNA, 24302 bp, synthetic construct
  misc_feature 1..24302: note = Synthetic
  source 1..24302: mol_type = other DNA
ccggctcttttttaatccttttctacatcttgctttattggtttcctgcctatttggtgactttggtcgccatggtttctcctattagcgaaatgctcagtggcaatcctgcgagtcaatggtttttgtatggtttgatttacaccttggccattatcgtcatgggagtcaggatgttcagaaaataccgtggcaataaataccagcagcttcgtacggcgtccgtgatgtttttccagacggcatttgcctttttgattcctgagattttagtgttgttaaatcaaccttattttgatttcaaaaatatttggccgctggactatgattttttctacgattatcagattagtaccttcttaagttccggtggagtaggcatgtttatgttgatctgggggattttattaattatagttggagtacctgttttcacatatttcttcggtaagcgttggtattgttcctgggtttgcggttgcggtggattagcagaaactgtgggtgatccttatagacagctttctgataagtctctaaaagcttggaaatatgagcgctacattattcacggagttttggttttagcggtggtgatgacgctggtgactattgccaattatttttcgggcttcagttttctgggaaatgccacaaaccagttacattcgttttacggtttcgcgatcggatctgcttttgccggagtagttggtacaggtttttatcctttcatggggaaccgagtatggtgtagatttggttgtccactcgcggcttatcttggactcgtgcagcgattcaaatccagatttagaatcactacaaatgggggacagtgcatttcctgcggaaattgttccacttattgtgagatgggaatagatgtccgagcttatgctcagaaaggacaaaatattgtccgctcaagttgtgtaggatgtggagtttgttctgcggtttgtccgagaggcgtactgaaacttgaaaatggatctgaagagaaccgtattactgatttcccaattctaatcggaaacgactctgttaagttgaatgcctaaatgattttcctctaccttctactgggaatatataccctgggaatgctgtttatttttgcctatagcttagctcaagggcatttgcttttgaattttttaaaatctagaaagttaaagggccctattccatcggaccctgtgaattggcccaaggtaacgatccaacttccagtgtataatgaacgctatgtcgtggagcgcttgattgatgcagccgcaaaaattaattacccaagagaattgctccaaatccagattttggatgatagtacggatgagacagcccagcttattttagaaaaaatcaaagcctttccaactgttgattttcagtaccttcatcgggtagatcggaatggatttaaagcaggggccttaaaggaaggtttggaaaaagctaccggtgaattcattgccatattcgatgcggattttgtgcctgatccggatttcttgaaaaaaaccattccttatttcacttcagaaaagattggtatggttcagacgcggtggacgcatttgaatgaaaattattcactgcttaccaagttgcaggcctttgccttggatgcccattttctgatcgaacagattggaagaaatactcaacatgcttttatcaatttcaatggtacaggaggagtctggagaaaaagctgcattcttgatgctggaaactggaatgatgataccctaacggaagatctggatcttagctatcgtgcacaacgcaaaggttgggaatttgtctatcgaagggaaattgaatcacctgccgaacttccacccatcatgtcggctgtcaagtctcagcaatttcgctggaccaaagggggagctgaatgcgctgcaaagcatgctggaggagtcttgaagcaggatttgcctctatcgactaaaatccatgcaatggctcacttgtttaatagcactattttcatcgcagtaatcacggtaagtttatcaagtataggagtttggtgggctggacagcaaggattgattccaagtcagttatttcagttagccggaatttttatgatcggatttgtgatcatcgccgcagtgtacctggtagcctttttctacgagaagaaaggtttctggaaaagtttaatccaaggactttacattttaccgctctttctctcagtttccatgggtttagcgttgcacaattcacaagcagtttgggaaggtctaacagggaaaaagtcaccatttatccgtactcctaaattcaaccttgagggaggcaaaaccggtctaaattctaatctatacattaccggaaagattccggtgacgacatggtttgaggggctcttcgcattgatttttgctgcaatggtttttctttcaattcgaatggggtcttttgaaatgctgccttttcacttgatgttgacaataggatacagcttggtttttatcacctctttcaaagcctatggtttgggtaaataacaaatgagaaaagtcccaattattgatgtcattattcctgcatacaacgaggaaaaatcaatccctaaagtaattgctgaaatcccaagtttggttaggcatatcgtagtagccaataataattcgtcggatagaacatccgaagtagcagcggcagctggagcacaggtagtgttcgaacctcaaaaaggttatggtaaagcatgcctcacggcaatggattggattaaaaagcaggcgatccaaccggatatcgtggtgtttttggatggggattacagtgattatcctgaagaattgctagatctcattcagccaattttggagggtaaagcagaaatggtgatcggttcccgagcacttggcgagcgggaatctggttcgatgacattgccgcaggtttttggaaactggcttgcaacaaccatgatgcgttacatgcaaggagcaaaattctcggacttagggccttttcgagcgattgtttggcgagatttattgaacttgaaaatggtagatcaaaactttggttggaccatcgagatgcaaatcaaggctcataaggcagggcttcgctatacagaggtgccggtaaactatcgaaaaagaattggtgtttcaaaagtcagcggtactgtcaaaggcgtattcggagcgggatacaagattatttttacgatttttaaatattggtaagggaagcctaatttgaaaattcaggattttaattcactgtaaaaatattctaacggactgctttcaagtctgatgtccaaagtgaccttatttcaaatcgcaggaaactacgaaaatttaattttatgaagtcgaatctcttttctttaattctcatagttcttcttttttcctgtagtccttctggacgcgaaggagtagtggaagaacagtttgccggacattggtatcagggaaaagcagaaatcaatgtgtttgagctcaagcaaatgcgttatggggaagtaagggaaggaaaggcagttatgatttttgttacggaggatttttcgaagcgaaagcaagtcaaattagataatcccagcggttcaggagcagacgcccaaaaagtcctaaaactcaatatgaccagagagtttgtgactggagtttatccctatcataccatgctatcagtttttacgccagtctatgaggagataaattctcccaaattgacagcctcaatgacagaatggtgtggtcaatcttttgcgcagatgaattggaaaaataatggctatcaaactcagattttttcctatttcgaatctgaaggagatcaggaatttaagttgagtgccagatccgaagatgagttattcaacctgattcggttaaatcctgacttgatttctgaaggagaaaaaaaactaatccctagtttgatttatcagcgattttcccacatcccattggaggtcgaagaggctgtgatcaccaagaagtcttttggatctgctcaagaggagatggaagtgaattatccgagacttgggagaactctagtgattcggtatcaaactgcttttccatttgagattctttcctggcaggaaatccaaatcacaaagaatggtcaacaggaagtcacctccgcagtgagaaaacgggttcaaatgctagattattggactaaaaatggattggaagatgaagttttacgagaaagtttaagcttttgaaaccatctcttagaaatggcctgaacttattaatttggttcttgatgctattaggaatcctgacattaggctattgggttccgagggcagaattcaccacacttttcatgctgtttaccttagtttttgcggggatgctgtttctaaggaaatcacttcccccaactttagattggaaatggattttttttgcgggattgatcctgcgggtttccttactatttgcaactccaaattggtcggaagattacatcagattcctttgggatggtgatttacttcggaatggtataaacccctatttgttgacgccctcgcaactggaagaattagggcttgccgctgataatgctttccggattcagctttttgatggtttgaattctcctgattattattctgtctatccaccattgaatcaagctttgttttacattggagcagcagcatccaatggttttgtttggaatggttttataactctgaagaccattttaatcctaggagaaataggagtgttttttgtttttctcagaatttttctgctcttacatattccatttaataagctgatctattattggttgaacccactagtcatcttagaaatctctaataatctgcatttcgagggcttggtactcctgtttttgcttggcagtttttatttcattttatccaaaggtttggccaaatcaggatttttttgggggatctcaattggcttgaaacttctccctttgatgctcttaccctcatttttttcacttgggaaaattcgaaaatcataccctttttggatgggtacctttctggctttaatcctgagctttgcctggcttatgatcgatcagtcatggatcaatttcttccaaagcctaaaactctaccaaggcaaatttgagtttaatgcatcaatttactacctgcttcgggaagtgggtttttggatccaaggttataatacgattgctacattgaccaagatcctaagtgggagcatcttgattgggattctttatttttcctggaaaaaaagacctaaatccaatttggaattagtcgatttgtgggtcttgatttacttgatctatttgatttttcagccggtagtccatccctggtatattcttcctgctttaggtataagcctgttgacagagcgaaaggttttttttatttggagttttgctgcaattttctcttatcaagcttatgggaatttggattatcatgagaatccacttttcctccttttggaatatggattggtaggtgcggggatctatttggattacgttagtcaaaaaagaaattctaatttggtgttatgaaaaaaatagtagcgttctgttttttctcaatcgctttgctaatcagttcttgcacgccaagtcctgagaaacaagcccgggaattactacaaaaaagtataactgcccatgaaaaagagaattcttgggagaacctatcagctataaaatttagaaaatggacccgacttttaaatgaagatgggactatcgaatccgaaaccgaccaattaaatgagttccgaattaagccgtatttcgagggaaaaatttcgtggacaaaagatagtgtagctcatgtctcgagttgggatggtagccaaatgaactatttgatgggtggaaatgaagttttaaatgctgattttttagctcagaaaaagaaagatttggatgctgccttttatgcgcttgctcagccttgggagcttttggatgatggcccgaaactttccctagcggaacaaaaaacacttgaaaatggaactctggttgatgtaatcctagttgattatggacctgaatcggatacctggtggtattattttgacccgatcactcacctgatgattggaaacgaagtacaactcaaagatcaccgaagtctaatctataatttgagttatgacgaaagcagcggaatgcttttgcatggcaatagagaaagtttcagagtgaatgaaaaaggcgaaaaactgtatttgagagcagcttatcgctattatgattacgaattgatttttgaataaaagaaaatacccatgcaaaagaaatacagcttattattaatcattgtcttaggtttagtttattcctcttgtgactcacggactgaagcggaaaagatcgtggatgaatctatcgaagctcatggtggagaagccttctcaaattctctgattgagtttgattttagaaatattcactacaccatatttaagaccgaaagtgaatttgagtatatccgtgagttttctgattcgacaggaaatgtaaaagatgtcttgaataatgcaggttttgtgcgaaccgtaaatggtaccaaaatcgatacgctggaccaagaatggattggtaaatattccagatctgtcaattcggttgcttacttcgcgtttcttccctatggactgaacgattcctcagtgattaaagaatacttgggagagacgactctgaatgacaaaacatacgatttgatcaaagttacttttcagcaagaagggggaggggatgatttcgatgatgagtttttatactggattggaaaagacgataaattcatcgattacatcgcttatagctacaataccgatggtggaggggtaagacttagagaagtgacggatgtgattgaagtaggaggaattcgctttcaaaactacctgaatttcaagccggaagacaaaaatactccagtagaaaaaatgcaagatttgtatgtttcaggagatttagagttactttcagagataatccttgagaatatagaagtgaagccactacagaaataagcgaaatgaatccgaaacccttaaaatttgagaataaaaaagggcttaggcttgcagcaaatctgtatttgcccttggataaggctcccaaattttacgcgctttttgcgcactgtttcacttgtaccaagaatttttcggcggttactcaaatttgcacctcactatcacagcatggaatagctgtattaagttttgattttactggattgggaaggagtgagggtgattttcaggatagtacgttcagcgctaatatttcggatttaagtgatgctgctgcttttttggaggaaaactttgaagctccaaagatgctggtaggacattcgcttggaggagctgcagtattatatgtggcagatctactcgactcagttcaggcagtggtgaccattgcagcaccggcttttcctgctcatgtcaagcatttgtttgaagatggtctcaaggaagtggaggaaaatgggtctgcaaaagtgaatattggcggccgctcctttcgaatcaataaatcatttatagacgatcttgagcaaagacctatcactagtttccttaaaaatcttagaaagtctattttaatttttcattctccccaagatcaaattgtggggattgaaaatgcagctgaaatttacggagctgcattccatcccaaaagctttatttccttggatggagcagaccatttgctttccaatgctgccgatagtcaatatatcggagaagtaatttcttcctggagcattcgctatgtagcgatttcagaaaattctaagctgaatgatctgaaaggaaatcaagtcctaatccgattagccggcgatggctacactactgagatcaaaactccccatcatcatctccttgctgatgaacccactgaagtcggtggagccaatctcggacctaccccctatgatttattgatggcatcgctgggaagctgtactgccatgactttgaaaatgtattcagaacgaaaggactggcctttaaaacaagtgcaagtctacttaaatcatgataaggtacatttggatgatagcaaagcttctgaagatcccggagcaaaagtcagtcagtttacccgcatcatcgaactggaaggtgatttggatgaggatcagcggcagaaattattggaaatttccaatcgatgcccagttcatcgtaccttacaggaagaaattaaaattcgaaccatgcttgccaaatgaaaactccaagaatcaacacttatttattcagctccgtgggcttggtgttgctgctgtttttttcttgggtttttattcctgaaaatgaacttctaattgcaacagaaaaatggaaaggagtctgttgggtagggactcgatcaccgcttgaaggtcctgaactgaaagcattgaaagctactggagctgatgcaatttcccaaactcctttcggttggcagagtgctgtaaattcccctgagatcaaatggcaaactgtcaatgaaaaaatgtggtggggtgaatcctccaatggcttaaaggctaccttggattcctcttctgccttgggtatgatgaacattctcaagccacatctttgggtgcggggcagttggccgggagagattgaaatgaagactgaggaagattggtcactttggtttgaaaattaccgtggattcatcttggattatgctattcttgccgaggcccaagggtttccgatgctatgtatcggtacagagttggagaagacttcccatcgggaaagtgattggcgaaaagtgattgctcaggtccgaaagatctattcaggtaagttggtttatgctgcaaatttcacggagtttgaacaaatcaaattttgggatgaactggattacattgggattcaagcctattttccccttgccaagtcgcataacccaagtttaagtgaacttaccaagtcttgggagaatcatattccaaggatcgaaaaagtggtaaggaagtttaaaaagccagtattcttcacagagattggctattgcaatacagtggatgcagcgattgagccttgggtttggccaaatgagcgaaaggaaatccagctttcggaagaaatccaagccctttgctacaaggcattttttgaaacagcctggaaaaaatcctggatggcaggcgtatttttctggaagtggtatcctgaagcacatggtagaaatccagattttacccctcaaggaaaagcggcagaagcggtgatggcagaatattttttagcagattgatttggtagagaatttatttagataatttaaaatcaattatttaactgacttttatcataagatcatggtctgattatttataagtttattcattattaaaagtgaattgatcattctccaaaccaaaaagtcatgagaaaaaatatgggaaatgctgaccggacaatcagattggtagtggcagcagttttagtggtaatgtatttttcaggagtaatttctggaacattaggcttaatagggttagttgttgctgcaatttttacattaacaacaattttgggctattgcccactttattcattgataggtgtaaaaacctgcaaggtccgagaggtttagcagtccatagtttaataaaataacaagccgaaggaaaaatccttcggtttttttttgtgctaaattttatctgctaaaggactttaaaatgggttttgccatgattttttacttgaatgacatcaaatgtcagaaaactttaaaagtttataaaaaaattagttcaaatctgctttgaatataaaattctattaatattttagtgactattgtttgagcaaaaaaaaatgccccgcagaaaggcgaggcgcttaatgttttcacaacggaataatccttattgtgaattgcttttaaaatgttctctaatgtaaggttaaactttaatttttaaaataatatgaaaaatattcttggactcgacctaggcaccacttcaattggcttcgctcatgtgattgaaagcgatgactctttaaaatcatcaataaagcaaataggagttagagtaaatccgctatcaacggatgagcaaacgaatttcgaaaaaggtaagccaattacaataaatgcggatcgcacactgaaacgcggagctagaaggaatttggatcgataccaagatagaagagctaatctgattcatgctttattcaaagccaatatcattacaagagaaacaaaactcgcggaggatggtaaaagcaccacccattctacttggagattgagagctcaatctgctacagagagaattgaaaaggatgatttggcaagagtacttttggcgatcaataaaaagagaggctacaaaagcagtcgtaaagctaaaaatgaagacgaggggcaagcgattgatggaatggaagtggctaaaagactttatgaggaaaagctttcacccggtcaatttgcgtataagatgcttcaagaaagcaaaaagcacatcccggatttttatcgttcagatttgcaagaagaattggataaggtttgggctttccagaggaaatattatccagagattttaaccgacgaatttaagaaagaattggaaggaaaagggcagagggctacttctgcaattttttgggttaaataccagtttaacacggctgaaaataaaggaactagagaagacaagaaacttcgagcctataagtggcgaagtgaagctgtttctcaacaattagaaaaagaggaagtggcttatgtaatcacagagatcaataacaacctaaataattctagcggatatctaggtgcaatttcagatagaagcaaagagctttatttcaaaaaagagactgttggacaatatttgttcaaacaattgctaaaaaaccctcataagcagttaaaaaatcaggttttttaccgtcaagattatttggatgaatttgaagtaatatggaacgaacaaaaaaaacatcatccagaattaacagatgagcttaaaatagaaattcgagacattgtaattttttatcagcgaaagctgaagtcgcagaaaggattagttagtttctgtgagtttgaaagtaaagaaattgaaatagaaactggtaaaaagaaaacaattgggctgaaagtagcaccaaaatcttcgccattgtttcaagaatttaaggtttggcaggtgcttcagaatgttctaatcaagaaaaaggggagtaaaaagcgaaaaacaaaaaatgaacaacaaggcagtttatttgaagaagccaaggaaatatttgaattcgatttagaatcaaaaaagcatctattcgatgaattgaatataaagggcaatttgtcggcaaagactgtacttgaattattaggatacaaagatcaagattgggaaattaattattcggttttggaaggtaatcgaactaataaagctttgtatgaagcctatctgaaaatactcgatatcgaaggatatgatgtcaaggatttattggatgtaaaatctaataaagacgaaattgaattggatgatatacagatcgatgcatctgagattaaaaatatgatcaaacagattttcgataccttaaaaatcgatacagcaatcttggactttgatcctgagctagatggtaaagcatttgaacagcaactgtcttatcaactttggcatcttctgtattcttatgagggagatgaatcggctagtggaaatgaaaagttatacgagttgttggaaaagaaattcggatttaaaagagcgcacagccaagtattggcaaatgtgtctttgtctgatgattacgggaacttgagtagtaaagctattcgaaagatatatcctttcatccaagagaatgattatagtactgcttgtgaattagcaggataccggcattctgcatcatcattgacaaaagaagagattactaatcgtcctcttaaggataaactagaaatacttaaaaagaatagccttcgtaaccctgtagttgaaaaaatcctaaatcagatggtcaacgtagtaaatgcattgatcgagaagaatagcaaaagggatgaaaatggaaatattgttgagtatttcaaattcgacgaaatacggattgagcttgctcgcgacttgaagaaaaatgctaaagagcgcgccgagatgacttcgaacatcaatgcggcaaaaaccaatcatgataaaatattcaaaatcttacaaaatgaattcggagtaaaaaaccctagtcgaaatgacatcatcagatatcgcttgtatgaggagttaaagagcaatgggtataaggacttatatacagatacctacattccaagggaaatactatttagtaaacaaattgatattgaacacattattcctcaatcaaaattattcgacgatagcttttctaataagacagttgtgtttcgaaaggataatcttgataaagggaataaaacagcttccgactacttggaaagcaaatttggagaaaaaggtcttgaagattttgaatccagaatatcaagtctttttgatttgaataaaagaaataaagatgaaggtattagtagagctaaataccaaaaattacttaaaaaggagactgaaattggtgatgggtttattgaacgcgatttgcgggatagtcagtatatcgctaaaaaagcaaagaatatgctctatgaaatatcccgatctgtactttctaccacaggtagcgtaactaataaacttcgagaggattggggcttgattaatattatgcaagaattgaattttgaaaagttcaaaaagcttgggttgactgagatggtggagaagaaagatggaactttcaaagaacgtatcaaggattggagtaaaagaaatgatcatcggcatcacgcaatggatgctttgacagttgcctttacaaaacacaaccatattcaatatttgaataacctcaatgcccgaaagaatgaatccaaaaaactgcataaaaatattattgggattgagtcgaaggaaacacacatatcaattgatgacagggggaataaaaaacgaatattcaatttgccaattccaaatttcagagaacaagcaaaagtacatctagaaagtgtactagtgtcccataaggctaaaaataaggttgttaccaaaaacaagaatagaacaaaaacagccaaaggagaaaaagttaaagttgaactcacacctagggggcaattgcataaagaaacagtttatgggaagtatcaatattacactagcaaagtggaaaaagttggggcaaagtttgatttggagataattggaagagtctccaacccaacacacaagcaagctcttctacaaagactttccgaaaacgggaacgattcattgaaagcatttagtgggaagaattcaccaagcaaaaagcctatctatattaatactgaaaaaacagaaatacttcctgaaaaagtgaaattagtctggcttgaagaagatttttctatgcgtaaagatattacccctgaaaactttaaagacgaaaaattaatagaaaaggtaatagatatcgggacaaagagaattctacttagaagattaagggaatttggggctgatgcaaaaaaagctttttctgatttagataaaaatccaatttggcttaataaggataaaggtatttcaataagaagggtaacaattagcggagtttccaacacagaagcactgcattttaaaaaggatcattttgggaataaaatcttggataaagatggaaatcatattcccgtagactttgtaagcactggaaataatcaccatgtcgctatttacaaagatcaagaagggaatctccaagagcgagtggtttcattcttcgaagcggtggaaagagtgaaacaaggtctgcctattgttgataaggcttttaatcaaaatttaagttggcaatttttatttaccctaaagcaaaatgaatacttcgtattccccaataatataaccggctttgatccaaatgaaattgacctaaaagatcctaagaataggaaattagtaaatccaaatttatttagagttcagaagtttggggatttatcaaaatctggtttttggtttagacatcatttagaaactaacgtggatgtaaaaaaagaattaaaaggtattacgtactttgatatttattcaactaaagctctagagaaaatagttaaggtgcgtttagatcatttaggagaagttgtaaaagtgggtgaatattagattaagtaccgatgatcaaacgaacactttttttcggtaacccagcttacctgagtacaaaaaatgagcagattttaatttcattcccagatgataagccagaccggattgtacctattgaagatattggaatgcttgtgctggagcatcagcaaattacaattacaaatgggctgctctgcaaactaactgatagaaaggtagcagtagtcacctgcaatgctcagcatcttcctgatgggcttttactgcccatgcatggacatactgaacaaatggaacgagttggatatcaattgaatgctagcctgccacttaaaaagaatctttggcaacaaactgtaacagctaaaattgaaaatcaacataggttactaaaggaaaaagggaaaccaagtaagcgaatggagtatctgggaaaaaatgtgaattctggagatactagcaattacgaggctcaggcagcagctatttattggcagagcttatttgatattccggatttcaatagaggtcaatcaggcattccacctaataatttgttgaattatggttatgctattctgcgggctattatagccagggcgctcgtttcatcgggtatgcttccaaatgtggggatttggcatcacaataaatacaatgcctattgccttgcagatgatattatggagccctatcgtccctatgtggatttggtggtttcgcacatagtagagacagaagattgctatgacgaattgactgtagagcttaaaagagaattgctgacaattccagcattggatgtcttgatcgatggacagaaaagcccattgatggtagctgccagtcgaacgagcaattcactttttgaatgttttgcagggatcagtcgaaagattatttatccagaatatgcatgagaattattattcaaggcttaaccaataccgcagtttgtgggtcttagtattttttgatctacccaccgagacgaaaagagatcggaaaatcgcttcttctttccgaaagaaattgttggatgatgggtttgcgatgtttcaattctccatatatatgcgattctgtgcaagtcgggaaaatgcagaagtacacacccgaagagtaaaaataaatctcccaccaaaggggaaggtgggtattatgcagattacagatcgacagtttgggatgatggaattatttcatgggaaaactattgcagagaaagaacaacctgttcagcagttagaacttttttagattctctgtaaacttttccaatccgcctcggtgaattggaaaagtaaatgccgggttagcacagatactgctcaccaaaagatccaatttttattttcctaaaaagagcataaaaaacagcataccagccacttatcgtggggtatgctgtgatttccactggaaagatacattttgaaagcaattcacaacgagatcctcccagaaggggtaagaatcctcgctgtgatttccactggaaagatacattttgaaagcaattcacaacgagatcctcccagaaggggtaagaatcctcgctgtgatttccactggaaagatacattttgaaagcaattcacaacctcctggagcttcttgcgcttgtccaggatgctgtgatttccactggaaagatacattttgaaagcaattcacaactcgaagctcacggagctgttgcgatagagggctgtgatttccactggaaagatacattttgaaagcaattcacaactagtagctggttttgccctggtattcaagagctgtgatttccactggaaagatacattttgaaagcaattcacaactaccctccctctttgatttcggcactattgctgtgatttccactggaaagatacattttgaaagcaattcacaactatcaggctcaaataaattcttggctataggctgtgatttccactggaaagatacattttgaaagcaattcacaaccaatcgctgatttggctgatcctggatctagctgtgatttccactggaaagatacattttgaaagcaattcacaacctatgaaggattgctcgaggtgcacgccgtgctgtgatttccactggaaagatacattttgaaagcaattcacaacaggatgatcttttttgaaatcaatatccaggctgtgatttccactggaaagatacattttgaaagcaattcacaacgggatggaggcgatacagcgactgcccgaagctgtgatttccactggaaagatacattttgaaagcaattcacaacccacgtgattgatggtgcaacccagcctctgctgtgatttccactggaaagatacattttgaaagcaattcacaacgcgggggtttataatttgtgacgaactaaagctgtgatttccactggaaagatacattttgaaagcaattcacaacgagagcataacagcatatcagtatccattcgctgtgatttccactggaaagatacattttgaaagcaattcacaaccatcgtactgccagaccttccagactatctgctgtgatttccactggaaagatacattttgaaagcaattcacaacgggcgctgtcaattgctggatttattccgggctgtgatttccactggaaagatacattttgaaagcaattcacaaccattgttaccggtatggattccaaaatttcgctgtgatttccactggaaagatacattttgaaagcaattcacaacaacttcctttaaattgattccggcctcaaggctgtgatttccactggaaagatacattttgaaagcaattcacaactattgagcaggttgagcttgtcaaagtgctgctgtgatttccactggaaagatacattttgaaagcaattcacaacgcgcaaggttagttgctgcattacctacatgctgtgatttccactggaaagatacattttgaaagcaattcacaaccagaccctcgatctcgatctcaaaatggggctgtgatttccactggaaagatacattttgaaagcaattcacaacagtaccaggtgaaaagacccaattttcgatgctgtgatttccactggaaagatacattttgaaagcaattcacaacgcaaagcattttagggccttatattgaaggctgtgatttccactggaaagatacattttgaaagcaattcacaaccttcaccaaagtcggaaatcccaccaaagggctgtgatttccactggaaagatacattttgaaagcaattcacaacgcggttgattggtaatccagcctgaagcatgctgtgatttccactggaaagatacattttgaaagcaattcacaaccattattaagcacgggcgttcccttgcatggctgtgatttccactggaaagatacattttgaaagcatccaaaagttgattcttgtagaaggtccactatctttttatatttcgctatctatcttcctttatttttttttaattagccataagaacccaatacaaaaaccatggacaataataagcgacgcgaatttttgaaatcaactggcctgatggggctgggattatttggagcaggatcagccttcgggatggatctgaataaacttcctaccgaagcagcgaagggacttaatcgagttcaatcctttaatatgtctggttttgcggctcccaagctggagactgtccgggttggaatcgttggtttggggatgcgtggtccgggtgcagtagatcgattgagtaaaatcgaaggagtagagattaaagcactttgtgatttattaccagagcgagtggaaaaagccaaggagcagttgaaaggtacttcacaccagcctgaaggctactctggaaatgtctattcctggaaggaaatgtgtgatcgcacagatctggatctgatctatattgccaccccttgggagtggcatactcctatggcagtctatgccatggaagctggaaagcatgcagcaactgaggtgcctgctgcccgcacgcttgatgagtgctggcaattggtagagacttccgagcgcactaagaagcattgcatgcagttggaaaactgttgctatgattttttcgaattaatgactttgaaaatggcccgcgagggattttttggagaggtggtacatgtagaaggtgcctatattcacgatttactttggctaaacttcgataaggatactggttatcaagatatgtggagacttcgagaaaactatcgaaatggaaacctttaccctacacatggactaggtccggtctgccagattctaaatatcaaccgaggagatcagatggattacctgacttcactttcttcaaatgattttcagatgaagaaagaagctgaaaagttggcaaaagaggatatgttctgggcagaattcgcctcaaaaaactatcgaggcaatatgaatactaccgtcgtgaagaccaagcagggcaaatccattatgattcaacatgatgtgacttctccgagaccttattcccggcttcatgtggtcagtggcacagaaggttatgcacagaaatatcctgagcaaaaagtatctaaaggacatgtttggatgaaagaggaagaaatggcggaactgacaaaaaaatatactcccgagattgttcagaaagtgggtgagctagccaagcaagttgggggtcatggaggaatggactttatgatggattggcgtctgatcgattgccttcgaaatggattgccacttgatcaggatgtctatgatgctgcactatggagctgcatctctccacttagtgaatggtctgtgatgaatcgttcgaattcgattgatgtcccggacttcaccgcaggaaattggaaaacaaataagccagttccgattactttaagataaaggacgattaatagatttagttttcggaatctttcctgcgcttgatcaaatccaaagttacccaaatggcataatgatctgctttggattcctaatcatcagcgttgccaaggagttgaaaataattcgaatcgttaaaaaaagcaggcgattggttttccttttggtcttgatcgatggggtcatcatttcttacttctttcccggtaatccattcaaatccttattctggaagtcttgagaggattttttgaaatggagaacaactgagaaaaatcattattactgcccgggttccttttcttgcttagttatccgaagatttccggtaattttccaaagaatgaaaaagatactgattggctttttgattgcaacggctttgctgttagtggcttcgtttggtttagaggcttattttgagaagaggatctcagaagcgatcaataccaatcctgatcgggcctatgatattctttttgaggatatttcaatcagtcttttccgaaggaaagctagtctcaaaaggatacgtcttgtatcgcttaaggattcggaggctataaaagtcagtggttcactccaaagtattgagctttcaggggtcgattttttggatttgatttttaatcgtaggctttctatttacagattagaactggttgaccctgggtttaaattgactagaaaagacattcagggacgtcctgaagacaattcaaaagcacttcaggatgtttttaaggatattatttcaagaggattaattcagaattttgaattagtcaacggcactgcggaattttttgtggagcaagacagtcttattcgctttgcccagtttactgatttgaatatttccgcaaatggtatcgtctctgattcggtgatcgttcagaatcctgttccattccaattggagtcaattcaaatgagcttaaaaaatcttaatgtaattactgatgtaaatcagaaatttaaattgggtgaactcagatttgattcaaaaacagaatcaattttaataaaggatatcagcttagaatatgataattgggaagaaacagccaattcattggtttaccagcaagatgtgattgagttgacaatacagacactttcattgacctatctcaatgctaagaataatatatctggagattggcaaatagcggcaggattagcggagttccgtgggttgagtttggatgattatagggataaaaataaacccagaccggaggagcctgagaagccactttttgaaggcttggttgagaaaattccttttccaatcgaattggatacgattcgtattttagattctaagctagtttatcgagagtttttacccggtaaatcaacgcctggtattttgagtttcgaaaatctaagcgctgaaattctaaatgttatctctacagattctttgcaaggcgattcggaaatgaaaataactgcaaatgcgctttttcatggagtggccgaaattgatttggggattcaagtgccttatggaaaaaattcttttagccttcaagccggaattaagaagtttgaattatctgaaatcaacaaggtcttggagcagatggcaaatgtccgagtagagacaggtgaacttttgagtttgcagcttcaaatggaagccagcagatatacttcttcgaatcaactgaattttcaatatgaaaatttgaaactgaagattctcgatgaggggaaatctgtcaataagttaaagagttcgcttgcaaatatttttacttctaaaaataatttagcttccgaccctaactataaaacagctacttatcgtagcaagcgtaatatttatcgtggacctttgaatttggtctggctaagtacaaaggacggactgattcaaattgtgccgggagaggtagcacagttgtttttggataaataataaaactttccagaaattggaagacttgaatttagccttatcaaaattccaacaaaagattcttatcaaaaagggattagtttgatccagttttggactattttctaattttttgacaaggagatttcaacaatcagttttcatttcagggatgattccgaataagtcaattgaaacttaggaatcattttttcccttctggatttttttcatgtgagttgcaacatcgcggtcattttcggcttcgcttttttcgagctgagagacgatattttgaaagttggtttcatctcgattctgagaaagttttgcactggcctgaacttcggatattaggatctcaaatcctaccagcgctcgaatctgtccttgaagataagtatcgctcattccttccacacttactcggtttggtcgtccttcttcgtaagtgtccaccagctttttcaaatgaatcaataactcttctccctcaatgatccggatttttccatagacgtgcacagctaaataattccaggtaggaacattctcatgattgtaccaggaagacgaaatgtaggcatgtggaccttgaaacattaccaaaacctcagattggtctgggatagatttccattgcggatttgctctcgcaacgtggcctgtaagaactgtctttccttctgagtttttgtccagcacaaaaggcaaatgagttccatgaggccgttgatctacctgggcgactagcgtaccaaaggcattatgcctgataaatgctataatttgaggttcgtcctcccaaagattaatcggatggatgtacatggcttttggggcttctttctaattttgacctaaactagaaaaattaaagactcaaattcaatttctaataaattcaaatcaaatttttagtaagttagttttatggaaaacgaatcaacggatcggttagagttggcagctaaatttgtcaacaatactggtgcaccaatttttttgaccgggaaggcaggaacaggaaaaaccacttttttaagggatctcgttcggaaaacccacaagcgtcatgtgattttggcaccaactgggattgcagcattgcatgcaaaaggagtgacaattcattcacaatttcttctcccattgggaagttttctacctgtaagggaaccagaggggaattttaccagtcaatttggcttttttacccagcatacattggctagaaagcatcctctaaatcaactccgaaagaatgttttgaaagcagttgatcttttggttatcgatgaggtcagcatgctgcgagcggatgttttggatgcgatcgactatcggatgcgaagcgtcaaagggaattatagagatccttttggaggtgttcaagtcttgatgattggagatttgtaccagcttcctccgatcgttagggatcaagaatgggaggttttaaggcaattttacccaagcatgcacttttttgaagcacatgctttgcggaattcaggaatggtctacctcgagttggataaaatctttcgccaacaggacgagcagttcattcgtttgctaaaccatctccgagacaatgaagtgactgctgaggatgtaaaggtgctcaatgaacattacaagactgaggcagaagtcaaagagataccgccgtgtatcaccatcaccacgcataattacaaagctgatcagctcaatcagaaagaacttgaagccttgaatatcacttctttctattatgatgcggaagtggaggatgactttccggattcacttttcccccttccaaggaggattgagttgcgagaaggggcccaaattatgtttgtaaagaatgatagttcgggaagtgctgaatatttcaatggaaaattggcaaaggtaatcaggctctctaaaaccgaggtgatcgttcgaatgcaggattcggaagaagagtttcaacttcgcaaggagacttgggaaaataaaaagtacatcattaatccggatacgaaagaactggatgaggaagttgtaggaacattctcacaattcccgatcaaactggcttgggcagtgactgtgcacaaaagccaaggtttgacctttgatcgagcaattattgatgttgggcaagcttttgctccgggacaagtatatgtggcattaagtaggcttagatctttggaagggttagtgcttcgaagtaggatttcttccgatttgattcactcagatcgacaggtggtagatttttccgtcagtgccaaaaaacaaactcgactggaggaacttctgattcaatatcaaagtcaatatgtttcacatattttagattctacgttcgattttagtccaatacaaaaagagctggaattctttcaaaaggatcaagctagcagtatggaatttgaagatgaagaaatgcgcggggccattccaacgattcagcagctctttcaatctgaaaaagagaactcagaccgttttcgaagacaactattggcattggtttatcagggaaatcaatccaaactccaagaccgcttaggcaaaggaagtcagtattatcgtgagattattgccaatcagatccagcaagtcattagcttaagaagtcaagtggagcttttttccaagacaaaaaagtatcaggaaggattggaatcgttggaggcaatacttcttcgaaagtatttggaaatcagcaaagtggctcggatagttaaagccattctaaacggcgatatgcctggaaaaatggaagagctggatcaggaaatcctagcacttcggatgcaattcatcaatcgcgccaaggaaaaagctgcagaaaaaatcaccaatcttaaaactaaaaccggaagaaaaaagactggggttgcaaagcctaaacgtaccaaaggggattctcaggaattaacttttgccctttttgaaatgggaaaaaccattcctcagattgcagaagagcgcgaattggcagaatcgacgatcaaaagccatttggctgatggaatcgcattaggaagaattgaactttcggattgtcttcctgaagaggtgatttctgagatcaaatctcaatttgaccgcttcaaaactgtctcagcccttcgtgagcactttcaaggaaaattcgattacggtacgttgaagatggtttttgcaggaaataagctggaatgatattagata

SEQ ID NO: 2122 - DNA, 24299 bp, synthetic construct
  misc_feature 1..24299: note = Synthetic
  source 1..24299: mol_type = other DNA
tccaatctttgtcataaagagttttcaatttatcttttaaattacttgaaaaaacttcttttggtttttcattctgatctaaaattacttcaaaagtagcaatctcatctttttcatcaaatgcattatttttattgctgtctttgtaagcagttaaaataattttattgtttgcctgaatatatttccaagaatgtacactataattacttggcgaaagttgtctgaaattttttccaaatttatccgatacaaacaaatatatgggatcaacttgattcaacagcttatctttattatagtctaacgttcttacactataaaaaatatgatttgttttctttgaaatattcaatccttcttcacttccatacttatagttgtaatctagaattaaaactttactttcggttaaaagattgtactcatttgtattactattcaaaaataaaacattccaatatccattgtaaggcatttctttatacgtaaaatttccttcctcgtttttattttcgcccatttctaacggaaacattaaaacacctgtggaatcaatttcaaaaaactccttagtttgaatattcaaattttcaattgtgcttggggtagcattagaaccactctcaaatgtactaccttctctattcttattgcaggaaactagaaaaattggaattacaaaaaacgttattaaatatttcatatggcttattttggtataattactaattgtataattttttgtaaaactaaaaatacaaaagatttataaatataaaaagccttgtaatacatggcttttataatggtttattattttatatgaacgtggagattgcgccagcttgggggataaatattcccttgctttctactttacatttaactccgcatttgttattacaatgttagctgtagctttttaataaccatcttcattgtttaacttgtgatatattgtttttttagtattcaaaatttcatattcaattccaatactatcattgtttttggatataaatttagcactctgaatatttgtttctttttcattgagattagagtccttaaacatttcttgtaaaatttcagaatagttaggtctgcttatatttttttctaaaatgccgaaatatttttcataaatataaattctgggcaaggatagagcttgttgtttggttctttctaatctaaaattgttattcatctctatttgttgataatcaccctcttttgtgagataaaaataaattccgaataatggtatagccattggtagaacgcttaaggataataaagcaactattgaaaaaaaataaatttttacatattttttcttccaaaatataatgataaaaaatagcgttaaaaaaatccaaatccaagcaataattttatcagtaaaatatccagctaatttccaatcgttccaattcagaatgatgctaattccaaaaaaaattgaaaatgaatagtaaattagcttatagctttttttcaacggcatactttgattaagttacagctaacgtgcggcggctttgcgaagtgcgggctaaatatgagaaaaagtaatatttaaaccagcattagcacaaaccattttcgtttggactaaattactaaaaaagaccaaacaaaatggatttttgcggataaaaaagacaaaaatatctatgttccataaccccgcattttgcaaaaccgaggttgtacgatgccgcgacacgttattttgtagattccacacgctaaaaatcaaaaagttcaatgattacttcggttcttatgaaaaacaaaattttagcacgcataataaagctttgctatcaaaaactagattacaaaaatttctatgatgagaaatagttcttacaatcttttatgaattttacagcgattagttttcataaagtaagggcaaatattcaatcagaagttctatagtcaataaaagacaaattgtttctccaatattaacgctggattgttaaacttcacattgtacatcaaatattatttacaaaatttctgtaaattttttaagcgtcaagaaagtaaaaagtgataaaaaagacaaatagttctattgcaaaaaacctttggagcggtatcgtacaacattgttatttagcgaaactaaatatacaaaaagccatgtaatacatagcttttataatgtttttttgtttgttattttatatgaacggggcgattgtaccagcgtgggttatattagtcgtagtttttatttaattagtctgaatgatttaccatcatattcatatcttatgttattattcttaacaatgatgtcgtcgcttcctggttttaaaagtaaagaatctgaatcaaaactaaatattaatttatcattttcatttctaattttcagaatttcaacaagatttgtttccatatcattactttctatatctatgtttccaaggtacttaattttatttttctcaattaaaaaagcttcccctccaaaaaaatattcatatgctaattgacaaacaataatgattcgatcatcaaaaccattcttataaaaatttggctgataaagatatacgtcacaaactccaaaagacttgtatttaatttcttttttagagttcacaaataataatctatgtccatgatcgttttccttgtctggataactaattttaccatctatagattcataataacccgttaaaatataattatcattaatttgaaatgcagtattactagaaaatctattaatttttaggaaagaactatcaggtttaaattttgtaaattgaattatctttttctcatcagcacttgctttcgttagattagaaatattgtttgatgaatttatttctgttacttcactttttttagtttttccacaagataaaattagaaataacatgattagtaaacttatcctcatggtagtttgttaggtttttttataaaattatagctaacatcatctttagcgaaactaaaaatacaaaagattttataaaaacaaaaagccatgtagtacacggcttttataatgttttttttgtttattattttatatgagcgtgaagattgcgccagcgtgggtatacacaaaaattatccttttcatacacaattatttaaaggaattattgtccatatagtggttgaacctatttatcacatgtcttttcgctaaatgaaattccatttctatcttctaatgacaatatttgagaatccgtaaaaattggtttttgtcttacaaactgtttaaatccagttgatttaaaagttattttaccttctttaaaaacaactacgtttgattatcagttatttatgagtacatggtgcaaattaaggaacaaaatatgattataactatagaataaagatgccgttatcagcaaatattacaatagattttaagttttaaataatagtttttgccgatgagaataaaagaaatatgaagtttataacttaaataaatctgaaagctgcttgcattaattcttgttctgctcgtgaaattcctattttatgagcgatttctttccattgttttacagaagtgaaaacttcattcaatatgttatccatttcagaatgatttaatcgaaaaaaatctcctacgctcttagctaattcaaagtctaacgcattgttgtccatatcaatatttaaagccaaaccatctttatcaatggaaggatttaaatcataagctggtgatagcatccaaccttcatctttcaaaataaatccatgattgcgtagatggtcatctgtattggaaacggtgatattaaaaacaattcttcgccataactgatgtaaattctctttgatattacacccataattttgaataaattctactatatctaaataacttgttggttgcgttttaatcgtttcttcattatttccagtcatcgtcattgccgacgaaaaatgaattcttttctgattcattcgatcaaagcgtttggtaaaaaaagtgtgataagttccattcactttttcaattttacattctgccatttcgactcctgcatttatcgctaattggtaggttaaatattcccaagcagctttatcaattgtatcgtttttagaaggaaattttgcaatccaaagttgattatggtcatctaaaatattagctttgggtcttgcaccacctaaggaagagccaggtgcaattaatacttttagccatttatttattgcttcgttatccgcatcattttcgtaatgaaaaactgcttgttgcaattcccgaaccgttgaccaaggcggagtagatttttcggaatcattatctaaaaaatctccgtgaggattcaacttaaatcgaaatgctcccattcttgtttcgtcaaaaactcccaataaataatcaatatcatacaacgttttagggctttcgccttttgttttggctaactgaatctcccgacgtttcatcaacgttcgtccccaagtatcaggcatactatctaagaaaattccgaaattttctttattattaggaaattgttggccagaataaaattgaatatcaggatcaattagtctttgctcattggtttttaaccattttttatcatattcaaaactaaaagcttttcgccctttagcttgatgtgcagacaaaattccaattaatgttggttgaggcaatcctatccagtccgcataaacatatatatctgttttgtttgttgccatcttacaataaatctaaatcctgtaattttctacctaattcatcatcgagtgctaattttaagaaatcatcttgtaagcctaacactcttaaaacattaaaataagcgcccattgccacgctgctatcgcctttttccactaaatacaaggtagaacgagcaatacctgcacgctcggcaacctgtattgctgttaattttctacgctttcgggctaattttatgttctcgcccatttgttctaaaagagcagtatgcttaggtaatagaacttgctttttcattttaaatgattgttatttcatacaaacatacataaaatgactgaaataacgaacgttttaatcttaagttatcaaattttatttggtgtaaaatctatctatcactcattaaacttcgtagctgtattagtttacaagcttcaagtagtttatgatattcaagtactgatacactgcaatcaaagtcttttccatacgtatcatcagccatcgtggctaatattagattaagaaatgatttactaaccttctctaaactatgcttcttaaaaatattttcgaaaactagatatggattttcaatctcttttttatttaaaaatttaatttctaacaacaatttttcggatgctttataatctataagatttctttttttaaattcctctggatttttaaaaattttataccctattttaaaaatagattgaaaaacaattgcatcatagatcacctctgaaactcttcttttatcatacattacatcacttaaggagtacagacaataattatttaattgttgatgaaaataatccatacctgcttgctcttttaataaaagtaaaagttcatacggacattctaccttatctttcgtccagtaatatgattctaaagttaactcacacattttcatcataaatttcacgattataaattaaccaacaagcatctaacaatctattgatattgataaatgaaatacaaatatcttcagatggacaactgccataactacctaaagtatgttccataatatcttctaaatctaattcaatttgtaaaaagctttgttcattaaaaacatgtttaataatcaggtatggatttaagtattgctcgtaagttaatcccgaagcataggcagtatactggaagtataatgtatcattagtttctcttttgttttcatatttatcaatcttctttaaaattttaaaacatgcgcgaattaacgaatttgtcatagtgaaaaactttaaagactcaaaagggtttgtgtagatttcatatttatcatcaaatgcatgttttaatagttgattaaaatttgtctttattttagtcatcgattctgtttcaaaaaacacttgaattagtttatatggatctttaattttgtttccatgccaaagctcggctcttagatataacttttcttttttcatgatttctaatttttaaattcgtttgaagattggagttgggaaaataatgtggtaacaaacttatctattaaggcacaggtgggatcgtctaatagcaattgtccttcttttacaactgtattttgaaaactttggggaaatgtcttttctatttcttttttatcttttactttcaaccataaaatactgtaatctgttcgagcggttttatcaaaccaaatggcttgaatttcattagtactaatacttttttctaatttacagttcagatgatctggtaaacgaactgttttactgaattttttttcttgaatactcataattctattgttttaattgttcgtaatctgtatttcattaaatagcttttcgcaaaaacataatgcctgagcaaaaacttcttggttattatgagcacttacctgttctttttgaggaagatatattataggtatacttaacagtgctagtatgtttcttacattgtttgtagttatgcatttttgatacacctctggtaagaaggcttttaacagttgcataaggtatgtacagctaaacatatcgggtacataatgcatacgctggtatagcaacgccaacactaaatgctgaaacatgttctttaacaatactacatgtcctacttggtacaccaaattgggctgttgaaaagctaaaaagcaaggtgtaatgtaatttagccgttcttgagagtagttgtttttttgaagtaaaacatcggcgtttctttgactaataaatactttattgttatgcacccaaccttgctttaggtatattctgtttttagatactaaataatcgcttataaaaccttgcatggtttgttggttcttttgtagccaataagaattgtgtattaaacagcatacttctatttttcctttaaaatgcattgccacatggcgagcaataacatcatgttgctgtactttaaccttagtacttaaaagcagtatattaaaacaacaagaaccgggaacctctgggttactattgcttttttttcctaatatatatacggcatctaactttaagtaattggagagaaaaagagctagcttttgcaataaaacagtatcactttcaggagcctctgcaataggcacttctaacttttgttgataaaacacgtttagctttttcataaaatgcgtttgcaatgctactactctttgtatccacttatcaaaagttaattctggcgacagtgtaatcaaacaatgagcatcattaacaaaatgcgattttttaattacatctatacgctttaaagttcttgaaaactgcggatagtacttactgattaattctcgaaactgttgctcattaaaatgatagtgtagcacctttggcaacaacatatttttaagtacatctacatgatacgaaaacatattaagcaacattttatgagcattttcataatcttgttctgctgctaaaggctttacaaagtttgttatagcttctaacaccttttcttgaacttcttgagtatgttttttgaaacgtgctagggcattttctttttttgtagcgtaatcgttttgaaacaaactgttccatcttttagagttatcagcataaattacatctttggggtgcaaatgaagttgtaaaaaactaaaatgaacatatttttctttacttaatgtattacaggtgtttatactaattagtgtttgatactttgaaaaagcgtttaagttgcatacttctgcctgcaaagcattcataacattttcattggtatcttttgcaagaatcaaggttaaaaagtttagtgtactttctttaacatgtgtatatattattaaatgtacctgtggattttctatagctttaccaacaaaattctttatagagttaggtaaattttcgggcaataatacaattctatcacttttcataactttttgatttacaattaaacatatctcaaaattgcaaaacagattttaggtacaccaccataaaactatgtattgtaccaccaatacgcggtaaaatacattggtataaaaagagtagtgaggtgatggatgcttggtgatagatgcttggtgatagatgatggatgttggatgatgggtaattacatacggctgaaataccttgtagtaattcaaaaaaagtgtatatttgaaatacaaaatctgtggcatatggaaactaccatgaaaagacatttagggcgtaatattagtcgtataagagaaatgaaaggtatgaagcaagaaaccttagcagagcttttgggtataagtcagcaaaaaatgtcggtaattgaaaacacagaagaattagacgataccaaattggctcctatagcagctgctttagaagtaccaacacaagccattaaagaatactcggatgaacgaatggttaatataatatctaataatacatttcacgaaagtcctttttacagtaatactgtgaattaccaccctacctttaatcctttagacaaattggtagaggcttatgaagaaaataaaaagctatatgagcgtttgctggctgctgaaaaagaaaagcttgcttatttggaacaactcctaaaaaagtaaggtattcatgatataattgattattaaaaaaaatcggctattcttttaaaagatagtcgatttttctatttttcactcattctctagcatgcattactcatgcactatctatgcctttactatgctttatctatggagtatcctagtagtagctattttagaataattttcggtgcccctttttaggtaattctttactttttaaatcattcctactctatttatattttattcagaatggaaatattgtatgcaaaacaacacttaaaaggaacgtttctaaattgcagtagtactataaaaaacacctagtttatacttagttttgtttttaaactaaatacccaacaactatggcaacaacaaaattgaccattaatgataatggatcggtaaaaattgaaggagattttgaaatagtagacaaacaaggcaatgcttatggtttgcaaggcagaacggttttatcaatctgtagatgtggattgtctaaaaacaaacctttttgcgatggtgcgcataaaggtcattttgagcataatgccgttgcgtttgatttacctcctaaaaaagagtaacaataaaagttacttaataacaaaaaaagaccgtctgtatttcttacagatggtctttttttattctagtcatcaagctaaattaacatggcttatgataagctactaataataagacataaaaaagccccgaagatagtcgaggcgctaaatgttttcacaacggaataatccttattgtgagttcctttcggtaacaaatatagggataaaatatttatatgttgttacggaaaccctcattcttctctaagaatattatagttgttaataaaattatttttaaaaatattttgatttatatctaaaatagaacttataaaacttatatttgtcattataaaaaaaataaagccatctcataatgactttatttagggggtatagcataaaggctaatgcgtcggtctgaaaattcgttcatgcgggttcgattcccgctacctccaccacaaatataatgatttatattataatatcaaatgttatatattgatataaatcagttgtgagttcctgttcatttttgagagattattttataatctctcttttttttataaaaaatatggaaaaccgtaatattacgatttttttttgatgtaatttaatacgaaaattaaaaaaatggctaaaaatatactaggactggatttgggaaccaactcaattggttgggcttttgtaaaagaagctcaggatagtacagaacaatcctcaatcgagaaaattggtgttcgtgtcaatccacttacaaccgatgaacaaaccaattttgaaaaaggaaaacctataactaccaatgctggtcgcactttgtctcgttcggctcgtcgtaatttacaacgttttaaattgcgtcgtgagaatttaattcaaattctgaaaactcaaaactggatttctaatgaaagtattttagctgaaaatggtaataaaacaacttttgaaacatttcgattacgtgctttagcagctgaacaacccttagaattgcaatatttagctcgtgtactgttaatgattaacaagaaacgaggatataaaagttctcgtaaagttaataatacagaagaaggaactttgattgatgggatggatattgcgaaaaagttgtatcacgataatattacgcctggtcaatttgttttggatttattaaaatctggaaagaaaaaggttcctgatttttatcgatcggatttacaagcagaatttgataaaatatggaattttcaaaaatctttttatcccgaattattgacagatactttaaaagaagaactaaacggaaaaaaagttcaagcaacttgggcagttttaaaagatccttttaatttggtgggaataaaacgaaatttgaaacgtgatgaattaaagctagaaaattatcaatggcgaaatgatgctttgacaaagcaaatgagtttagaagaattagccatcgttttgcaagaaattaatggacaattaacgagttcttctgggtatttaggtgcaatttcggatagaagtaaagaactatatttcaataatcaaacggttgggcaatatcaatatgttcaattgcaaaacaatccacatgcacgattgaaaaatcaagtattttatcgtcaggattatatggatgagtttgaaaaaatttgggaggtccaagccaaaaatcgtgaagctgtttttaccaatattttaaaagaagaacttcgagacgtcattatattttatcaacgaaaattaaaatctcaaaaaggtttgatttcaatttgtgagtttgaacaaagagagattgtaaaagatggtaaaaataaaaccgttggtttacgtgttgttccgaaatcctcacctttatttcaagaattcaaaatttggcaaattctccataatgtcaagctgaaaaataaaacaacaaaagaagttttagctttaaatcaagatgataaacaatttttattcgatgaattaaatttaaaaggaaatctatcagctgcggaagttttaaaattaataattgataaaccaaaagactgggaaatcactaattattctgaattggaaggaaatcgtaccaatcaggcactttacaatgcttatttaaccattttggataacgaaggttatgatgttcgtgaagaattgaagttaaaactgaataaagacgatattactttagcggatattgataaatcggctgctgaaattaaagaaatggttcgtgcaatttttagtcatttggaaattaaaactgaaattttagatttcaatgcagagatagaaggaaaagcttttgaagaacaattatcttttcagttgtggcatctgctgtacgcgtatgaagaggataattcaccaacaggaatggatactttgtatcgattgttggaggaaaagtttggttttaataaagagcaagcaaaagtaattggagcagttgcttttcataacgattatggcagtttgagctcaaaagcaattagaaaaatctatccttatttgaaagagttagaatttagtaaagcttgtgaatatgtttctgctgagtttaatttaccaaattataaacactcaaaacattctttaaccaaagaagaattagaaaatcgtgaattaaaatctcgtttagatattcttcccaaaaatagtttgcgcaatcctgtggtagagaaaattctgaatcaaatggtaaatgtagtaaataccttaattgattcagaaaatgataaattagagaaagcaggaaaagaaagggattttcaatttgacgaaatccgcattgagttagctcgtgaactaaaaaagaatgctaaagaacgtgaagagctaacaaaagctgttaatcaaggtaaattagaacacgagaaaatcgttaaaattcttcaatcagtagatggaatcaagtttcctactcgtaatgatattattcgttataaattgtatcaagaactaaaaaataatggttacaaagatttgtacaccaatcaatatatcgagcgcaaagatgtttttactaagaaatacgatattgagcatattattccgcaatctcgtttgtttgacgatagtttttcgaataaaacattagttcctcgccaaatcaatttagataaaggaaacaaaacagccgctgattatatttttgatacattcggacaagataaattaaatgaatttttgttgcgtgtagaagctttgtttaatcaaaaagaagaagggatttctaaagctaaatacaaaaaactaacaatgaaaagtgccgaaattggcgaaggttttattgaacgtgatttgcgagactctcaatacattgccaagaaagcaaaagaaattttgtttcaaattaccaaatcggtgctttctacatcaggttcggtaacagatcgtttgcgagaggattgggatttggttaatgtaatgaaagaactgaatttggagaaatatcgttcagcaggattaacagaaatgcaaacgaccaaagatggaaatccaaaagaagtaattaaagattggacaaaacgtaacgatcatcgtcatcacgctatggatgctttaacggttgcgtttacaaaacgtagttttattcaatatttaaacaatcttaatgcgcgtcgaaatgatgagtatgacagtatttctaatgctaaagataggaagtcaatcgataccaataggttaaaaatttctagtaaagatgctttaggaattgaagaaaaagaaacgcataaagtacacgataaaaaaggaaattataaacgtgtatttaatgagccaattccaaatttcagagaagtagcaaaacaacatttagaaggcgttttggtttctcataaagcgaagaataaagttgttactagaaatattaataaaataaaaggaagcgataaagttcagattgctttaacgcctcgtggacaaatgcataaggaaaccgtgtacggaaaagtaaaacaatatgcatttaaagaagagaaagtatcagccaagtttgatgaagcaacaattgctatggtttcaaatcctcaataccgagcacttttattgcaacgcttagttgaaaataacagtgatcctaaaaaagcttttacgggtaaaaataccttagctaaaaatccaattttattaaaagatggaactgaattacctgaaaaggtaaaattaatgtggttagaagatgattataccattcgtaaagatgttggtcctgatttaaaaattgataaagttattgacgaaggtgtaaaacgaattttacagactcgtttaaatcaatttaaaggagatgcaaaaaaagctttttctgatttggaacaaaatcctatttggttgaacgaggaaaaaggaattgcaataaaacgagttactatttctggagttaaaaatgccgaagctctacatactaaaaaagatcatttaggaaacgatgttttggatgaaaatggaaatcaaattccagttgattttgtaagcactggaaacaatcatcatgtagctatttatgaagatgaaaaaggcaatttacaagaaaaggtggtttctttttatgaagctgtagctcaagtaaatgctggtttacctattgtagacaaagtttacaatgcacacttaggttggaaatttaaatttacgatgaaacaaaatgaaatgtttttgtttccatcagaagattttaatccaaatgagattgatttattagatagaaaaaatcaagctttaataagtaaacatttatttagagttcagaaaatatctacaaagaattatatgtttactcatcatttagaaacaaaagctattgatggtgaaattttgaaaaataaaaaatcattgttaggagttactcactattttattcaatcaacttctaatttaaaaaatataataaaagtccgcactaatcatttgggagaaattattcatattggcgaatattaaaatgtaaacatatgctaaaacgtaccatttacattggcaatccatcttatttaaaattgaaagacaatcaattgaaaatagaagatgcgacaactaaagaaatcaaaggttctgtgccgattgaagatttaggttttttggtgttggatcattatcaaattactattagtcatcaactaattgtgatgttgcagcaaaataatgtggcaattattagttgtgatgaaagtcatatgcctttgggattgatgttgccaatgagtggacacgtagagcatagtgaacgattgaaacatcaaattaacgtttcggaacctttgcgaaagcaattatggaaacaaaccgttgaatcaaaaatttatcaacagaaagagatattacgcaagcaaaatttacccttcgatgccatgattacgtatatgaatgatgtaaaatcgggagacaccaccaatatggaaggaattgccgcacagtattattggaaaacactttttgatgattttacaagagaacgcaaaggcgatgcacccaacaactttttgaattttggatactccgttttacgaagtatggttgccagagccttggtgagttcgggattgaatccaacaattggtatttttcatcgcaataaatacaacgcttattgcttggctgatgatgtaatggaaccctacagaccttatattgacgagttggttgttgaatggatgcaaatacaacaaagttacattttagataaaagtgccaaatcgcatttgttacaattagctacaaaagatgtatacatcaacgggttacaacgcccattagtgaccgcattaagcattacaaccagctcgttgtgtaaatgcttcacaggagaaagtagagtgatacattacccaatgatggtatgagttttagtaggtataatgcgtatagaattatgtgggtacttgttttttttgatttaccaaccgaaaccaaaaaacaacgcagcgttgccacgcggtttcgaaaatcgttaattgatgatgggtttaatatgtttcagttttcgatatacttacgacattgtcctagtaaagagaatgctgaagtgcatataaaacgaacaaagaaaaatttaccatctgaaggaaaagtaggcattttatgtgttactgataaacaatttggacaaatggaactattctttgccaaaaaagagactgatttacccaatatacctcaacaattagaattgttctagaaaaataaaaatgcttgatttgataaagcaagtcaagcattttttacatttttaatttgagatttacacgctaaacccctttatttacaagggattatctgaggttgtaattctatactgtaaatctacaaaaatttgaaaggaactcacaacggtgattgctacatagttagcggctgttgtgttgtaattctatactgtaaatctacaaaaatttgaaaggaactcacaacacggaacgcctccaaaagtagagcctagaagttgtaattctatactgtaaatctacaaaaatttgaaaggaactcacaacttacgagcagtttattggctccggttatgagttgtaattctatactgtaaatctacaaaaatttgaaaggaactcacaactagtaaaagagctaaacacaaaaaacgagggttgtaattctatactgtaaatctacaaaaatttgaaaggaactcacaacttacttacgttgttagttttatttagataagttgtaattctatactgtaaatctacaaaaatttgaaaggaactcacaaccaaatgtagtttgcgccgaaacattcggacgttgtaattctatactgtaaatctacaaaaatttgaaaggaactcacaacattgatacttatgttaataaaaataaataagttgtaattctatactgtaaatctacaaaaatttgaaaggaactcacaactatctggatttgcaagagcaaaaggagttcgttgtaattctatactgtaaatctacaaaaatttgaaaggaactcacaaccaactactgcgaatggtgcaaaagtgaaatgttgtaattctatactgtaaatctacaaaaatttgaaaggaactcacaacatacccctgcgttgaatcgtgaattttgtagttgtaattctatactgtaaatctacaaaaatttgaaaggaactcacaacgaggaacacggacgaaaaacatacgttttagttgtaattctatactgtaaatctacaaaaatttgaaaggaactcacaaccaaaggggtttgcaatccgattgtttttatgttgtaattctatactgtaaatctacaaaaatttgaaaggaactcacaacccaattgttgggctgtttcactttctgcaagttgtaattctatactgtaaatctacaaaaatttgaaaggaactcacaacttgttttactaaattcgtgcgaactcctccgttgtaattctatactgtaaatctacaaaaatttgaaaggaactcacaacaagaggaaccccgcccggagttcaacgagcgttgtaattctatactgtaaatctacaaaaatttgaaaggaactcacaactttgagtaatttgtttaaaatattaattctgttgtaattctatactgtaaatctacaaaaatttgaaaggaactcacaacaacccatctaccacatacggcattgtgcctgttgtaattctatactgtaaatctacaaaaatttgaaaggaactcacaacttacaatctactgtatttggattttgccaggttgtaattctatactgtaaatctacaaaaatttgaaaggaactcacaacccccgtttgttgaaacgaagtacgtgggttgttgtaattctatactgtaaatctacaaaaatttgaaaggaactcacaaccataagtctctaaagtctccttgtcaacatgttgtaattctatactgtaaatctacaaaaatttgaaaggaactcacaacagtggggagcatcggataaatttcctactagttgtaattctatactgtaaatctacaaaaatttgaaaggaactcacaactagaattaaagaattttgcatcggtagattgttgtaattctatactgtaaatctacaaaaatttgaaaggaactcacaactttgggtgcgcgaaacttggcataaaatatgttgtaattctatactgtaaatctacaaaaatttgaaaggaactcacaacaaaggaagctttgttttttgaaacaatgatgttgtaattctatactgtaaatctacaaaaatttgaaaggaactcacaaccatggaattaacgcgattttgaaaccatttgttgtaattctatactgtaaatctacaaaaatttgaaaggaactcacaacctgtttcgtctttatcaattttgcgggcaagttgtaattctatactgtaaatctacaaaaatttgaaaggaactcacaaccctttttttgtttttaagaattgtaaaagagttgtaattctatactgtaaatctacaaaaatttgaaaggaactcacaacataaatcgagcgtgtttacaaactgttttagttgtaattctatactgtaaatctacaaaaatttgaaaggaactcacaacatgttacagttaggccgtataatagagtaggttgtaattctatactgtaaatctacaaaaatttgaaaggaactcacaacactttggtaattcctttgacggttgcgtttgttgtaattctatactgtaaatctacaaaaatttgaaaggaactcacaacggatagagcttttactttatgaaccgattggttgtaattctatactgtaaatctacaaaaatttgaaaggaactcacaacgttaggaagtaaagtaaaatcatatgctttgttgtaattctatactgtaaatctacaaaaatttgaaaggaactcacaacatacctgtaagcatgtagtttttaagcgcagttgtaattctatactgtaaatctacaaaaatttgaaaggaactcacaacccatttccgtttgttctaaaatctctatgagttgtaattctatactgtaaatctacaaaaatttgaaaggaactcacaaccaccgctagaactatcaaaaacaacattatgttgtaattctatactgtaaatctacaaaaatttgaaaggaactcacaactaccaggaaattctaatactcaactatcaagttgtaattctatactgtaaatctacaaaaatttgaaaggaactcacaactacctgcgttgtctttaaagtctaatcttggttgtaattctatactgtaaatctacaaaaatttgaaaggaactcacaacctcaaaagaaccttgctttttccatgcaatgttgtaattctatactgtaaatctacaaaaatttgaaaggaactcacaacgcgaagtgctgaatagattgaaaaaccttcgttgtaattctatactgtaaatctacaaaaaattaaaaacagtttactccatcaataacattgaaaatgtattaatacttcactttttcaacttacttttcaggcttgattcggttaaatcggtcttcaatattcttaatccttttcaataagtcatcccaattgagactatcacctacaatcatgttttcttgcattgttttataatcttgctcccaatttttgattacttctggtggtggaataatacttaatcttcctttttcgtgtttgtcataattgatgccgcgtaaaggtgttatggtttttctgtgttgtacgatgattgcaaacaattcttcatctgcaagcgctttttctccataatttgaagccattattttgtccaaatcgtacaagtgtctcgttagccgatcggttctaattttatcaactggcttggaaaactcttcgtgaagcaaaagtgttttttcaatgaaagtccgtgttggtacaacaacttgaacatcgaaagcaggatctgtaaaatccaaatttggataatgttcgtcaataaatgattgtacgggttttggctcagaaggttcggttaacgatcttgctcccatttcgagcaatacacgttgttgaatgtattcattggtaatgggaacaaccgattcatagtaaatttctaaagtgttgggatcacttgtatcatcgacatgatcgttgtatttgatttcgtaatcgtcttttggaattcctaatagagttaattgctcaattaactcttccctgaactcattaatgataaacgaaccagaagcttttcggagttttttgattttggaatttgaatcaagatcatcaaaacctaaaaaatgacgatcaataattaaatcaatatcctctgaaaaccgattgattaaatgataagctttactcaaagatgttccgcctttgaaaataatagattccttatattttgactgaaatacagctttcaaaataatgcacacccaccaatctttttcaataacaaaagcgggcaatcccattgaagcgccgacttgctctaaaacctgaatgcgttgttctgtattgagatttatccacatgattttaggctttatagattttatttacttctttctgaatccaaactggagcataacgaagctgtgtgtctacaaccgatttatccagcttcaaaatcgttggtttcagttgatttagaaaatcatcattgacttccttttgacctttttctttgaaagcttgtacaattaagtgcaataaaccatcttttatagcaaagcttttgggtgctgttttcttgaacttaatgcttcgatttccgattcttatttctcgctgcgaaccatccgtaagataaactgctttaagcggaatttgcgtgctaaggcctaataagtacaaagcaagaacaccagttggtgcaatgcgagctttgtctcgttttgcaatttcttttgcaacttcttcgatattaggataaatattccccaacaacggatctattttaggttttaggtaaatgccgtgtgctaaccgtactaaaacatcctccttctccaaccgagaaagcacctgtcgaatattctcaggcgaaccatattttgaaaagtcatctgcgaaaaataattcgccacgtgatgattttaaaatctttgtttctatttgatttttagacatttttgttaaattacacttgttgctgttgtcacaaatttagtaaatatttgtgacacaatagcgtaattcacaataaggattattctgttgtaattctatactgtaaatctacaaaaatttgaaaggaactcacaactaaaaattgtccaatgatttgtccgacaattgtcgtaactctatgactataatttactaaagaactcttataaaaaaaggattactaaagtaatcctttttttatgcacttacgttattagtgttggtgtccgcccgtattgcttaatttagcatttataaaaaatgccccttttacaacaattggtgtattggcgtgtatttcttttacaggagtaatagcggtataccccatatttgatgtaccttttacaatttctaccttttcaaaattcacggttttttcatgttgatgttcggcacctttttcttctgtgtgctctgctccttcttcgtgatggtgttcactagccgcttgattggtttttacaaaaatgtaaaacttaccatcggcctcaacaatagcttcggtaggtaccgcaggggttttaatactgcttaaacttacggcacctgtaatgttcataccgtgtataagaccgtctttattgcccgtaaccttactgtgtacggctatggttttgctatcgttctcaaaagtagagcctatactaaaaacaaccgcctcgtaagttttacctgggttgtttgtaatttcaaactgaataacctgccctattttcattttaggtacatctttttcaaaaacttgtaaatctaaatgaatagaactgttatcaataatttcggcaacgggtgccgacacgtctacataactacctatttgtgcaataattttacttaccgtaccactaataggcgccgtaataaccatgccgttttttaaattttgattgcttacttttaatggattaatccccatcatttgtaactgcttggctaatgatgctttttgtgcgtttaggttttttaattcagccgaagcattttgataattctttttagcaccggcatcgttatcaaacaattctttttgtcttttaaactcttgattggcataggttattttacttaaaaccgttaaatactgctcttgtgctacaacaaactctgggtttgcaatagtggcaattacttgtcctttttttacataagccccctcttgtataggcagtgtttgtattacaccaccaaacatagctgctacacttgccctattgctattgggtacatttaaaagtccgtttgcttttatcatagccgttaactctttttgctcaatagtacccaatgttaccccaaccgcatttatttgctcttctgtaagcgaggctattgtttgaggagcttcatcatgcaaggcttctttttcttctgtatgttgctctgtttttacttcttttgtacaattactcagaaatactagcgctaaaaggctaagaatgatattatttatttttttcattttattgatggataatagcgttaatagtaacaaccgtttgattgatttgctgtatagattctaaatattttaattgaatactagttgccgtttgcaaagcaaaaagatattctacgtacgatatttcgccggttttataacccaactgcgctgcttttacaattttctctgcattgggtattgcctgatttacataatacgtatactgatctaaatcttgcaagtattgcgcggtttcattggcaagctgtgttgttaattgctgtttttgataatttacggtttcttgcaaggcttgtttatcataatctaacgcctttatttttgcttttgtagcaccaaaggtaagcggaatggctatacccaaattaaccgaagtaaatcgatcaagaccattgtaatatctttctactccgtttttttcgtgcataccaatcatagacaaactgttaacaccaaaagaaaactctggcaaaccttcggctttaagtacttgcttgttttgctctttcatttctatttgctgatacaatgcctttatagtagggttgttatcaatggtgttgttttctaaaatagtttgcaacgttaatggggtataattgccttgctttgcaataacaaaattttcattggtgtttaataatacctgtaagcttttataggcattggttaaataaacgttgttttgcttgagcaataaattaatttcgccttgttgtgtttctgcggtattaatctctattttcttaatatcgcctgcttcaaaacgtacagttgcaattctaataaaatctaaatacaaatcatttaacgcttgtagttgctcctgattgtattgtaagtattgtacttgataataataggtacgtacttgctttagcaactcgtttgttgtaatttctttctccatttttttagcattgacttcggatgctaaaacagcctttcgatgtttaaaaagagttggaaaaggaatactttgcgaaatagaaaaaccataatcaaacttaggactgttgtactgccctaactctgtaccaatatttaatttaggcaactcgtttgccgtttgttttaaggcttcgcttgccgatatacttaattgatttgcttttaacaacttattattttctattgccatttgttgcgcctgctcaatagtaataactgaggtttgcgcatgtgaaaatgttgttgttaaaaacagtgctcctataaagaaaggaagcgcatttttaggactcaatttaacttttgaaaattgggtattgaatattaaatacagcataggtaaaacaaataaggttaagaaggtcgccgtaatcaaaccgccaataactacggttgctaaaggcttttgaacttctgcacccgcgcctgttgaaattgccataggtaaaaaccctaacgaagctactgtagcagtcattaatacaggacgtagtcgtgtttttgttccttcaaacacccgttttataatatcggtttcaccttctttttctaattgattgaatgttccaattaagacaattccattcaaaacggcaacaccaaacaacgcaataaaaccgatgccggcactaatactaaacggcatatcacgaataagcaatgcgaaaatacccccaatggcactcattggaattgcagtgaagatgagtattgcttgtttaaaagatttaaaggtaaaatacagcaacataaagatcaacaacaatgcggccggaacggcgattaataatcgttgacttgcagcttgtaggttttcaaattgtccgccgtaagtgaaataatatccagaaggtaatttgatttccttttctaactgggtttgaatgtctttcaccacgctttcaacatcgcgatcttttacattgaaaccaactacaattcttcgtttaccttcttcacgactgatttgggatggacctaatttataatcaacatttgcaacttgtgacaacggaatttgacttcccgttggagttgaaatcatcagattattcacatcatcaatactgcttctatgaaggctatccaaacgaacgaccaaatcaaaacgtctttcattttcaaaaacttgtcctgccacttgtcctgcaaaagcggtacttactgcagtgtttacgtcttcaatcgttaatccgtaattcgccattcgggtacgatcgtattctacgttgatttgtggaagtccgctcacacgctccacttgaggtggcgttgcaccttcaactttctgaataaccttcgcagttttatctgcataaatagctaaggaatctaaattttcaccaaagatttttaccgcaacatcttgacgaacgccggtcatcaactc
